United States Patent Application Publication US 2018/0126003 A1 - sequence listing, part 161

SEQ ID NO: 282562 - DNA, 542 bp, Artificial Sequence
  derived and/or modified sequence
tttattcaaataataggagctctacgagtgacagatggcagaagggcacatcttctgaaaacttactaaaaattggtgaattacaaaattctaaattttaataccttaatcattttgaaagcagttcagacagaaccgaaacagaaatatttggcataaaattccaaatttttatgcttagttttatttttattattaaaagccagcttttgaaagctgtgcaaatatcaggaattgggaagaatgatgatatagtgctactggtaagaaaaatttcttcaatttgttttctctgatatcgaatttgacttggttaaaaaacgtgtgctccagcagtccagaaaagttatatttcttgatcttccattgtttgaagcactggacctttaatccactgtaggtatggacagggaagaaaggaagaccatcaatcagggtcaagaagatgaaatggagatttatggttacaatttgagtcgctggaagcttgccatagtttctttaggagtgatttgctctggtgggtttctcctcctcctcct

SEQ ID NO: 282563 - DNA, 490 bp, Artificial Sequence
  derived and/or modified sequence
gcggcggccgggtcccccgcggtccctggggctggtccggccgcgagggaggccgcggaggaggcggcgcggcggcggccagtgagcggccccgatctgacagacatccctgaatcttggtgtttggacataggagtgatcttccattgtttgaagcactggacctttaatccactgtaggtatggacagggaagaaaggaagaccatcaatcagggtcaagaagatgaaatggagatttatggttacaatttgagtcgctggaagcttgccatagtttctttaggagtgatttgctctggtgggtttctcctcctcctcctctattggatgcctgagtggcgggtgaaagcgacctgtgtcagagctgcaattaaagactgtgaagtagtgctgctgaggactactgatgaattcaaaatgtggttttgtgcaaaaattcgcgttctttctttggaaacttacccagtttcaagtccaaaatctatgtc

SEQ ID NO: 282564 - DNA, 6955 bp, Artificial Sequence
  derived and/or modified sequence
gagcagttcgactttccgcccaaactgggggatgctagaccgcgggcacctctgaatcttatgccttcagtgatataatcctccgtgtccttcgagtccctcctgctgcagacaggtcccctatacttcggtacacacgagcctttcgcgcccaccgcaacgcagcctcgggaggcaggacagacccctgcgagtgtagattgcagctgcatcccagctcccccctccctggcacgctcctccacctacagctgcgctgagctgccgcatctgaacgcaaagcaaacgctgcagtgacggttcctgcgtcaccttaactccaaagtaaatgctaacgtttcccgtgtctgtaccttctctcaatcggcactctcaaaacatctggcacggtgttcactaccctaataagacctcagcttccctcgggaggggagggagcactggcagttgctgggtaatttgaagacgacggtggagggtttggtatcaaccaacagccccaacgtctggtctaagtatggtggcttggagcggctttgcagggacatgcagagcatcctctatcacgggcttatccgtgaccaggcgtgccgccgccagacggattactggcagttcgtgaaagacatccggtggctcagtccccactcagcccttcacgtggagaagttcatcagcgtgcacgagaacgaccagagcagtgctgatggtgccagtgaacgtgctgttgccgagctgtggctgcagcacagcctgcagtaccactgcctctcagcccagctccggcccctgctcggggatagacagtatatcagaaaattctacacagatgctgccttcctgctaagtgacgctcatgtcacggccatgctgcagtgcctggaagcagtggaacagaacaacccccgcctcctggctcagatcgatgcgtccatgtttgccagaaagcacgagagcccgctcctggtgacaaagagccagagcctgacagccctgcccagttccacatacacccctccaaacagctatgctcagcattcctactttgggtccttctctagcctccaccaatccgtgcccaacaatggctcagagagaagatctacttcctttccactctctggccctccccggaaacctcaagaaagcagagggcacgtctcaccagcagaggatcaaaccatccaagcccccccagtttcagtctctgcactagccagggattcccctttgaccccaaatgaaatgagctccagtactctgaccagccccatagaggcatcctgggtcagcagccagaatgattccccaggtgatgccagtgaggggcctgagtacctggccattggcaacttggacccccgaggccggactgccagctgtcagagtcacagcagcaatgccgagagcagcagttccaatttgttctcctccagcagctcccagaagccagattctgctgcctcttccttaggggaccaggaaggaggtggggagagccagctgtccagtgtcctccgcaggtccagcttctcagaggggcagacactcactgtcaccagtggggcaaagaaaagccacattcgctcccattcggataccagcattgcctccaggggagctccaggaggccccaggaatatcaccattatagttgaagatcccattgcagaatcctgcaatgataaggcgaagttgagaggccctttgccctactctggtcaaagcagtgaagtcagcacacccagctctctgtacatggaatatgaaggtggtcggtacctgtgctcaggggaaggcatgttccgaagaccatcagaaggacagtccctcatcagctacctctctgagcaagacttcggcagctgtgccgacctggaaaaggagaatgcccacttcagcatctcagagtccttaattgctgccatcgagctaatgaagtgcaacatgatgagccagtgcctagaggaggaggaagtggaagaggaagacagtgatagagagatccaggagctgaagcagaagatccgccttcggcgccagcaaatccgcaccaagaacctgctccccatgtaccaggaggctgagcacggaagctttcgggtcacctccagcagctcccagttcagctcacgtgattcggcacagctctctgactctggctctgctgatgaggttgatgaatttgaaatccaagatgctgacatcagaaggaacacagcctcaagcagcaaatccttcgtttcctcccagtccttctcccactgcttcctgcactccacgtctgctgaggcggtggccatggggctcctgaagcagtttgaggggatgcagcttccagccgcctcggagctggagtggcttgtcccggagcatgatgcccctcagaagctcctgcccattcctgactcactgcccatctcaccggatgacgggcagcacgctgacatctacaagctgcggattcgtgttcgtggcaacttggagtgggccccgccccggcctcagataatttttaatgttcatccagccccaacgaggaaaattgccgtggccaagcagaattaccgctgtgcaggatgtggcatccggactgaccctgattacatcaagcgactgcggtactgtgagtacctgggcaagtacttctgccagtgctgccacgagaatgcccagatggccatccccagccgggttctgcgcaagtgggacttcagcaagtactacgtcagcaacttctccaaggacctgctcattaagatctggaatgatcctctcttcaacgtgcaggacataaacagtgccctctataggaaggtcaagctgctcaatcaagtccggctgctgcgggtccagctgtgtcacatgaagaacatgttcaagacttgccgactggccaaggagcttctggattcctttgacacagtcccaggccacctgacagaggacctccacctgtactcactgaatgacctgactgcgaccaggaagggggagctggggccccggcttgctgagctcaccagggcaggggctacccatgtggagagatgcatgctctgccaagccaaaggcttcatctgtgagttctgtcagaatgaggatgacatcatctttccctttgagctccataagtgccggacctgtgaagagtgtaaagcgtgttaccataaagcctgcttcaagtctggaagctgtccgcgctgcgagcggctgcaggcccggcgggaggcactggccaggcagagcctggagtcttacctgtcagactacgaggaggagcccgcggaagcgctggccctggaagccgccgtcctggaggccacctgaagaaagcacgtgcagccctccctccgggccgggtcacacctgttgcagaactgagccactctttgaaggactcgccccacctggggcttctttttttttttttttttttaattatcatcatctttttttttttttttactgacttgtctgacgtctgtgtgcagtcagccgtcggcaggttgatgggtccagagtctgtggtgacagataatttgtaaacaccaggtgtttccatcagaactgacatgcgggtccttcagtgaagcttctagtgcctctgtcagtggaagagacagcaagaccaagttcttccagcgtctgtggccttctcctctaggtttcacctgcatgtcaggtatcatttccaattttcctttgtttcagttctggagcttctgagccaggcctttctcaaccacctctcctgctgctgaaacggggatggcgttttccctctccctgtcctggactggggtcagactgtgccccgaggagaagcagcagagaataggactacgtcatgggcatttcgtccacttatttgggtattttgggggccacagaacaatcctgactatcctagactcctcagagacctcagaggcagctgtgaatgtccctatgttgccgggagttcctgtttgaaatatttgaagcatagaggatgccacaagctgactttcttcatctaccttggtgatcttgaagcaaagaacagaactgatgctcaggccaggctcacctgtagccttacgccgcaagcatacgtgaggcgccagctctgtcgctgaaggagcgcttactcagaggagcggtcggccccctcttggtgttaaggtctcttagttaacctggctttttggtgcaggtgtgatctttgaagctcaggcaggtccctgatgccatcctaaggtgaggacaggaacctcacccaccatcttcttagcgtgtccctgatgactctgtcctctgttagatggtcgttgtgcttctgagtaaaagtacaacccgactccgttctctccccttcctgcagcagagctgggtccttccctggtggccgagtctctcttgccttagcttctttggtcaaagttggagaaaagcttcctgctattagtgctgttacagaacttgacggtttgtggatgtgagtgtgaatgtccctgtgttcttgggataacaagagcctttatgccaattatgcacttaactctgtgtagcctggtaatgtttatctgttcatttgataatgctgattttagtgtgctgcccccctccccccgttaatgtgtgttgatggtgaagtccttttgataatgctgattttggtgtgctgcctcccccttcccccccgttaatgtgtgtgttgacagtgaagtccttgggtggggccatgtgtgtgtttgtgatgttccttaagttgatgcagcttctaacctctgtgaaaacactggtcagagtggcttctccaagagctggcagctctgtgaactaaagcctgcatcatttttgttctgggattgaattctgcccatgggcatgtcttctcatagttgcttgctggtaggaaagaaatgggcgtgggtgctgccctggaagctgagcggaaagttgcctgtggttggtggaagctgatgagagcttgagctggcggtaagaaggagtctcccagggaagtgggagaggcattaaggtgatggccagggctgaggctccaccagcgtgagagggaacatgtgggaactggcccctgcccttgattcctctgcctcaaagttgggatctgaaagccatgtagggctagaagaccctgaggctgttctcccttctgttcatagtgagactcaaaaagccaagtcccagaagttctgaagggctgtgactagaagtgcccaggtccttcagggagctttaagaatgaccccacagaactcaagtttaactaggggttaggtcccagattcagacccaggagtttataaaaatgagctctacttccagttttggtttaaattacacatccaggccaggcacagtggctcacacctgtaatcccagcactttgggaggccagtgcgggcggatcatgaggtcaggagtttgagaccagcctggccaatgtggtgaaaccctgtctcttccaaaaatacaaaaattagctgggcgtggtggcacacgcctgtaatcccagctacttgggaggctgaggcaggagaatcgcttgaacctgggaggcagaggttgcagtgagccgagattgcgccaccgcactccagcctgggtgacagagtgagactccgtctcaaaaaacaaaaaggtgacacatccagctctttctccaggtcactgcgctggaggacagatgtgccgtcttgtcctgcctgtttcacatcagcataggatcaaaggatgacaatgctgacagcttctgaagccgaactcaacagtctcataggctcctcacttgtcacttatttttccctagctccctcaaccgcaccccatccctttagatcgtgcgtctgttttagtgactctgacacgatgccgtcctcaccttccaaatacccagttatttattcaagaggggggaagtgggtagaggatgggatgttttggaagcactttgcaagttaccactatctgaaaatcccctgctgttgcggggagaagctttgaatgcactgaagagaattccttctaaatgaaggcaggtgatagtgttctttctgtaagtaaagggaaagaaaaaaaacatagtttgcttaccaggtggagacaagattcaagacatagcagaagagtggaagacaaatattttccacttaaatgaggctgtttttgacgttctctgccaaggatttagagctttcgttgaactaacataaaaggagtgcgagtcttagtagagatgttccgtgtgtgccgcccgtgctctgaactgcgtttccacctgctgtggtgcttgtgcagcctggcagttcattgtcatctttaataaactaaggaaataaaattctgtctttcgtcagcctgccttgactgtcaagaaatggcatgtgtccactgtaaagcaggtatatctgaacattgagaaggtttctgtgttataatgtaaagcaaactggaccacacacatcaaggaaagtgaggtggagtggctgtgtctctaacttgccatgagacctcgagcgaaccacttcacttctctgggtttctggtgcatggtgtaactgtcacttaaaatgaggtgtcttcctctccgcaacatctgacttgccttagatgcttcagttcccacttctgtgagcagctagcatctttctcttctgctcctggcccactggagctccagctctacgctgcaactctctcaacatttccccttaaatgtccccttgtcatctccaaccagtgtgtctaaaaccagcataaattccgtatttccaaaaacctaaccattagtcacccaggtttgaaaattaattgtcttcaacttcctctgtaagtggcacactgagctcatcacgcatcgtctcattcctactccctgtcatcaagttctgtggatgttttcctctaaaataaatctctcattacttttctgccactagcacacaaa

SEQ ID NO: 282565 - protein, 165 aa, Artificial Sequence
  derived and/or modified sequence
  misc_feature (1)..(1): Xaa can be any naturally occurring amino acid
XSSSSSSGNPLVYLDVDANGKPLGRVVLELKADVVPKTAENFRALCTGEKGFGYKGSTFHRVIPSFMCQAGDFTNHNGTGGKSIYGSRFPDENFTLKHVGPGVLSMANAGPNTNGSQFFICTIKTDWSMALDDIALHCCSPGSPVLTGWMASMLCSVTSKRAWTS

SEQ ID NO: 282566 - DNA, 468 bp, Artificial Sequence
  derived and/or modified sequence
atgctagcccttagatgcggcagcaggtggctcggccttctgtccgtccccaggtcggtgcccctaagattgcccgcagcccgggcgtgttcgaaggggtcgggagacccttcttcatcctcttcttccggtaaccccctcgtctacctggatgttgacgctaacggtaagcccctcgggcgcgtagtgctggagctgaaagccgacgtggtacctaaaacggctgaaaattttcgcgccttgtgtacaggcgagaagggctttggctacaaaggcagtacctttcaccgggtgattccatcttttatgtgccaagcaggcgatttcacaaaccacaatggcacagggggcaaatcaatatacggttctagattccccgacgaaaatttcacactcaaacacgtcgggccaggatggatggcctccatgctctgcagtgttacctctaagcgggcgtggacaagttag

SEQ ID NO: 282567 - DNA, 498 bp, Artificial Sequence
  derived and/or modified sequence
tagtcatcctcaagttcgtcaggcaaccctctcgtgtaccttgatgtggacgccaacggtaaacctttaggacgagttgtgctggaattgaaggccgatgtggtgccaaagaccgccgagaactttagagcgctttgcactggggaaaaaggatttggctacaaaggtagtaccttccacagggtgattccaagtttcatgtgccaggcaggagatttcaccaaccataacggaacaggcgggaagtcaatttacggcagtagattccccgacgagaatttcacgttaaagcatgttggtcctggagttcttagcatggctaacgctgggccaaatacaaacgggtcccagttcttcatatgtaccataaagactgattggagtatggcgttggacgacatagccctccactgctgcagtcctggcagccctgtgctgacggggtggatggcttcaatgctatgctcagtcacctctaagagggcttggacaagttag

SEQ ID NO: 282568 - DNA, 468 bp, Artificial Sequence
  derived and/or modified sequence
atgctggccctgcgctgtggcagccgctggctgggcctgctgtctgtgcccaggtctgtgcccctgcggctgcctgctgcccgggcctgcagcaagggcagcggggaccccagcagcagcagcagcagcggcaaccccctggtgtacctggatgtggatgccaacgggaagcccctgggccgggtggtgctggagctgaaggcagatgtggtgcccaagacagctgagaacttccgggccctgtgcacaggagagaagggcttcggctacaagggcagcaccttccacagggtcatccccagcttcatgtgccaggccggggacttcaccaaccacaatggaactggaggcaagagcatctacggcagccgcttcccagatgagaacttcaccctgaagcacgtgggccctggctggatggcctccatgctgtgcagcgtgaccagcaagagggcctggaccagctag

SEQ ID NO: 282569 - DNA, 498 bp, Artificial Sequence
  derived and/or modified sequence
tgaagcagcagcagcagcagcggcaaccccctggtgtacctggatgtggatgccaacgggaagcccctgggccgggtggtgctggagctgaaggcagatgtggtgcccaagacagctgagaacttccgggccctgtgcacaggagagaagggcttcggctacaagggcagcaccttccacagggtcatccccagcttcatgtgccaggccggggacttcaccaaccacaatggaactggaggcaagagcatctacggcagccgcttcccagatgagaacttcaccctgaagcacgtgggccctggggtgctgtccatggccaatgccggccccaacaccaacggcagccagttcttcatctgcaccatcaagacagactggagcatggccctggatgacatcgccctgcactgctgcagccctggcagccctgtgctgaccggctggatggcctccatgctgtgcagcgtgaccagcaagagggcctggaccagctag

SEQ ID NO: 282570 - DNA, 468 bp, Artificial Sequence
  derived and/or modified sequence
atgctggccctgcggtgcggcagccggtggctgggcctgctgagcgtgccccggagtgtacctctgaggctgccggctgccagagcatgctccaaggggagcggcgacccaagctcgagcagctcgtctgggaaccctctggtctatctcgacgtcgatgccaacggtaagcccctgggacgggtggttttagaactgaaggccgatgttgttcccaagacggctgaaaactttcgggccttatgcactggagaaaagggatttggctacaaagggtcaacgtttcacagggtcatcccctccttcatgtgtcaggccggggatttcactaatcacaatggtacgggcggtaagtcaatttatggaagtcgtttcccggacgagaactttactttgaagcatgtcgggcccggatggatggctagcatgctgtgtagtgtgacaagcaagagagcgtggacctcctag

SEQ ID NO: 282571 - DNA, 498 bp, Artificial Sequence
  derived and/or modified sequence
tgaagcagcagcagcagcagcggcaaccccctggtgtacctggacgtcgatgcgaacggaaaaccactgggccgggttgtgctcgaactcaaagccgatgtggtcccgaaaacggctgaaaactttcgggccctgtgcacaggtgaaaaagggtttgggtacaaggggtcaacattccacagagtgatccccagctttatgtgccaagccggtgactttacgaatcacaacggcacaggcggcaagagtatctatgggagccggtttccagacgaaaactttacgcttaagcatgtcggacctggcgttctctcgatggcgaatgccggccccaacactaatggttcgcagttcttcatctgtactatcaaaactgactggtccatggccctcgacgatatcgctttgcactgttgttctcctgggtcaccagttcttaccggatggatggctagcatgctgtgctcagtcacttccaaaagagcctggacaagttag

SEQ ID NO: 282572 - DNA, 821 bp, Artificial Sequence
  derived and/or modified sequence
cgtcctcttcctcctcctccgggaacccgctcgtgtacctggacgtggacgccaacgggaagccgctcggccgcgtggtgctggagctgaaggcagatgtcgtcccaaagacagctgagaacttcagagccctgtgcactggtgagaagggcttcggctacaaaggctccaccttccacagggtgatcccttccttcatgtgccaggcgggcgacttcaccaaccacaatggcacaggcgggaagtccatctacggaagccgctttcctgacgagaactttacactgaagcacgtggggccaggtgtcctgtccatggctaatgctggtcctaacaccaacggctcccagttcttcatctgcaccataaagacagactggtccatggcattggatgacattgcgctacactgttgctcacccgggtcacccgtcctcacaggttggatggcaagcatgttgtgttcggtcacgtcaaagagggcatggacgtcgtgaagaaaatagaatctttcggctctaagagtgggaggacatccaagaagattgtcatcacagactgtggccagttgagctaatctgtggccagggtgctggcatggtggcagctgcaaatgtccatgcacccaggtggccgcgttgggctgtcagccaaggtgcctgaaacgatacgtgtgcccactccactgtcacagtgtgcctgaggaaggctgctagggatgttagacctcggccaggacccaccacattgcttcctaatacccacccttcctcacgacctcatttctgggcatctttgtggacatgatgtcacccacccct

SEQ ID NO: 282573 - DNA, 468 bp, Artificial Sequence
  derived and/or modified sequence
atgctcgctttgagatgcggttctaggtggctcggcctattaagtgtaccgaggagcgtccccctgaggctccccgctgccagagcatgttccaaaggctccggcgatccctcttccagctctagtagcggaaacccattggtgtatctcgacgtggacgctaatggcaagccattgggaagggtggttctcgagctgaaggcagacgtggttcccaagacggcagaaaacttccgcgcattgtgtacaggggaaaaggggttcggctacaaagggtctacttttcatagagtcatcccctcatttatgtgtcaggctggagactttactaatcacaatgggacaggcggaaagagtatttacggtagcaggtttcctgatgaaaattttactctgaagcacgttggacccggatggatggctagtatgctgtgcagcgtaacctccaagagggcttggacctcctag

SEQ ID NO: 282574 - DNA, 498 bp, Artificial Sequence
  derived and/or modified sequence
tgatcctcctcatcaagctctggtaatcccctggtgtacctcgacgtcgacgcaaatggaaaaccattgggtcgggtcgtgctggagctgaaagccgacgtggtcccaaaaaccgccgagaacttcagggcactgtgtactggagagaaggggtttggctataaaggatcgacctttcaccgggtgatcccgagctttatgtgccaagccggtgacttcacaaaccataatgggaccggcggaaaaagcatttacgggtccagatttcccgacgaaaattttacgttgaagcatgttggtccaggcgtgctaagcatggctaacgccggacccaataccaacggcagccagttttttatttgtaccattaagacagattggtctatggcgttggatgacatcgcattgcactgttgttctcccggatctcctgtgctgacggggtggatggcaagtatgctgtgctcagtgacctctaagagagcatggacatcttag

SEQ ID NO: 282575 - DNA, 468 bp, Artificial Sequence
  derived and/or modified sequence
atgctggccctgagatgcggcagcagatggctgggcctgctgagcgtgcccagaagcgtgcccctgagactgcccgccgccagagcctgcagcaagggcagcggcgaccccagcagcagcagcagcagcggcaaccccctggtgtacctggacgtggacgccaacggcaagcccctgggcagagtggtgctggagctgaaggccgacgtggtgcccaagaccgccgagaacttcagagccctgtgcaccggcgagaagggcttcggctacaagggcagcaccttccacagagtgatccccagcttcatgtgccaggccggcgacttcaccaaccacaacggcaccggcggcaagagcatctacggcagcagattccccgacgagaacttcaccctgaagcacgtgggccccggctggatggccagcatgctgtgcagcgtgaccagcaagagagcctggaccagctag

SEQ ID NO: 282576 - DNA, 498 bp, Artificial Sequence
  derived and/or modified sequence
tgaagcagcagcagcagcagcggcaaccccctggtgtacctggacgtggacgccaacggcaagcccctgggcagagtggtgctggagctgaaggccgacgtggtgcccaagaccgccgagaacttcagagccctgtgcaccggcgagaagggcttcggctacaagggcagcaccttccacagagtgatccccagcttcatgtgccaggccggcgacttcaccaaccacaacggcaccggcggcaagagcatctacggcagcagattccccgacgagaacttcaccctgaagcacgtgggccccggcgtgctgagcatggccaacgccggccccaacaccaacggcagccagttcttcatctgcaccatcaagaccgactggagcatggccctggacgacatcgccctgcactgctgcagccccggcagccccgtgctgaccggctggatggccagcatgctgtgcagcgtgaccagcaagagagcctggaccagctag

SEQ ID NO: 282577 - protein, 275 aa, Artificial Sequence
  derived and/or modified sequence
MNMTQARVLVAAVVGLVAVLLYASIHKIEEGHLAVYYRGGALLTSPSGPGYHIMLPFITTFRSVQTTLQTDEVKNVPCGTSGGVMIYIDRIEVVNMLAPYAVFDIVRNYTADYDKTLIFNKIHHELNQFCSAHTLQEVYIELFDQIDENLKQALQKDLNLMAPGLTIQAVRVTKPKIPEAIRRNFELMEAEKTKLLIAAQKQKVVEKEAETERKKAVIEAEKIAQVAKIRFQQKVMEKETEKRISEIEDAAFLAREKAKADAEYYAAHKYATSNK

SEQ ID NO: 282578 - protein, 232 aa, Artificial Sequence
  derived and/or modified sequence
MIYIDRIEVVNMLAPYAVFDIVRNYTADYDKTLIFNKIHHELNQFCSAHTLQEVYIELFDQIDENLKQALQKDLNLMAPGLTIQAVRVTKPKIPEAIRRNFELMEAEKTKLLIAAQKQKVVEKEAETERKKAVIEAEKIAQVAKIRFQQKVMEKETEKRISEIEDAAFLAREKAKADAEYYAAHKYATSNKHKLTPEYLELKKYQAIASNSKIYFGSNIPNMFSISRCGPRG

SEQ ID NO: 282579 - protein, 348 aa, Artificial Sequence
  derived and/or modified sequence
MNMTQARVLVAAVVGLVAVLLYASIHKIEEGHLAVYYRGGALLTSPSGPGYHIMLPFITTFRSVQTTLQTDEVKNVPCGTSGGVMIYIDRIEVVNMLAPYAVFDIVRNYTADYDKTLIFNKIHHELNQFCSAHTLQEVYIELFDQIDENLKQALQKDLNLMAPGLTIQAVRVTKPKIPEAIRRNFELMEAEKTKLLIAAQKQKVVEKEAETERKKAVIEAEKIAQVAKIRFQQKVMEKETEKRISEIEDAAFLAREKAKADAEYYAAHKYATSNKHKLTPEYLELKKYQAIASNSKIYFGSNIPNMFVDSSCALKYSDIRTGRESSLPSKEALEPSGENVIQNKESTG

SEQ ID NO: 282580 - DNA, 828 bp, Artificial Sequence
  derived and/or modified sequence
atgaacatgacgcaggctagagtcctggtcgcagctgtggtgggactcgtggccgtgctcctatacgccagcatccacaaaatcgaggaagggcatctggctgtttattacagagggggtgccctcctgactagtccctccggaccagggtatcatattatgctccctttcattactaccttcagaagtgtgcagacgaccctccagactgatgaagttaaaaacgtgccatgtggaacgtctggcggtgttatgatatatatcgacagaatagaagtggtaaatatgttggcgccctatgccgtttttgatatagtgcggaattataccgccgattacgacaagactctgatctttaacaagatccaccacgaactcaaccaattctgtagcgctcatacgcttcaggaggtctacattgagctgtttgatcagatcgatgagaacctgaagcaggcactccagaaagatctcaacctgatggcccccgggctgactatccaggccgtgagggtgaccaaacctaaaattcctgaagccatcaggagaaactttgaactcatggaggcagaaaaaaccaagttgctcattgcagcacagaaacagaaagtcgtggagaaagaggctgagactgaaaggaagaaggccgttattgaagcagagaagatcgctcaggtggctaagattaggttccagcaaaaagtgatggagaaggagacagaaaagcgtatctccgaaatcgaagacgctgcatttctggcacgcgaaaaggccaaagccgatgccgaatactatgctgcccacaagtatgccacctcaaataaatag

SEQ ID NO: 282581 - DNA, 1047 bp, Artificial Sequence
  derived and/or modified sequence
atgaacatgacacaagcccgggtcctagtcgcagcagtggtcggactggtggctgtcctgctttatgcttcgatccacaagatcgaagaaggacacttggcggtgtactacagaggtggtgccctgctgacgagtccgagtgggcctggataccacattatgttgcccttcatcaccacctttcgctcagtgcagacaaccctgcagactgacgaggtgaaaaacgttccctgcggaacatccggcggagtgatgatttatatcgatagaattgaggtagtgaacatgctcgcaccatacgccgtattcgatatcgtcaggaactacacagccgactacgacaagacgctgattttcaataagattcaccacgaactgaaccaattctgcagtgcacatacacttcaagaggtgtacattgaactttttgaccaaattgacgagaatctgaagcaggcattgcagaaggatctgaatttgatggctcctggcctcactattcaggccgtgcgtgtgactaagcccaagattcccgaagctatcagaagaaattttgaactgatggaagctgaaaagaccaagctgctcatcgctgctcagaaacagaaggttgtggaaaaggaagcggaaactgaacgcaagaaagccgttatcgaggccgaaaagattgctcaggtggccaagattagatttcagcagaaggttatggagaaggagacagagaaacgcattagtgagatcgaggatgcagctttcctggcgcgagaaaaagctaaagccgatgcagagtattacgcagcccacaagtacgctactagtaataaacacaagctgacccctgaatacctcgaactgaaaaagtaccaggcaatcgctagtaattcgaaaatttatttcggatcaaacatcccaaacatgttcgtagacagcagctgtgccctgaagtactcggacatcaggacggggcgggagagcagccttccctcaaaagaagccctggaaccgtcaggggagaatgtgattcagaacaaggagtctaccgggtag

SEQ ID NO: 282582 - DNA, 1047 bp, Artificial Sequence
  derived and/or modified sequence
atgaacatgacccaagctcgagtactggtggccgcagtggtgggccttgttgcggtgctgctgtacgcgtccatccataaaatcgaagagggacatctagccgtatattatcgcgggggcgccctactgacatctccctcaggtcccggttatcatatcatgttgccctttataaccactttccgctccgtgcagaccaccctccagacagacgaggtaaagaatgtgccttgcggaacgtccgggggcgtgatgatttatatcgaccgaatcgaggtagttaacatgctggcaccatacgctgtcttcgatattgtaagaaattatactgccgattacgacaagacgcttattttcaacaaaatacatcacgaattgaaccagttctgctccgcccacaccctccaggaagtctatattgagcttttcgaccagattgacgaaaatcttaaacaagccctgcagaaagacctcaatcttatggcccccgggttaacgattcaggccgtgagggttacaaagccaaagattcccgaggcaatccggcggaactttgagctgatggaggccgaaaaaactaaactgttgatagcggcgcagaaacagaaggttgttgagaaagaagctgagaccgaaaggaaaaaagccgtcattgaagcagaaaaaattgcccaggtagccaagattaggttccaacaaaaggtcatggagaaagagaccgagaaacgcatctctgagatcgaggacgccgctttcttggccagagaaaaggcaaaagcagacgccgaatactatgcagcccacaagtatgccaccagcaataaacacaaactgacacccgagtacctcgagttaaaaaagtaccaggctatagcttccaatagcaaaatatatttcggaagcaatatcccgaatatgttcgtggactcatcatgtgcattgaagtactccgatatccggaccggccgggaatcctcacttccctccaaggaggcactggaacccagcggagaaaacgttattcaaaataaggagagtacggggtag

SEQ ID NO: 282583 - DNA, 828 bp, Artificial Sequence
  derived and/or modified sequence
atgaacatgacccaggcccgggtgctggtggccgctgtggtgggcctggtggccgtgctgctgtatgccagcatccacaagattgaggagggccacctggccgtgtactacagaggaggagccctgctgaccagccccagcggccctggctaccacatcatgctgcccttcatcaccaccttccgctctgtgcagaccaccctgcagacagatgaggtgaagaatgtgccctgtggcaccagcggaggagtgatgatctacatcgacagaattgaggtggtgaacatgctggccccctatgctgtgtttgatattgtgaggaactacacagctgactatgacaagaccctcatcttcaacaagatccaccacgagctgaaccagttctgcagcgcccacaccctgcaggaggtgtacatcgagctgtttgaccagattgatgagaacctgaagcaggccctgcagaaggacctgaacctgatggcccctggcctgaccatccaggccgtgcgggtgaccaagcccaagatccctgaggccatcagaagaaactttgagctgatggaggccgagaagaccaagctgctgattgctgcccagaagcagaaggtggtggagaaggaggccgagacagagaggaagaaggccgtcatcgaggccgagaagatcgcccaggtggccaagatccgcttccagcagaaggtgatggagaaggagacagagaagaggatcagcgagattgaagatgctgccttcctggcccgggagaaggccaaggcagatgctgagtactatgctgcccacaagtatgccaccagcaacaagtag

SEQ ID NO: 282584 - DNA, 1047 bp, Artificial Sequence
  derived and/or modified sequence
atgaacatgacccaggcccgggtgctggtggccgctgtggtgggcctggtggccgtgctgctgtatgccagcatccacaagattgaggagggccacctggccgtgtactacagaggaggagccctgctgaccagccccagcggccctggctaccacatcatgctgcccttcatcaccaccttccgctctgtgcagaccaccctgcagacagatgaggtgaagaatgtgccctgtggcaccagcggaggagtgatgatctacatcgacagaattgaggtggtgaacatgctggccccctatgctgtgtttgatattgtgaggaactacacagctgactatgacaagaccctcatcttcaacaagatccaccacgagctgaaccagttctgcagcgcccacaccctgcaggaggtgtacatcgagctgtttgaccagattgatgagaacctgaagcaggccctgcagaaggacctgaacctgatggcccctggcctgaccatccaggccgtgcgggtgaccaagcccaagatccctgaggccatcagaagaaactttgagctgatggaggccgagaagaccaagctgctgattgctgcccagaagcagaaggtggtggagaaggaggccgagacagagaggaagaaggccgtcatcgaggccgagaagatcgcccaggtggccaagatccgcttccagcagaaggtgatggagaaggagacagagaagaggatcagcgagattgaagatgctgccttcctggcccgggagaaggccaaggcagatgctgagtactatgctgcccacaagtatgccaccagcaacaagcacaagctgaccccagagtacctggagctgaagaagtaccaggccatcgccagcaacagcaagatctacttcggcagcaacatccccaacatgtttgtggacagcagctgtgccctgaagtacagcgacatcagaacaggccgggagagcagcctgcccagcaaggaggccctggagcccagcggggagaatgtcatccagaacaaggagagcactggatag

SEQ ID NO: 282585 - DNA, 828 bp, Artificial Sequence
  derived and/or modified sequence
atgaacatgacccaggcccgggtgctggtggccgccgtggtgggcctggtggccgttctactctatgccagcatccacaaaatcgaggagggacaccttgccgtatattatcgaggtggcgccctcttaacttcacccagcgggccaggttaccatattatgctacccttcatcacgacattcagatcagtgcagaccacgctgcagactgatgaggtaaaaaatgtcccttgtggaactagtgggggtgttatgatctacatagaccgcattgaagtggtgaatatgttggccccgtacgcggtgttcgacatcgtcagaaattacacagctgattacgacaagacactcatattcaataagatccatcacgagttgaatcaattctgttccgcccatactttgcaggaggtctatattgaattgttcgatcaaatcgatgagaacttgaaacaagcgcttcagaaggatctcaaccttatggcccctgggctgaccatccaggcagtcagggtcacaaagcccaagatcccggaagccatacggcgaaactttgaactcatggaagccgaaaagactaaactactgatcgcagcccaaaagcaaaaagtcgttgagaaagaggccgagaccgagcgcaagaaagccgtcatcgaggccgagaagatcgctcaggtggccaaaatccgctttcagcagaaagtgatggaaaaggaaaccgaaaagcggatcagcgagattgaagatgcagctttcttggctagagagaaggcgaaagctgatgccgagtactatgctgctcacaaatacgcaacatctaataaatag

SEQ ID NO: 282586 - DNA, 1047 bp, Artificial Sequence
  derived and/or modified sequence
atgaacatgacccaggcccgggtgctggtggccgccgtggtgggcctagtggcggtactgttatatgcttctattcacaaaattgaagaaggacatctggcggtgtattaccgcggtggcgccctgttgacctccccaagcggccctgggtaccacattatgctgccattcattacaaccttcagatctgtgcagacaacattgcagaccgacgaggtaaagaacgtaccctgtggcacatctggcggggtgatgatctatattgatcggatcgaagtggtgaatatgttggctccatacgccgtgttcgatatagtgcgcaactatactgcggattacgataagacgcttatcttcaacaagatccaccacgaactcaaccaattctgttcagcgcatacacttcaggaggtctacatcgaactgttcgatcagatcgacgaaaacctgaaacaggctctgcaaaaggacctcaacctgatggcgccaggactgaccattcaggccgtgagagttacgaagccaaaaattcccgaggctatcaggcgcaacttcgaactgatggaagcagagaagacaaaactcctgatcgcagctcagaagcaaaaggtggttgagaaagaagccgagactgagcgcaaaaaagcagtgattgaggccgagaagattgcccaggtcgcaaaaatccggtttcagcagaaggtgatggaaaaggagacagaaaaacgcattagcgagattgaggatgccgccttcttggccagagaaaaggctaaggccgacgctgagtattatgcagcccacaaatatgctacatcaaacaaacacaaactgacacccgaatacctggaactgaaaaagtatcaggctatcgctagcaattccaaaatttacttcgggtccaatattccaaacatgttcgtcgacagttcctgtgcgctcaagtattctgacatcagaactgggcgcgagtcttcactcccatccaaggaggccctggaaccatcaggcgaaaacgtgatacagaataaagaatccacaggctag

SEQ ID NO: 282587 - DNA, 1047 bp, Artificial Sequence
  derived and/or modified sequence
atgaacatgacccaggcccgggtgctggtggccgccgtggtgggcctcgtggccgttcttctttatgcgtccattcataaaattgaggaaggacacctggccgtctattacagaggcggagcgctgcttacaagtccgtcgggcccagggtatcacataatgctcccttttattactaccttccggtccgtccagactacccttcagactgatgaggtaaagaacgtgccctgcggaaccagcggcggcgtcatgatttatattgaccgcattgaagtcgtcaatatgctggccccgtacgccgtctttgacattgtcagaaattataccgccgattatgacaaaacattaatcttcaacaaaatccatcacgagctgaaccagttctgctccgctcatactctgcaagaggtatacattgagctgtttgaccagatcgatgaaaatctcaaacaggctcttcagaaggatttaaatctgatggcaccagggttgacgattcaggcagtgagggtgacgaaacccaagatccctgaggccattaggaggaatttcgaattgatggaggccgaaaagaccaagttattaatcgcggcgcagaagcagaaagtggtggagaaagaggcggaaaccgagcgaaagaaagccgtgatcgaggccgagaagattgctcaagtggccaagatccgttttcagcagaaagttatggaaaaggaaaccgagaagcgaatcagtgagatagaagacgccgcctttctcgctcgggaaaaggccaaagccgatgccgagtattatgcagctcacaagtatgccacctccaataagcataagttaactcccgagtatttggaattaaaaaagtatcaggccattgcatctaacagtaagatctattttggaagtaatatccccaacatgttcgtcgactcctcttgcgcgttaaagtatagcgatatccgtacaggccgtgagtctagtctgccttccaaagaagccttggaaccaagtggcgagaatgtgatccagaacaaagagagcactggctag

SEQ ID NO: 282588 - DNA, 828 bp, Artificial Sequence
  derived and/or modified sequence
atgaatatgactcaggctagagtgctggtcgccgcagtggttggcctcgttgcagttctactatacgcctcgatccataaaatcgaggaggggcatctggccgtttattatcggggaggagcactgcttacgagcccctcaggccctgggtaccatatcatgttgccctttatcacgaccttcaggtctgtccaaacaaccctccagacggacgaggttaaaaacgttccatgcggtacttcggggggtgtcatgatctatatcgacaggatcgaggtggtgaacatgttagctccatacgctgtgttcgacatcgtccgaaattatacagctgactatgataagactttgatctttaacaagattcatcacgaactgaaccagttctgttcagcacacactctgcaggaagtctatatagagctgtttgatcagatcgacgagaatctgaaacaggcactgcagaaggacctgaatttaatggcgccagggctgacaattcaggcagtgagggttacaaagcctaaaatacctgaggccatccggagaaatttcgaattgatggaggccgagaagactaagctcctcattgctgctcaaaagcagaaggttgtggagaaggaagcagaaactgaacgcaagaaggccgttatcgaggcggaaaaaatcgcccaggtggcaaaaattaggtttcagcagaaagtgatggagaaggagaccgagaagaggatttcggaaattgaggacgcggcttttttagctcgtgaaaaagcaaaagccgatgcagaatactacgctgctcataagtacgccacctccaataagtag

SEQ ID NO: 282589 - DNA, 1047 bp, Artificial Sequence
  derived and/or modified sequence
atgaacatgacccaggccagggtgctcgttgccgcagtggtcggtctcgtggccgtactgctgtacgcctccatccataagatagaggaaggtcatctagcagtatactaccggggaggagccctgctaacctctccctcagggccaggctatcatattatgctcccatttataacaactttcagatcagtccagactacactgcagacagatgaggtcaaaaatgtaccttgtggcacttccggcggtgttatgatttacattgaccggatcgaagttgtgaatatgttagctccttacgcagtgttcgacatcgtgagaaattacaccgcagattacgataagaccctgattttcaacaagatacatcacgagctgaatcaattctgttcagcgcacacactccaggaggtgtacatcgagctctttgatcagatcgacgaaaatcttaagcaggcattacaaaaggacctgaatctgatggctcctgggctcaccattcaggctgtgcgggttacaaaaccaaagatccctgaggctatcaggcgtaatttcgagctgatggaagcggagaagacgaaattgctgattgcagcgcagaagcagaaagtggtcgaaaaagaggcagagaccgaacgcaagaaggctgtgattgaagctgagaaaatcgctcaggtggccaagatccgtttccagcagaaggttatggagaaagagacagaaaagagaatttctgaaattgaagatgctgccttcttagcccgagagaaggctaaggcggatgcagagtattacgcagcccacaagtacgccacgtccaacaaacataaactgactccagagtatcttgagctaaaaaaataccaggccatcgctagtaactccaaaatttatttcgggagcaatatccccaacatgttcgtggactcttcttgcgcactgaaatattccgatatcagaacaggccgagagagcagtctgccatcaaaggaggccttggaaccaagtggcgagaatgtcattcagaataaagaatcaaccggatag

SEQ ID NO: 282590 - DNA, 1047 bp, Artificial Sequence
  derived and/or modified sequence
atgaacatgacccaggcaagggtactggtggcggcagtcgtgggcctggttgctgtgctgctctatgcaagtattcacaagatagaagaaggacatctggcagtttactatcgcggaggcgcacttctcacaagtccctccggacctgggtaccacatcatgctacccttcatcactacttttcgcagcgttcagacaacacttcagacagatgaagtgaaaaatgttccctgtggtacctccggaggggtgatgatctatattgatagaatcgaagtcgtcaatatgctggctccatacgcagtattcgatatagtgagaaactacaccgcggattacgataaaactctcattttcaataagatccatcatgagcttaatcaattttgcagcgcccataccttacaagaggtatacatcgagttgttcgatcaaatagacgagaacttgaaacaagccctgcagaaagaccttaacttgatggcgccaggtctgacaattcaggccgtacgagtcactaagccaaagatccccgaagcaattaggcgaaactttgagctgatggaggccgagaaaacgaaactgttaattgcggcacaaaagcagaaagtcgtcgagaaggaagcagagacggagcgaaagaaagccgtaatagaggccgaaaagatcgcgcaggtggcgaagattagattccagcagaaggttatggagaaggaaacagagaagagaatctccgagattgaagacgccgcatttcttgccagggaaaaagctaaggcggatgctgagtactacgccgcacacaagtacgctacgtctaataaacacaaactgactcctgagtacctggagctgaagaaataccaggccattgcttcaaactctaagatctacttcggctctaacattccaaatatgttcgtggactcttcctgcgccctaaagtactcagacatacgaaccggtcgcgaaagtagtcttcctagcaaagaggccttggaaccgagcggcgagaatgtgatccaaaataaggaaagtaccgggtag

SEQ ID NO: 282591 - DNA, 828 bp, Artificial Sequence
  derived and/or modified sequence
atgaacatgacccaggccagagtgctggtggccgccgtggtgggcctggtggccgtgctgctgtacgccagcatccacaagatcgaggagggccacctggccgtgtactacagaggcggcgccctgctgaccagccccagcggccccggctaccacatcatgctgcccttcatcaccaccttcagaagcgtgcagaccaccctgcagaccgacgaggtgaagaacgtgccctgcggcaccagcggcggcgtgatgatctacatcgacagaatcgaggtggtgaacatgctggccccctacgccgtgttcgacatcgtgagaaactacaccgccgactacgacaagaccctgatcttcaacaagatccaccacgagctgaaccagttctgcagcgcccacaccctgcaggaggtgtacatcgagctgttcgaccagatcgacgagaacctgaagcaggccctgcagaaggacctgaacctgatggcccccggcctgaccatccaggccgtgagagtgaccaagcccaagatccccgaggccatcagaagaaacttcgagctgatggaggccgagaagaccaagctgctgatcgccgcccagaagcagaaggtggtggagaaggaggccgagaccgagagaaagaaggccgtgatcgaggccgagaagatcgcccaggtggccaagatcagattccagcagaaggtgatggagaaggagaccgagaagagaatcagcgagatcgaggacgccgccttcctggccagagagaaggccaaggccgacgccgagtactacgccgcccacaagtacgccaccagcaacaagtag

SEQ ID NO: 282592 - DNA, 1047 bp, Artificial Sequence
  derived and/or modified sequence
atgaacatgacccaggccagagtgctggtggccgccgtggtgggcctggtggccgtgctgctgtacgccagcatccacaagatcgaggagggccacctggccgtgtactacagaggcggcgccctgctgaccagccccagcggccccggctaccacatcatgctgcccttcatcaccaccttcagaagcgtgcagaccaccctgcagaccgacgaggtgaagaacgtgccctgcggcaccagcggcggcgtgatgatctacatcgacagaatcgaggtggtgaacatgctggccccctacgccgtgttcgacatcgtgagaaactacaccgccgactacgacaagaccctgatcttcaacaagatccaccacgagctgaaccagttctgcagcgcccacaccctgcaggaggtgtacatcgagctgttcgaccagatcgacgagaacctgaagcaggccctgcagaaggacctgaacctgatggcccccggcctgaccatccaggccgtgagagtgaccaagcccaagatccccgaggccatcagaagaaacttcgagctgatggaggccgagaagaccaagctgctgatcgccgcccagaagcagaaggtggtggagaaggaggccgagaccgagagaaagaaggccgtgatcgaggccgagaagatcgcccaggtggccaagatcagattccagcagaaggtgatggagaaggagaccgagaagagaatcagcgagatcgaggacgccgccttcctggccagagagaaggccaaggccgacgccgagtactacgccgcccacaagtacgccaccagcaacaagcacaagctgacccccgagtacctggagctgaagaagtaccaggccatcgccagcaacagcaagatctacttcggcagcaacatccccaacatgttcgtggacagcagctgcgccctgaagtacagcgacatcagaaccggcagagagagcagcctgcccagcaaggaggccctggagcccagcggcgagaacgtgatccagaacaaggagagcaccggctag

SEQ ID NO: 282593 - DNA, 962 bp, Artificial Sequence
  derived and/or modified sequence
gttggcggcggttggctcggcgcgggagtcggctgcacgtgcgggcgggggcgatgcgtcactgatcggtgaggcgcggccgaggggtcggctttcctcgcgagcctgcggctgggcttcttctcagaggaacgagaatgaatatgactcaagcccgggttctggtggctgcagtggtggggttggtggctgtcctgctctacgcctccatccacaagattgaggagggccatctggctgtgtactacaggggaggagctttactaactagccccagtggaccaggctatcatatcatgttgcctttcattactacgttcagatctgtgcagacaacactacaaactgatgaagttaaaaatgtgccttgtggaacaagtggtggggtcatgatctatattgaccgaatagaagtggttaatatgttggctccttatgcagtgtttgatatcgtgaggaactatactgcagattatgacaagaccttaatcttcaataaaatccaccatgagctgaaccagttctgcagtgcccacacacttcaggaagtttacattgaattgtttgatcaaatagatgaaaacctgaagcaagctctgcagaaagacttaaacctcatggccccaggtctcactatacaggctgtgcgtgttacaaaacccaaaatcccagaagccataagaagaaattttgagttaatggaggctgagaagacaaaactccttatagctgcacagaaacaaaaggttgtggaaaaagaagctgagacagagaggaaaaaggcagttatagaagcagagaagattgcacaagtggcaaaaattcggtttcagcagaaagtgatggaaaaagaaactgaaaagcgcatttctgaaatcgaagatgctgcattcctggcccgagagaaagcgaaagcagatgctgaatattatgctgcacacaaatatgccacctcaaacaag

SEQ ID NO: 282594 - DNA, 1045 bp, Artificial Sequence
  derived and/or modified sequence
gttggcggcggttggctcggcgcgggagtcggctgcacgtgcgggcgggggcgatgcgtcactgatcggaggaacgagaatgaatatgactcaagcccgggttctggtggctgcagtggtggggttggtggctgtcctgctctacgcctccatccacaagattgaggagggccatctggctgtgtactacagacaacactacaaactgatgaagttaaaaatgtgccttgtggaacaagtggtggggtcatgatctatattgaccgaatagaagtggttaatatgttggctccttatgcagtgtttgatatcgtgaggaactatactgcagattatgacaagaccttaatcttcaataaaatccaccatgagctgaaccagttctgcagtgcccacacacttcaggaagtttacattgaattgtttgatcaaatagatgaaaacctgaagcaagctctgcagaaagacttaaacctcatggccccaggtctcactatacaggctgtgcgtgttacaaaacccaaaatcccagaagccataagaagaaattttgagttaatggaggctgagaagacaaaactccttatagctgcacagaaacaaaaggttgtggaaaaagaagctgagacagagaggaaaaaggcagttatagaagcagagaagattgcacaagtggcaaaaattcggtttcagcagaaagtgatggaaaaagaaactgaaaagcgcatttctgaaatcgaagatgctgcattcctggcccgagagaaagcgaaagcagatgctgaatattatgctgcacacaaatatgccacctcaaacaagcacaagttgaccccggaatatctggagctcaaaaagtaccaggccattgcttctaacagtaagatctattttggcagcaacatccctaacatgttctccatatcaagatgtggcccaaggggttaagtgggaacaatcattatacggactcttcagatttacagagaacttacacttcatctgttccacctctcctgcgatagtcctgggtgctccactgatt

SEQ ID NO: 282595 - DNA, 1453 bp, Artificial Sequence
  derived and/or modified sequence
ggctgttggcggcggttggctcggcgcgggagtcggctgcacgtgcgggcgggggcgatgcgtcactgatcggaggaacgagaatgaatatgactcaagcccgggttctggtggctgcagtggtggggttggtggctgtcctgctctacgcctccatccacaagattgaggagggccatctggctgtgtactacaggggaggagctttactaactagccccagtggaccaggctatcatatcatgttgcctttcattactacgttcagatctgtgcagacaacactacaaactgatgaagttaaaaatgtgccttgtggaacaagtggtggggtcatgatctatattgaccgaatagaagtggttaatatgttggctccttatgcagtgtttgatatcgtgaggaactatactgcagattatgacaagaccttaatcttcaataaaatccaccatgagctgaaccagttctgcagtgcccacacacttcaggaagtttacattgaattgtttgatcaaatagatgaaaacctgaagcaagctctgcagaaagacttaaacctcatggccccaggtctcactatacaggctgtgcgtgttacaaaacccaaaatcccagaagccataagaagaaattttgagttaatggaggctgagaagacaaaactccttatagctgcacagaaacaaaaggttgtggaaaaagaagctgagacagagaggaaaaaggcagttatagaagcagagaagattgcacaagtggcaaaaattcggtttcagcagaaagtgatggaaaaagaaactgaaaagcgcatttctgaaatcgaagatgctgcattcctggcccgagagaaagcgaaagcagatgctgaatattatgctgcacacaaatatgccacctcaaacaagcacaagttgaccccggaatatctggagctcaaaaagtaccaggccattgcttctaacagtaagatctattttggcagcaacatccctaacatgttcgtggactcctcatgtgctttgaaatattcagatattaggactggaagagaaagctcactcccctctaaggaggctcttgaaccctctggagagaacgtcatccaaaacaaagagagcacaggttgatgcaagaggtggaaatgttctccatatcaagatgtggcccaaggggttaagtgggaacaatcattatacggactcttcagatttacagagaacttacacttcatctgttccacctctcctgcgatagtcctgggtgctccactgattggaggatagagccagctgtctgacacacaaatggtcttttcagccacagtcttatcaagtatcctatatgtattcctttctaaactgctactcatgaatgaggaaagtctgatgctaagatactgcctgcactggaatgttaaacactaaatatataacaagctgtgttttcctaa

SEQ ID NO: 282596 - DNA, 5792 bp, Artificial Sequence
  derived and/or modified sequence
attataataaaacagttgaatatggcttaggaaaatatgaaggttccatgaagtggaattaagagcatagaataactgtactttccttaggaataataggacttatggtaaaggtagtattgggcaacttctttaagagtgttttcctctgagatgtcctatcaccactatctacatctaaaaaacatgctcgattcttgccctataaactgatgtcacagccccaccatccccatttttgctagtggtatcattttcctagtcaaccaaattttttagtcatcacatatcactgttcgtcatctattataataggcagtctctctcttgtttccctggttttagaagattttagtaataaacatttattgggtacctgttacttggagggtattaagctagatggcaagatctgaaacaacataggcagtatagtaaaagtgcttatctgggagtctgaacattacaagccatccaagcattgcaattattgttaaggattattttcaatggtcatgcattttctaatattttaataattggttaaagatttgttatagcgtgggggccgctgctggtgtgtggctggggttatgtcagggcagcctgatctatataatttgggcagatggtgtgagtcagaacagactattatagtgggatccccaaacttgcttttgatgcatgagttggaccactattttttggtgggtaacaacttttcagaggggaatggcagttgtgaattgtatacatttcattctttaagcaatattatgaaaaacttcagagaatgtctacagaaaacagggtatggagcaagttattttccattctttttgctttttggaagttaaaatagctaagctctgcaaatatcatttatttggaacagataaggtcccagacattcctagataataaaaatcaaatgaatgatacaggtaagtgtatttattgaagggtgtgggtagagtggtctgggaagtcttgctttaatgaagacggattgattctatttacctcttcttacttccactactaagtaaccctgggcctgcagtttcctaaccacttgacttccttgccaacagtctgtctccactttcagccgttttatagattcattggccctaaagcactgctttcccatacttccctacccaagagggcaggggtccccaagccctgggccgcggaccggaaccagacagtggcctgttaggaaccaagccggatagcaggaggtgagcggcgggcgagtgagcattatcgccttgagctctgcctgctgtcagattagcgagtggcatcagattctcataggcacgcgaaccctattgtgaactgcacatgtgaggtttgccggctccctgtgagaatctaatgcctgatgatctgaagtggaacagtttcatccccaacccacacacacccccaccccgtccgctgggttagaggactttacaaccctagtccaccttgtccagttatagttccacctctagcctttcaaggcttaaaccattaatgtccttaatttctcttgtattcatctatctcccaactatacctttttccttcccttttttatttttggcaatatgtgcccatggttttttaatttaaaacgaacagaatatgtagtgacgcctaccatagcactccttcccatcacacaagccttcaaggaaactgaagtacttactttggtctccctggaggattccctccgcctcccgccccatgtgcttagcaattctgttcctgtagtctggatggccttcataaagccctcactggaccagcattctggcacataataggaacacttaaaaaacgagagaatgatgccgttatatctaatatcttcctcttctgaactttcacagcactttatttgcaacaagtttagttgctcctgaagggcaggatctctgccggaagcaagtgcgtgccacacagtggggctccgcatacactgcaaaaggacaaataaaccgaacagctaccgtttgagagtgagcgagtgggttctctgcacaagaacaaaccaaccagtcccttgtccgaaagggcgtctccttttctctgcttcgctgctcactccagactgcgggctgtcctcttccgaagcagttaaccagcagtgtacagaaagcgacttgcctccaaaggagcctgcgcggcccgcggctaggagaattttgtcccatgcgctccccgtctcactagccgcgggccggggctacgccgtgtgcgtccccgcgcagccgcagtgctgggcgagtgggcggggccggctgttggcggcggttggctcggcgcgggagtcggctgcacgtgcgggcgggggcgatgcgtcactgatcggtgaggcgcggccgaggggtcggctttcctcgcgagcctgcggctgggcttcttctcagttagtgccttccacccgggagcgacccttgggagagggagtttcaggaagctcaccgagcaggggcggcccactggcctccgggggcggaggagttggcaaggggtcagcgggctcagccagaagggaagaatgaggggacaggggtactggactccccggctcagcctgcgagagagcgccaagtttccggagggagagggtagaaactggagggggtggacctgtcactcacgggactgagggtccttttctcccgctcccaggaggaacgagaatgaatatgactcaagcccgggttctggtggctgcagtggtggggttggtggctgtcctgctctacgcctccatccacaagattgaggagggccatctggctgtgtactacaggggaggagctttactaactagccccagtggaccaggctatcatatcatgttgcctttcattactacgttcagatctgtgcagacaacactacaaactgatgaagttaaaaatgtgccttgtggaacaagtggtggggtcatgatctatattgaccgaatagaagtggttaatatgttggctccttatgcagtgtttgatatcgtgaggaactatactgcagattatgacaagaccttaatcttcaataaaatccaccatgagctgaaccagttctgcagtgcccacacacttcaggaagtttacattgaattgtttgatcaaatagatgaaaacctgaagcaagctctgcagaaagacttaaacctcatggccccaggtctcactatacaggctgtgcgtgttacaaaacccaaaatcccagaagccataagaagaaattttgagttaatggaggctgagaagacaaaactccttatagctgcacagaaacaaaaggttgtggaaaaagaagctgagacagagaggaaaaaggcagttatagaagcagagaagattgcacaagtggcaaaaattcggtttcagcagaaagtgatggaaaaagaaactgaaaagcgcatttctgaaatcgaagatgctgcattcctggcccgagagaaagcgaaagcagatgctgaatattatgctgcacacaaatatgccacctcaaacaagcacaagttgaccccggaatatctggagctcaaaaagtaccaggccattgcttctaacagtaagatctattttggcagcaacatccctaacatgttcgtggactcctcatgtgctttgaaatattcagatattaggactggaagagaaagctcactcccctctaaggaggctcttgaaccctctggagagaacgtcatccaaaacaaagagagcacaggttgatgcaagaggtggaaatgttctccatatcaagatgtggcccaaggggttaagtgggaacaatcattatacggactcttcagatttacagagaacttacacttcatctgttccacctctcctgcgatagtcctgggtgctccactgattggaggatagagccagctgtctgacacacaaatggtcttttcagccacagtcttatcaagtatcctatatgtattcctttctaaactgctactcatgaatgaggaaagtctgatgctaagatactgcctgcactggaatgttaaacactaaatatataacaagctgtgttttcctaagctgagatctgttgaataatgtttacattcgtcccccggggaaatgtatgctcagccaccattcaagagatgactgagaaggagatggtaagttcaagaagactgattgcacctgggacccaggccctttctttgggatccagtcccagccttcatccatgtgattaagatccaggccgctgaagttccccaggaaatgatcttccacttgagcaaccttttacttgatacgatttgcacctttctgttttcctgcagtcagggtggtggcctgcagggacctgagctttgctacccaaccagattcctcatagagattcctaatcactagtttcttgtattcataaactcagagatacagagggcttggtttgaagttggggtgagatgaaacctttgctctgagccaaagctctggggccttgcattccctgcattgggttgatgactgtcagcatcactgccgcaggccatgcttgactaaggtacctggttttagccacagccacctccttgtatgttacctttcagctctggccaagagtgggacagggttttaaccacaaataggagcagcatgcaattcctagtgacttgctgcacagtattgtatcataattacaggaagtttttatttttaaaactggatctggggtatattcatttgccccatcacctctgtctaaaggcccaagtcctagggctgccatggtcacaagcacactgatgctccttaagattgtttatctggagcccacatagtgtggaacaaaaagtcacctagaaagcatccttggtcatcattgtctccttcccacctggcccagagatgcttaaatccaagttgtttctccagctgtcacctcccccaggagatcaggattccactgacgtcctgggcagccagtgaatttaattttccatgagaaacaacagagttaacctgtggcattaggagacctacttcatgtggaccctttttttccttcagtttaacttttctggagcagtgtgctgcgtagttcggcctgagtttgtgcagcttgttaagacaactcttgtgtacgctatgttgaagctcaacaaaaaagtcatgggaccacttctagaaatctttcagctgtcaggcctgtcagtctcatgacagtttgttggttgtgccaaacactttatttgggaaaggaaagcccagatttgaatgggtctttcccctgggccttatcctatagaggcatttgtaatatggagaaaataatttttcatttttgctcatttaattctataaattctctttataaatgaattttgtgttctttagttctccttaaaagaacttttgaattataaaaataaaatctttacctgtcgaattgttgctgcagatgattgttgtggaaaatctggatcattgacctctgtgctttcattcctagagatgttttatagttacatgagcaaaagctgttgccccaaagtgatggccctggaggcggggctgaggaacagggaaatgccgctgtgaagtcttaaagcacttctgcttaaactcccatgtgtgaggagtgtgcctccctgtgccctctcagctctgaggctggccgtctttcggggtgttccttttggcaaatatacactgtaatcttgagtctaaatttatatgttgaaatgctaccttttttaaaataagaaactaaataaaattattttactatca

SEQ ID NO: 282597 - protein, 281 aa, Artificial Sequence
  derived and/or modified sequence
MTSKEDGKAAPGEERRRSPLDHLPPPANSNKPLTPFSIEDILNKPSVRRSYSLCGAAHLLAAADKHAQGGLPLAGRALLSQTSPLCALEELASKTFKGLEVSVLQAAEGRDGMTIFGQRQTPKKRRKSRTAFTNHQIYELEKRFLYQKYLSPADRDQIAQQLGLTNAQVITWFQNRRAKLKRDLEEMKADVESAKKLGPSGQMDIVALAELEQNSEATAGGGGGCGRAKSRPGSPVLPPGAPKAPGAGALQLSPASPLTDQPASSQDCSEDEEDEEIDVDD

SEQ ID NO: 282598 - DNA, 369 bp, Artificial Sequence
  derived and/or modified sequence
atggtggtggtggagaagggcgccagcctgatgagccgggccagcctgatgcccgcccaggcacgggctcccttccaacgcttgcgggactgcagagggccagctgactcaagccatgcttttaagcttcagtgtttcccttcccactgccgtaggcccccttgggtcatctctcggaaaggacgagccatcaataagtactcgatttgtatcagctgcgtggcgctacatttggaaatcagcttcatttggcagctgcttcagaatgagcctaatctcgaaggcggcctggggcgattcatgctggccagcttgtcactgcagcaggtgatatcaatactagcattcactcgtgtgaagcagctgtag

SEQ ID NO: 282599 - DNA, 846 bp, Artificial Sequence
  derived and/or modified sequence
atgactagcaaagaggatggcaaggccgctccaggtgaggagagacgccggagtcccttagatcacctgccccctcccgccaactcaaacaaaccgttgacacctttctctattgaagacattctgaataagccctccgtacgtagatcatacagcctttgcggtgcagctcatctgttggccgctgctgacaagcacgcccagggggggctgcccttggccggccgggctctcctgagccaaactagtccgctctgcgctcttgaggaactggcctcaaagacttttaaaggtctggaagtgtcagtattgcaggctgctgaaggcagagacgggatgactatcttcggccaaagacagacaccaaaaaagagacgcaaaagtcggactgcattcacaaatcatcagatttacgagcttgaaaagcgattcctgtatcagaagtatctgtctcctgccgaccgggaccagatcgctcagcagctgggcctgacgaacgctcaagtcatcacatggtttcaaaaccggagagcgaagcttaaacgagacctagaggagatgaaagcggacgtagaatccgcaaaaaagctgggtccatccgggcagatggacattgtggcactggctgaactcgagcagaattcagaggccactgctggtgggggtgggggctgcgggcgggctaagagccgcccggggtcccctgtgctgcccccaggcgcgcctaaggcccctggcgccggcgccctgcagctgagccccgccagccctcttaccgaccagcccgcaagttctcaggattgtagcgaggatgaagaggatgaggagattgatgttgatgattag

SEQ ID NO: 282600 - DNA, 2119 bp, Artificial Sequence
  derived and/or modified sequence
gtccctcccgggctggggttcccaccactctttcgggctccacatcccgggtcggagagaccgagaccttcgggccggtgcggtcattgcagctaggccggcgggaggcgggtgcgccaggagcgcggctcgcagtttggggtgggggcggtggcttttcagtcgcccgaggttcgggtgcaataaaggagcagctaatgtaatttacaaacagctcgggccgaacgcagcgcagcgcccggactgacaggcgcattaggcaggctaattccagccggctcctcctacccccggcccgctaattaatgagcttcccaacttacagccgcctgcattggacagacagagagtgaaagagagggcgagggagagggagagaaggagagagaaggggggagcagagaagagagaagagagagggagggagggagagcgagaacaggaggagagaacagaggcaaagaagagaggaaaaagggagaaaggagagagaaagagaaagaagtgccgctgcagataattgattacaccgcgatcaaggctaacttgttagcaatagtcaattgccccgtctctccgcctccctcgcagtccgggatcggcgccctcgcctcggctcttccaactgcggccgccaggacccggggccaggagccactgccgagccacctgacacctttaaatagcaccggggttggcgaaactggagccccgcgcagcgcgccccggctccggccccggattgctggaagccccagcagcagcggcgcccgcgtcagcgccctcttcccggggccccgcgctgttctcccctcctcagccgccgcgctaatcggccccgcgcccggcccgcgccctgcccagtgcggcctcctttccacccgccgctgcctgcccgcgccgtccggcgcccgagctgcccgcgggctgggtccccgcggcccgagccgccccggccgggaccccgaacaaggccgagatgacttccaaggaggacggcaaggcggcgccgggggaggagcggcggcgcagcccgctggaccacctgcctccgcctgccaactccaacaagccactgacgccgttcagcatcgaggacatcctcaacaagccgtctgtgcggagaagttactcgctgtgcggggcggcgcacctgctggccgccgcggacaagcacgcgcagggcggcttgcccctggcgggccgcgcgctgctctcgcagacctcgccgctgtgcgcgctggaggagctcgccagcaagacgtttaaggggctggaggtcagcgttctgcaggcagccgaaggccgcgacggtatgaccatctttgggcagcggcagacccctaagaagcggcgaaagtcgcgcacggccttcaccaaccaccagatctatgaattggaaaagcgctttctataccagaagtacctgtcccccgccgatcgcgaccaaatcgcgcagcagctgggcctcaccaacgcgcaagtcatcacctggttccagaatcggcgcgctaagctcaagcgggacctggaggagatgaaggccgacgtagagtccgccaagaaactgggccccagcgggcagatggacatcgtggcgctggccgaactcgagcagaactcggaggccacagccggcggtggcggcggctgcggcagggccaagtcgaggcccggctctccggtcctccccccaggcgccccgaaggccccgggcgctggcgccctgcagctctcgcctgcctctccgctcacggaccagccggccagcagccaggactgctcggaggacgaggaagacgaagagatcgacgtggacgattgagcggcgccccgggtcttccgccgccctgggctcctagcgctcgaaagcccaacgcctcccggaccggaccgccgaggggagctgggacctcctctgccaactcccgcctcctcccctgtccccggccccggactcggctcctggcagccgcctcttccctctcgaagcaataaacccaggctggccggccgggccggccgccaccagcggcctccgccgccccggaagccctcgccgtgcaattctgtatggcttctatataaatatttaaacctatatagcgggttcttccca

SEQ ID NO: 282601 - DNA, 846 bp, Artificial Sequence
  derived and/or modified sequence
atgaccagcaaagaagatggcaaggccgcccctggagaggagcggcggcgcagccccctggaccacctgcccccaccagccaacagcaacaagcccctgacccccttcagcattgaggacatcctgaacaagcccagcgtgcggcgcagctacagcctgtgtggggccgcccacctgctggccgctgctgacaagcacgcccagggcggcctgcccctggccggccgggccctgctgagccagaccagccccctgtgtgccctggaggagctggccagcaagaccttcaagggcctggaggtgtctgtgctgcaggccgctgagggcagagatggcatgaccatcttcggccagaggcagacccccaagaagaggaggaagagcaggacagccttcaccaaccaccagatctatgagctggagaagcgcttcctgtaccagaagtacctgagccctgctgaccgggaccagatcgcccagcagctgggcctgaccaatgcccaggtgatcacctggttccagaacagaagagccaagctgaagagggacctggaggagatgaaggcagatgtggagagcgccaagaagctgggccccagcggccagatggacatcgtggccctggccgagctggagcagaacagcgaggccacagctgggggcggcggcggctgcggccgggccaagagccggcccggcagccctgtgctgcccccaggggcccccaaggcccctggagctggggccctgcagctgagccctgccagccccctgacagaccagcctgccagcagccaggactgcagtgaagatgaagaagatgaggagattgatgtggatgactag

SEQ ID NO: 282602 - DNA, 846 bp, Artificial Sequence
  derived and/or modified sequence
atgaccagcaaggaggacggcaaggccgcccccggcgaggagcggcggcgatccccgctagaccatctgcccccacctgctaacagtaataagcccttaacccctttctctattgaggacattctaaacaaaccaagcgtgagacggagttacagcctgtgcggtgctgcccacctgctcgccgccgcggacaagcatgcccaaggaggactgcctctggccggccgggccttgctgagccagaccagcccactctgtgctctagaagagttggcctccaagacctttaagggactggaagtatccgtgctgcaggcagccgagggaagagatggaatgacaatatttggtcagcgccagacacctaagaaacggagaaagtcccggacagcattcacgaaccaccaaatttacgagctcgaaaagcgtttcctttaccagaaatatctctcaccggccgatcgcgatcaaattgcccagcagctgggtctcacaaatgctcaggtgatcacgtggtttcagaaccgccgcgccaagctgaaacgggatctagaggagatgaaggccgatgtggaaagcgccaaaaagctcggcccgagcggccagatggacatcgtggcgttggctgagctagaacaaaacagcgaagccacggcaggaggagggggcggttgtggccgcgctaaaagtcgccctgggtcccctgttctccctccaggcgccccaaaggcgcccggagcaggcgccctgcagctgagcccagccagcccactgacggaccagcccgcctcttctcaggattgctctgaagatgaagaagatgaggaaattgatgtagacgattag

SEQ ID NO: 282603 - DNA, 846 bp, Artificial Sequence
  derived and/or modified sequence
atgaccagtaaggaagatggcaaagcagcaccaggcgaagagcggcgaagaagccctttggatcatcttcctcccccagcaaattccaataagccactgacccccttctcaattgaggacatcctcaataagccctccgtgcgacggtcatattcactctgtggggcagcccatctcctcgccgctgccgataagcacgcccagggagggctgccactcgctggcagagcccttttgtcacagacatccccattgtgtgcccttgaagagctggcgagcaaaacatttaaagggctggaagtaagcgtccttcaggccgctgaaggtcgtgacggaatgaccattttcggccaaagacagactccaaagaagaggagaaaatctagaactgctttcaccaaccatcagatttacgagctcgagaagcgctttctgtaccagaaatacctgagccctgcagaccgcgatcagattgcccagcaattagggcttactaatgcacaggtcattacatggttccagaatcgtcgggcaaagctcaaacgagatttagaagagatgaaggccgacgtggaatctgcgaagaagctcggaccatctggccaaatggatatcgtcgctctggcagagctggagcagaacagcgaagcaactgccggaggcggtggcggatgcggcagagctaagagcaggcccggatcgcccgtacttcccccaggagcccctaaggcacccggtgctggggctctacaactatcccctgcaagcccactgacggaccagccggctagtagccaggactgctccgaggatgaggaggacgaagagattgatgttgacgattag

SEQ ID NO: 282604 - DNA, 846 bp, Artificial Sequence
  derived and/or modified sequence
atgaccagcaaggaggacggcaaggccgcccccggcgaggagagaagaagaagccccctggaccacctgcccccccccgccaacagcaacaagcccctgacccccttcagcatcgaggacatcctgaacaagcccagcgtgagaagaagctacagcctgtgcggcgccgcccacctgctggccgccgccgacaagcacgcccagggcggcctgcccctggccggcagagccctgctgagccagaccagccccctgtgcgccctggaggagctggccagcaagaccttcaagggcctggaggtgagcgtgctgcaggccgccgagggcagagacggcatgaccatcttcggccagagacagacccccaagaagagaagaaagagcagaaccgccttcaccaaccaccagatctacgagctggagaagagattcctgtaccagaagtacctgagccccgccgacagagaccagatcgcccagcagctgggcctgaccaacgcccaggtgatcacctggttccagaacagaagagccaagctgaagagagacctggaggagatgaaggccgacgtggagagcgccaagaagctgggccccagcggccagatggacatcgtggccctggccgagctggagcagaacagcgaggccaccgccggcggcggcggcggctgcggcagagccaagagcagacccggcagccccgtgctgccccccggcgcccccaaggcccccggcgccggcgccctgcagctgagccccgccagccccctgaccgaccagcccgccagcagccaggactgcagcgaggacgaggaggacgaggagatcgacgtggacgactag

SEQ ID NO: 282605 - protein, 720 aa, Artificial Sequence
  derived and/or modified sequence
MSEGAAAASPPGAASAAAASAEEGTAAAAAAAAAGGGPDGGGEGAAEPPRELRCSDCIVWNRQQTWLCVVPLFIGFIGLGLSLMLLKWIVVGSVKEYVPTDLVDSKGMGQDPFFLSKPSSFPKAMETTTTTTSTTSPATPSAGGAASSRTPNRISTRLTTITRAPTRFPGHRVPIRASPRSTTARNTAAPATVPSTTAPFFSSSTLGSRPPVPGTPSTQAMPSWPTAAYATSSYLHDSTPSWTLSPFQDAASSSSSSSSSATTTTPETSTSPKFHTTTYSTERSEHFKPCRDKDLAYCLNDGECFVIETLTGSHKHCRCKEGYQGVRCDQFLPKTDSILSDPTDHLGIEFMESEEVYQRQVLSISCIIFGIVIVGMFCAAFYFKSKKQAKQIQEQLKVPQNGKSYSLKASSTMAKSENLVKSHVQLQNYSKVERHPVTALEKMMESSFVGPQSFPEVPSPDRGSQSVKHHRSLSSCCSPGQRSGMLHRNAFRRTPPSPRSRLGGIVGPAYQQLEESRIPDQDTIPCQGIEVRKTISHLPIQLWCVERPLDLKYSSSGLKTQRNTSINMQLPSRETNPYFNSLEQKDLVGYSSTRASSVPIIPSVGLEETCLQMPGISEVKSIKWCKNSYSADVVNVSIPVSDCLIAEQQEVKILLETVQEQIRILTDARRSEDYELASVETEDSASENTAFLPLSPTAKSEREAQFVLRNEIQRDSALTK

SEQ ID NO: 282606 - DNA, 2163 bp, Artificial Sequence
  derived and/or modified sequence
atgagcgaaggtgctgcagccgcatcacctcctggcgcagcatccgctgccgctgcctccgctgaagagggcacagccgcagctgctgcagccgcagcagctggcggcgggcctgacggaggcggcgaaggcgctgccgagccaccgcgcgaactgcgttgcagtgactgtattgtgtggaacaggcaacagacatggctctgtgtcgtgccgctatttattgggtttattggactggggctgtcgctgatgttattaaagtggatcgttgtcggctctgtgaaagaatatgtgccaacagacctggtggactcaaaaggtatgggccaggaccccttcttccttagcaagccttcttcttttcctaaggcaatggagacgacaacaactactacctccacaacaagtcccgctaccccaagcgcaggcggcgccgcaagttcacgcactccaaatcgcatctcgacacgcctgactactattacaagagctccaactaggtttcccggccatcgtgtgccaattcgggcgtcccccagaagcaccacggcaagaaatacagcggctccggccacagttccaagcacaacagcaccgttcttcagttcctcaacactagggtcccgccctccagtgcccggcaccccgtctacccaagccatgccttcctggccaactgccgcgtacgccaccagcagctacctgcatgacagtactccatcttggacgctttctccctttcaggacgctgcttcttccagcagttcttcgtcgtctagtgccactaccacaacaccagaaacctctacatccccaaagttccacaccaccacttatagtaccgagcgcagtgagcacttcaagccttgcagggataaagaccttgcctactgcttgaacgacggagaatgctttgtgatcgagacgctgacgggttcgcacaagcactgtcggtgcaaggaagggtaccagggcgtgaggtgcgaccaattcctccctaaaacagattccattctcagtgaccccactgaccacctgggcatcgaattcatggagagcgaggaggtctatcagcgtcaagtcctctctatctcttgcattatcttcgggattgttattgtggggatgttttgcgccgcattctacttcaaaagtaagaaacaggcgaagcaaattcaggaacagttaaaggtcccccaaaatggtaagagctactcactcaaggcatcctctacaatggccaagtctgagaacttagtgaagagccatgttcaacttcagaactattccaaggttgaaagacaccccgttactgccctagagaagatgatggagagtagtttcgtcggacctcaaagttttccagaagtgccttcccccgacagggggtctcagtcagtgaaacatcaccggagcttatcttcctgttgttctcccggccaaagatcaggcatgctccaccgtaacgctttccggcgaacgccccccagccctcgttctaggctgggtggtattgtgggacccgcataccagcaattggaagaaagcaggatccctgatcaggacacgattccgtgtcagggcattgaggtgcggaagaccatctctcacctccccatacagctgtggtgtgtggaacgaccactggacctcaagtattcctcttctgggctcaaaactcaacgtaatactagcattaacatgcagctgcccagtagggagaccaacccctactttaatagcctcgaacaaaaggatctggtcggatacagcagtactcgggccagctccgtccctattatccccagtgttggcctggaggagacttgtcttcagatgcccggcatatcggaggtgaaatccattaagtggtgcaagaactcctatagcgcagacgtggtgaatgtatcaattccagttagcgactgcctgatagcagagcagcaagaggtcaagatactcttagaaactgttcaggagcaaattcggattttgaccgatgcacgccggtcggaagattatgagcttgcgtccgtcgaaacagaggatagtgctagtgaaaatacagcgttcctgccactgtcccccacagctaaaagcgagagagaggcccagttcgtgttgcgtaacgagattcaacgtgatagcgctctgactaagtag

SEQ ID NO: 282607 - DNA, 2163 bp, Artificial Sequence
  derived and/or modified sequence
atgtctgagggcgctgctgctgccagccccccaggagctgccagcgctgctgctgccagcgctgaggagggcacagctgctgctgctgctgctgctgctgctgggggcggcccagatggcggcggggagggcgctgctgagcccccccgggagctgcgctgcagcgactgcatcgtgtggaaccggcagcagacctggctgtgtgtggtgcccctcttcatcggcttcatcggcctgggcctgagcctgatgctgctgaagtggatcgtggtgggctctgtgaaggagtatgtgcccacagacctggtggacagcaagggcatgggccaggaccccttcttcctgagcaagcccagcagcttccccaaggccatggagaccaccaccaccaccaccagcaccaccagccctgccaccccatctgctgggggcgccgccagcagcaggacccccaaccgcatcagcacccggctgaccaccatcacccgggcccccacccgcttccctggccaccgggtgcccatccgggccagccccaggagcaccacagccaggaacacagctgccccagccaccgtgcccagcaccacagcccccttcttcagcagcagcaccctgggcagccggccccctgtgcccggcacccccagcacccaggccatgcccagctggcccacagctgcctatgccaccagcagctacctgcatgacagcacccccagctggaccctgagccccttccaggatgctgccagcagcagcagcagcagcagcagcagcgccaccaccaccaccccagagaccagcaccagccccaagttccacaccaccacctacagcacagagaggtctgagcacttcaagccctgccgggacaaggacctggcctactgcctgaatgatggagaatgttttgtgattgagaccctgaccggcagccacaagcactgccgctgcaaggagggctaccagggcgtgcgctgtgaccagttcctgcccaagacagacagcatcctgagtgaccccacagaccacctgggcatcgagttcatggagagcgaggaggtgtaccagaggcaggtgctgagcatcagctgcatcatctttggaattgtgattgtgggcatgttctgtgccgccttctacttcaagagcaagaagcaggccaagcagatccaggagcagctgaaggtgccccagaatggcaagagctacagcctgaaggccagcagcaccatggccaagtctgagaacctggtgaagagccacgtgcagctgcagaactacagcaaggtggagcggcaccctgtgacagccctggagaagatgatggagagcagctttgtgggcccccagagcttccctgaggtgcccagcccagaccggggcagccagagcgtgaagcaccacaggagcctgagcagctgctgcagccctggccagaggagcggcatgctgcacagaaatgccttccggaggaccccacccagccccaggagccggctgggcggcatcgtgggccctgcctaccagcagctggaggagagccgcatcccagaccaggacaccatcccctgccagggcatcgaggtgaggaagaccatcagccacctgcccatccagctgtggtgtgtggagcggcccctggacctgaagtacagcagcagcggcctgaagacccagaggaacaccagcatcaacatgcagctgcccagccgggagaccaacccctacttcaacagcctggagcagaaggacctggtgggctacagcagcacccgggccagctctgtgcccatcatccccagcgtgggcctggaggagacctgcctgcagatgcctggcatcagcgaggtgaagagcatcaagtggtgcaagaacagctacagcgcagatgtggtgaatgtgtccatccctgtgtctgactgcctgattgctgagcagcaggaggtgaagatcctgctggagaccgtgcaggagcagatccgcatcctgacagatgccaggagaagtgaggactatgagctggcctctgtggagacagaggacagcgcctctgaaaatacagccttcctgcccctgagccccacagccaagtctgagcgggaggcccagtttgtgctgagaaatgagatccagagggacagcgccctgaccaagtag

SEQ ID NO: 282608 - DNA, 2163 bp, Artificial Sequence
  derived and/or modified sequence
atgagcgagggcgccgccgccgccagcccccccggcgccgccagcgctgccgcagccagcgccgaagaggggacagctgctgccgccgcagccgccgccgctgggggaggtcccgatggcggcggagagggcgctgcagagccaccacgggaactccggtgctccgactgcatcgtgtggaatcggcaacaaacttggctgtgtgttgtccccctctttatcgggttcattggactcggcctgagcctgatgctcctaaagtggattgttgttggttccgtgaaggaatatgtcccaacagacttagttgattcgaaagggatgggccaggatcccttctttctcagcaagccaagctcattcccaaaagccatggagacaacgaccaccacaaccagtaccacatcgcccgctactccttccgcaggcggagccgccagcagcaggacccccaataggatttctactcgcctgaccacaatcactcgagcgcccactcgatttcctgggcacagggtgcccattcgcgctagtccacggtctactaccgctcggaatacagctgcgccagccaccgttccttccacgaccgccccatttttttcttcctccacgcttggtagtagacctcccgtgccaggcaccccatctactcaagctatgccgtcctggcctacagcagcatatgctacgtcctcttacttgcacgactccactccaagctggacattatccccattccaagacgccgccagtagctcaagtagctcatcctctagcgcaacaactacaaccccagagacctcaacatcacccaagtttcacacaactacctactccacagaacgatccgagcactttaaaccttgtagagataaggacctcgcatattgtctgaacgatggggagtgctttgtgatcgaaacactgacaggtagccacaaacactgccgatgtaaagagggctaccagggggttaggtgcgatcagttcttacctaaaactgacagtatcttgagcgatcccactgaccatttaggcatcgagtttatggagtcggaagaggtttatcaacggcaggtcctgagcatttcctgcattatctttggaatcgttattgtcggcatgttttgcgcggccttctactttaaaagtaagaagcaggcaaagcagatccaagaacagctcaaagtcccccagaatggcaaatcatatagcctgaaggcaagcagtaccatggcgaaatcagagaacctggtgaaatctcacgtccagctgcagaactacagcaaagtcgaaagacaccctgttaccgccctggagaagatgatggagtccagcttcgtgggacctcagagctttcctgaggtacccagtcctgaccgggggtcacaaagcgtgaaacaccaccgcagcctgtcttcatgttgctcccccggacaacgttccggaatgctgcataggaatgcattcaggaggacccccccctccccgagaagcaggctcggagggatagttggccccgcttaccagcagctggaggagagtcggattccagatcaagatactatcccatgccagggtatcgaagtgcgaaagactatcagtcacctccccattcagctgtggtgtgtcgagcggcccctggacctgaagtactcttcttctggactgaagacccagcgaaataccagcatcaatatgcaactgccatctcgggagacgaacccctatttcaattctttagagcagaaggacctggtggggtactcttctacccgggcttcatcagtacccatcatccccagcgtggggctggaggagacatgtttacaaatgccggggatctccgaagttaagtccattaaatggtgtaaaaattcatacagcgctgatgtcgtgaatgtgagcattccagtgagcgactgtcttattgcagaacaacaggaggtaaagatcctgctggagaccgtccaggagcagattagaatcctgaccgatgcccggcgttcggaagactacgagcttgccagcgtggagaccgaggatagtgccagcgaaaataccgcgtttttgcccttgtcaccaacggccaaaagcgagagagaggcccaattcgttttgcggaacgagattcagcgggactctgcgctgactaaatag

SEQ ID NO: 282609 - DNA, 2163 bp, Artificial Sequence
  derived and/or modified sequence
atgagtgaaggggcggccgctgcctcgccacctggtgccgcttcggcagccgccgcctcggccgaggagggcaccgcggcggctgcggcggcggcagcggcgggcgggggcccggacggcggcggcgaaggggcggccgagcccccccgggagttacgctgtagcgactgcatcgtgtggaaccggcagcagacgtggctgtgcgtggtacctctgttcatcggcttcatcggcctggggctcagcctcatgcttctcaaatggatcgtggtgggctccgtcaaggagtacgtgcccaccgacctagtggactccaaggggatgggccaggaccccttcttcctctccaagcccagctctttccccaaggccatggagaccaccaccactaccacttccaccacgtcccccgccaccccctccgccgggggtgccgcctcctccaggacgcccaaccggattagcactcgcctgaccaccatcacgcgggcgcccactcgcttccccgggcaccgggtgcccatccgggccagcccgcgctccaccacagcacggaacactgcggcccctgcgacggtcccgtccaccacggccccgttcttcagtagcagcacgctgggctcccgacccccggtgccaggaactccaagtacccaggcaatgccctcctggcctactgcggcatacgctacctcctcctaccttcacgattctactccctcctggaccctgtctccctttcaggatgctgcctcctcttcttcctcttcttcctcctccgctaccaccaccacaccagaaactagcaccagccccaaatttcatacgacgacatattccacagagcgatccgagcacttcaaaccctgccgagacaaggaccttgcatactgtctcaatgatggcgagtgctttgtgatcgaaaccctgaccggatcccataaacactgtcggtgcaaagaaggctaccaaggagtccgttgtgatcaatttctgccgaaaactgattccatcttatcggatccaacagaccacttggggattgaattcatggagagtgaagaagtttatcaaaggcaggtgctgtcaatttcatgtatcatctttggaattgtcatcgtgggcatgttctgtgcagcattctacttcaaaagcaagaaacaagctaaacaaatccaagagcagctgaaagtgccacaaaatggtaaaagctacagtctcaaagcatccagcacaatggcaaagtcagagaacttggtgaagagccatgtccagctgcaaaattattcaaaggtggaaaggcatcctgtgactgcattggagaaaatgatggagtcaagttttgtcggcccccagtcattccctgaggtcccttctcctgacagaggaagccagtctgtcaaacaccacaggagtctatcctcttgctgcagcccagggcaaagaagtggcatgctccataggaatgccttcagaaggacacccccgtcaccccgaagtaggctaggtggaattgtgggaccagcatatcagcaactcgaagaatcaaggatcccagaccaggatacgataccttgccaagggatagaggtcaggaagactatatcccacctgcctatacagctgtggtgtgttgaaagacccctggacttaaagtattcatccagtggtttaaaaacccaacgaaatacatcaataaatatgcaactgccttcaagagagacaaacccctattttaatagcttggagcaaaaggacctggtgggctattcatccacaagggccagttctgtgcccatcatcccttcagtgggtttagaggaaacctgcctgcaaatgccagggatttctgaagtcaaaagcatcaaatggtgcaaaaactcctattcagctgacgttgtcaatgtgagtattccagtcagcgattgtcttatagcagaacaacaagaagtgaaaatattgctagaaactgtccaggagcagatccgaattctgactgatgccagacggtcagaagactacgaactggccagcgtagaaaccgaggacagtgcaagcgaaaacacagcctttctccccctgagtcccacagccaaatcagaacgagaggcgcaatttgtcttaagaaatgaaatacaaagagactctgcattgaccaagtga

SEQ ID NO: 282610 - DNA, 2163 bp, Artificial Sequence
  derived and/or modified sequence
atgtctgagggcgcagcagcagctagcccacccggtgctgcgtctgccgcagcggcttccgccgaagaggggactgccgctgcggcagccgctgctgccgctggcggaggtcccgacggcggtggagaaggtgccgctgaaccccctagagaactacgctgcagcgactgcatcgtgtggaatcgccaacagacctggctctgcgtggtgcctctgttcattgggttcatcggactcgggctatcattgatgctcttaaaatggatcgttgtaggaagcgtgaaagagtacgtgccaactgatctcgttgactctaagggcatgggccaggatccctttttcctgtctaagcctagcagcttccctaaggcaatggagactaccacaactaccacgtctacaaccagcccagcaacaccatctgcaggaggtgctgcctcctcacgcacccccaatcggataagcacacgactgacaactatcacacgggcacccaccaggtttccagggcaccgcgttccaatccgcgcttcacctcgaagtacaactgctagaaacactgccgcaccagctactgttcccagcacaactgcaccgttcttttcttcatcgacacttgggtctcggccaccagttcctggtaccccttctacacaagcgatgccaagttggcctactgctgcctatgccactagcagctacctgcatgactctactccatcctggaccctttcaccctttcaagatgcagcctcatcatccagttcctcctcgtcatccgcaaccacaaccacccccgagacttctacgagtcctaaattccacacgaccacatattcaactgaaagatctgagcacttcaagccttgccgagacaaggatctggcctactgtctcaacgatggggagtgcttcgtcattgaaacgcttactggttcccataaacattgtagatgtaaggaagggtaccagggagttcgctgcgatcagtttttgcccaagactgacagtatactttccgacccgacagaccacctgggcatcgaattcatggagtccgaagaggtctatcagagacaagtcctgtccattagttgtatcatattcggcattgtgatagtcgggatgttctgcgctgctttctatttcaagagtaagaagcaggccaaacagattcaggagcaacttaaagtgccccagaatggaaaaagttatagtctcaaggctagctctacaatggccaagtctgagaacttggtgaagagtcacgtgcagctgcagaactacagcaaggtggaacgccacccagtgacagctctggagaaaatgatggagtcaagctttgtcggcccacagtcatttcctgaggtaccatctcctgatagggggtcccagtccgtgaaacaccacagaagcctgtcatcatgctgcagtccagggcagaggtccgggatgctccatcgcaatgcatttagacgaacaccgccttcacccaggtccagactggggggaatcgttggacctgcctaccagcagctcgaggagtcccgcataccagatcaagatacgatcccttgccagggtattgaggtcaggaagaccataagccatctgcccattcagttgtggtgtgtcgagcgccctctggatttgaaatatagtagctctggcctcaaaactcagcgaaataccagtatcaatatgcagctgccaagtcgggagaccaatccatactttaactccttagaacagaaggacctggtgggatattcatcaactcgggcttccagcgtcccaattatcccatcagtgggtcttgaggaaacctgcttgcagatgcctggcattagcgaggtgaaatccatcaaatggtgcaaaaactcttacagtgccgacgtggtcaacgtgagtattccagtctccgactgcttgatcgccgagcaacaggaggtaaaaatactgcttgagactgtccaggagcagatccgcatactgacggacgccagaaggtcagaggactacgagctcgccagtgtcgaaacagaagattctgcatccgaaaatactgcctttctcccactcagtcctaccgccaagagtgaacgcgaggcgcagttcgtgctgagaaatgaaatccagagagactcagcgctgaccaaatag

SEQ ID NO: 282611 - DNA, 2163 bp, Artificial Sequence
  derived and/or modified sequence
atgagcgagggcgccgccgccgccagcccccccggcgccgccagcgccgccgccgccagcgccgaggagggcaccgccgccgccgccgccgccgccgccgccggcggcggccccgacggcggcggcgagggcgccgccgagccccccagagagctgagatgcagcgactgcatcgtgtggaacagacagcagacctggctgtgcgtggtgcccctgttcatcggcttcatcggcctgggcctgagcctgatgctgctgaagtggatcgtggtgggcagcgtgaaggagtacgtgcccaccgacctggtggacagcaagggcatgggccaggaccccttcttcctgagcaagcccagcagcttccccaaggccatggagaccaccaccaccaccaccagcaccaccagccccgccacccccagcgccggcggcgccgccagcagcagaacccccaacagaatcagcaccagactgaccaccatcaccagagcccccaccagattccccggccacagagtgcccatcagagccagccccagaagcaccaccgccagaaacaccgccgcccccgccaccgtgcccagcaccaccgcccccttcttcagcagcagcaccctgggcagcagaccccccgtgcccggcacccccagcacccaggccatgcccagctggcccaccgccgcctacgccaccagcagctacctgcacgacagcacccccagctggaccctgagccccttccaggacgccgccagcagcagcagcagcagcagcagcagcgccaccaccaccacccccgagaccagcaccagccccaagttccacaccaccacctacagcaccgagagaagcgagcacttcaagccctgcagagacaaggacctggcctactgcctgaacgacggcgagtgcttcgtgatcgagaccctgaccggcagccacaagcactgcagatgcaaggagggctaccagggcgtgagatgcgaccagttcctgcccaagaccgacagcatcctgagcgaccccaccgaccacctgggcatcgagttcatggagagcgaggaggtgtaccagagacaggtgctgagcatcagctgcatcatcttcggcatcgtgatcgtgggcatgttctgcgccgccttctacttcaagagcaagaagcaggccaagcagatccaggagcagctgaaggtgccccagaacggcaagagctacagcctgaaggccagcagcaccatggccaagagcgagaacctggtgaagagccacgtgcagctgcagaactacagcaaggtggagagacaccccgtgaccgccctggagaagatgatggagagcagcttcgtgggcccccagagcttccccgaggtgcccagccccgacagaggcagccagagcgtgaagcaccacagaagcctgagcagctgctgcagccccggccagagaagcggcatgctgcacagaaacgccttcagaagaaccccccccagccccagaagcagactgggcggcatcgtgggccccgcctaccagcagctggaggagagcagaatccccgaccaggacaccatcccctgccagggcatcgaggtgagaaagaccatcagccacctgcccatccagctgtggtgcgtggagagacccctggacctgaagtacagcagcagcggcctgaagacccagagaaacaccagcatcaacatgcagctgcccagcagagagaccaacccctacttcaacagcctggagcagaaggacctggtgggctacagcagcaccagagccagcagcgtgcccatcatccccagcgtgggcctggaggagacctgcctgcagatgcccggcatcagcgaggtgaagagcatcaagtggtgcaagaacagctacagcgccgacgtggtgaacgtgagcatccccgtgagcgactgcctgatcgccgagcagcaggaggtgaagatcctgctggagaccgtgcaggagcagatcagaatcctgaccgacgccagaagaagcgaggactacgagctggccagcgtggagaccgaggacagcgccagcgagaacaccgccttcctgcccctgagccccaccgccaagagcgagagagaggcccagttcgtgctgagaaacgagatccagagagacagcgccctgaccaagtag

SEQ ID NO: 282612 - protein, 222 aa, Artificial Sequence
  derived and/or modified sequence
MASVVEYKGLRAGYHCGYCDSKEGKASCGMWAHSMTVQDYQDLIDRGWRRSGKYVYKPVMNQTCCPQYTIRCRPLQFQPSKSHKKVLKKMLKFLAKGEVPKGSCEDEPMDSTMDDAVAGDFALINKLDIQCDLKTLSDDIKESLESEGKNSKKEEPQELLQSQDFVGEKLGSGEPSHSVKVHTVPKPGKGADLSKPPCRKAKEIRKERKRLKLMQQNPAGEL

SEQ ID NO: 282613 - protein, 648 aa, Artificial Sequence
  derived and/or modified sequence
MSYSVTLTGPGPWGFRLQGGKDFNMPLTISRITPGSKAAQSQLSQGDLVVAIDGVNTDTMTHLEAQNKIKSASYNLSLTLQKSKRPIPISTTAPPVQTPLPVIPHQKDPALDTNGSLVAPSPSPEARASPGTPGTPELRPTFSPAFSRPSAFSSLAEASDPGPPRASLRAKTSPEGARDLLGPKALPGSSQPRQYNNPIGLYSAETLREMAQMYQMSLRGKASGVGLPGGSLPIKDLAVDSASPVYQAVIKSQNKPEDEADEWARRSSNLQSRSFRILAQMTGTEFMQDPDEEALRRSRPQASSYSPAVAASSAPATHTSYSEGPAAPAPKPRVVTTASIRPSVYQPVPASTYSPSPGANYSPTPYTPSPVPTYTPSPAPAYTPSPAPNYNPAPSVAYSGGPAEPASRPPWVTDDSFSQKFAPGKSTTSISKQTLPRGGPAYTPAGPQVPPLARGTVQRAERFPASSRTPLCGHCNNVIRGPFLVAMGRSWHPEEFTCAYCKTSLADVCFVEEQNNVYCERCYEQFFAPLCAKCNTKIMGEVMHALRQTWHTTCFVCAACKKPFGNSLFHMEDGEPYCEKDYINLFSTKCHGCDFPVEAGDKFIEALGHTWHDTCFICAVCHVNLEGQPFYSKKDRPLCKKHAHTINL

SEQ ID NO: 282614 - DNA, 1947 bp, Artificial Sequence
  derived and/or modified sequence
atgtcctacagcgttaccctcaccgggcctggcccctggggattcagacttcagggtgggaaagattttaacatgcccttgactatatcaagaatcacacccggcagcaaagccgctcagagtcagctgtcccagggcgatctggtcgtggctatagacggggtgaacactgacacgatgactcatcttgaggcccagaataaaattaaaagtgcctcttataacctttcattgaccttgcagaagagcaaaagaccaatccccattagtaccaccgcccctcctgtccagactcccttaccagtgattccacaccagaaggaccccgcactcgatacaaatggatctctggtcgcccccagtccaagccctgaagcccgagcctccccagggacacccggcactccggaactacgccccaccttctccccagccttctcccgcccaagcgctttctccagtcttgctgaggcttccgaccctggtcctccacgggctagtctgagagccaagactagcccagaaggagcacgagacctgcttggtcccaaggctctgcccggttcaagtcaacctaggcagtacaacaaccccatcggactatatagcgcagagacactgcgtgagatggcccagatgtaccagatgtccctcagaggcaaggcctctggagtgggtttgccggggggatcgttacccattaaggatcttgccgtggattccgcgagtccagtctaccaggccgtgattaagagtcagaataagcctgaggacgaagccgacgagtgggctagaaggtcaagcaatttgcagtcaagatctttcagaattttggcccaaatgactggtaccgagtttatgcaggatccggacgaagaagctcttagacggtcaagaccacaagcctcctcttattctcccgctgtagctgcctcatctgcgcccgccactcacacgtcttactctgaggggccagccgcacccgcccccaagccacgcgtcgtgaccacagctagcattcgtcccagcgtttatcaacccgtacccgctagcacttacagtcctagcccaggtgcaaattattcaccaaccccatatactccgagccctgtccccacttacaccccttctccggccccggcgtatactccctctccagcacctaattataaccctgcaccttcagtggcctacagcggtggccccgctgaacccgctagtcgccctccctgggtgaccgatgactcgttttctcagaagttcgctccggggaagagcacaacctcgatatctaaacagacgcttcctaggggcgggcctgcctacacgcccgccggtccgcaggtcccgcctcttgctcgcggtaccgtccaaagggccgagcgctttcccgcctcatcccggacgccactgtgcggccactgtaacaacgtcatcaggggaccgtttctggtcgcaatgggcagatcctggcacccagaggagtttacctgtgcgtactgcaagactagtcttgcggacgtctgcttcgtcgaagaacagaataatgtgtattgtgagcgttgttacgagcagttctttgctcccctatgcgccaagtgtaacacaaagatcatgggagaggtgatgcatgcactgcggcagacttggcatacaacttgtttcgtgtgtgcagcttgtaagaagcctttcggcaactcactgttccacatggaggacggggaaccttattgcgagaaggactatatcaaccttttttccactaaatgccacggctgtgactttccagtcgaggccggggacaaatttattgaggccctcggtcatacttggcatgacacctgcttcatttgtgctgtgtgccatgttaatctcgaggggcagcccttctacagcaagaaggatagacctctgtgcaagaagcacgctcacacaattaatctctag

SEQ ID NO: 282615 - DNA, 1947 bp, Artificial Sequence
  derived and/or modified sequence
atgagctacagcgtgaccctgaccggccctggcccctggggcttccggctgcagggcggcaaggacttcaacatgcccctgaccatcagccgcatcaccccaggcagcaaggccgcccagagccagctgagccagggcgacctggtggtggccattgatggagtgaacacagacaccatgacccacctggaggcccagaacaagatcaagagcgccagctacaacctgagcctgaccctgcagaagagcaagaggcccatccccatcagcaccacagcccctcctgtgcagacccccctgcctgtgatcccccaccagaaggaccctgccctggacaccaacggcagcctggtggcccccagccccagccctgaggcccgggccagccctggcaccccaggcaccccagagctgcggcccaccttcagccctgccttcagccggcccagcgccttcagcagcctggccgaggccagtgaccccggccccccccgggccagcctgcgggccaagaccagccctgagggcgcccgggacctgctgggccccaaggccctgcccggcagcagccagccccggcagtacaacaaccccatcggcctgtacagcgctgagaccctgcgggagatggcccagatgtaccagatgagcctgcggggcaaggccagcggcgtgggcctgcccggcggcagcctgcccatcaaggacctggccgtggacagcgccagccctgtgtaccaggccgtcatcaagagccagaacaagccagaagatgaagcagatgagtgggcccggcgcagcagcaacctgcagagccgctccttccgcatcctggcccagatgactggaacagagttcatgcaggaccctgatgaggaggccctgcggcgcagccggccccaggccagcagctacagccctgctgtggccgccagcagcgccccagccacccacaccagctacagcgagggccctgctgccccagcccccaagccccgggtggtgaccacagccagcatccggcccagcgtgtaccagcctgtgcctgccagcacctacagccccagccctggggccaactacagccccaccccctacacccccagccctgtgcccacctacacccccagccctgccccagcctacacccccagccctgcccccaactacaacccagcccccagcgtggcctacagcggcggccctgctgagcccgccagcaggcctccctgggtgacagatgacagcttcagccagaagtttgcccctgggaagagcaccaccagcatcagcaagcagaccctgccccggggcggccctgcctacaccccagctggcccccaggtgccccccctggcccggggcaccgtgcagagagctgagcgcttccctgccagcagcaggacccccctgtgtggccactgcaacaacgtcatccggggccccttcctggtggccatgggccgctcctggcaccctgaggagttcacctgtgcctactgcaagaccagcctggctgatgtgtgctttgtggaggagcagaacaacgtgtactgtgagcgctgctatgagcagttctttgcccccctgtgtgccaagtgcaacaccaagatcatgggagaggtgatgcacgccctgcggcagacctggcacaccacctgctttgtgtgtgccgcctgcaagaagcccttcggcaacagcctcttccacatggaggatggagagccctactgtgagaaggactacatcaacctcttcagcaccaagtgccacggctgtgacttccctgtggaggccggggacaagttcatcgaggccctgggccacacctggcatgacacctgcttcatctgtgctgtgtgccacgtgaacctggagggccagcccttctacagcaagaaggaccggcccctgtgcaagaagcacgcccacaccatcaacctgtag

SEQ ID NO: 282616 - DNA, 2463 bp, Artificial Sequence
  derived and/or modified sequence
agaggcgagcttcatcaggcaggagccagaggccagagagacagcgtgcagctccagaggcggccgctgacagcaccagcatgtcttacagtgtgaccctgactgggcccgggccctggggcttccgtctgcaggggggcaaggacttcaacatgcccctcactatctcccggatcacaccaggcagcaaggcagcccagtcccagctcagccagggtgacctcgtggtggccattgacggcgtcaacacagacaccatgacccacctggaagcccagaacaagatcaagtctgccagctacaacttgagcctcaccctgcagaaatcaaagcgtcccattcccatctccacgacagcacctccagtccagacccctctgccggtgatccctcaccagaaggaccccgctctggacacgaacggcagcctggtggcacccagccccagccctgaggcgagggccagcccaggcaccccaggcaccccggagctcaggcccacctttagccctgccttctcccggccctccgccttctcctcactcgccgaggcctctgaccctggccctccgcgggccagcctgagggccaagaccagcccagagggggcccgggacctactcggcccaaaagccctgccgggctcgagccagccgaggcaatataacaaccccattggcctgtactcggcagagaccctgagggagatggctcagatgtaccagatgagcctccgagggaaggcctcgggtgtcggactcccaggagggagcctccctattaaggaccttgccgtagacagcgcctctcccgtctaccaggctgtgattaagagccagaacaagccagaagatgaggctgacgagtgggcacgccgttcctccaacctgcagtctcgctccttccgcatcctggcccagatgacggggacagaattcatgcaagaccctgatgaagaagctctgcgaaggtcaaggccccaggcctcttcctacagccccgcagtggccgcctcttcagcacctgccacccacaccagctacagtgagggccccgccgcccctgcacccaagccccgggttgtcaccactgccagcatccggccttctgtctaccagccagtgcctgcatctacctacagcccgtccccaggggccaattacagtcccactccctacaccccctcacctgtccccacctacactccatccccagcaccagcctataccccctcacctgcccccaactataaccctgcaccctcggtggcctacagcgggggccctgcggagcctgccagccgtccaccctgggtgacagatgatagcttctcccagaagtttgccccgggcaagagcaccacctccatcagcaagcagaccctgccccggggaggcccagcctacaccccagcgggtcctcaggtgccaccacttgccagggggaccgtccagagggctgagcgattcccagccagcagccggactccactctgcggtcactgcaacaatgtcatccggggcccatttctggtagccatgggccgttcttggcaccctgaagagttcacctgtgcctactgcaagacttccctggcagatgtgtgctttgtggaagagcagaacaacgtttactgtgagcgatgttatgagcaattctttgccccgctgtgtgccaagtgcaacaccaaaattatgggggaagtaatgcatgccttgagacagacatggcacaccacctgcttcgtctgtgcggcctgcaagaagccttttgggaacagcctcttccacatggaagacggggagccctactgcgagaaagactacatcaatctgttcagcaccaagtgccatggctgcgatttccccgtggaggctggcgacaagtttatcgaagccctgggccacacttggcacgacacctgcttcatttgcgcagtctgccatgtgaatctggaggggcagccgttctactccaagaaggacagacccctgtgcaagaagcacgcacacaccatcaacttgtaggcggccaaggccgcctgtgctgacgaggcccggagctgctcctgctgctggcaacaaaggattcgggaggctgatgtttcttctgaggggaatggggagagagaggaagcgactgagccctttggaagtataattttaggttttttcttctgtacacagatcgtgcatttgcatagttcagactaggagccaaatgaagactcaaaaccaagctagttattaatccaagactggaattgtacttcagacatttagagcagaattccaagaactcaaaagtgaaaagcaacaagcagctttcccaaagcgatacacttgctttggtcaccagaggaggacagagcttagagcagctgtggagaatctgaagcattctgcggagttcttaagcgctcccctggcaaacaaattgaagtgccaaacagcactcgctgca

SEQ ID NO: 282617 - DNA, 1947 bp, Artificial Sequence
  derived and/or modified sequence
atgagctacagcgtgaccctgaccggccccggcccctggggcttccggctgcaggggggcaaggactttaatatgcctttaaccatcagtcgcatcacacccggcagcaaagccgcccaaagccagctttctcagggcgaccttgttgttgcgattgacggtgttaacaccgatacgatgactcacctggaggcccagaacaaaattaagagtgccagctacaatctgtcccttactctccaaaaatccaaaaggcccatcccaatctctacaaccgcacccccagtgcagacacccttaccagtcatcccacatcagaaagaccctgcgctggatacaaatggcagcctcgtggcccctagcccttctcctgaagctcgggcgtcacctggtacacctggtacccccgaactgagacccaccttttcaccagccttctcacggccaagcgcattctcgtcactagctgaagcatcagaccctggcccccctcgagcatctcttagagcaaagacttcaccagaaggggcaagagatcttctgggacccaaggcactccctggttcctctcagcctcggcagtacaacaaccctattggcttgtactccgcagaaacgctgcgtgagatggctcagatgtatcagatgtctctgagagggaaggctagcggtgttgggcttcccggaggaagcctgcctatcaaagacttggcggtggactccgcctccccagtgtaccaagctgtgataaagtcacaaaacaaaccagaagatgaagcagacgagtgggcacgaagaagctccaatctgcagtcccggtcttttaggattttagcccagatgaccgggacagagttcatgcaggatcccgacgaagaagcccttcgtcggagccgccctcaagctagcagttactctccagccgtcgccgcctcctccgcccctgccactcacacttcttactccgaaggaccggccgctccagctccgaagccacgggtggtgaccacagctagcatcaggccttctgtctaccagcctgtccctgcgagtacctacagcccaagtccaggcgcgaattattccccaactccctacacacctagtcctgtgccaacatacacccctagcccagcccccgcgtataccccttcccctgccccaaattacaatcctgccccctccgtggcctactccggaggacctgctgagcctgccagcagacccccttgggtgacagacgacagttttagtcaaaaatttgctccagggaagtcaacgacgtcaattagcaagcaaactcttcccagaggcggacccgcctacactccagctgggcctcaggttccacccctcgctcgcggcaccgtgcaaagggcagagcggtttcctgcatcttcgagaacgccgctctgtggccactgcaataacgtgatccgcggaccatttctggtggcaatggggcgatcttggcacccggaagaattcacatgtgcgtattgcaaaacatccctcgccgatgtgtgcttcgttgaggaacagaacaacgtctattgcgaacggtgctacgaacagtttttcgctccactgtgtgctaagtgcaatacaaagatcatgggtgaggtgatgcatgccctgagacagacttggcacactacgtgtttcgtctgtgccgcctgcaaaaaacctttcgggaacagtctgttccatatggaggatggagaaccttactgcgagaaggactacatcaacctgttcagcaccaagtgccacggctgtgacttccccgtagaggcaggcgataagttcatcgaggcattgggtcacacctggcatgacacctgtttcatttgtgccgtctgccacgtcaatttggagggtcagcccttctatagtaaaaaggatagacctttgtgtaagaagcacgctcataccatcaacctgtag

SEQ ID NO: 282618 - DNA, 1947 bp, Artificial Sequence
  derived and/or modified sequence
atgtcttattcagttaccttaactggacccggaccatggggattccgactccagggtggtaaggatttcaatatgccgttgaccatctccagaattacccccggatccaaagccgctcagtctcaactctcccaaggtgatttagtagtcgctatcgacggagtcaatactgacacaatgacccacttggaagctcagaataagatcaagtcagcttcatataatctgtccctgactctgcaaaagagcaaacgcccaatccctatctccaccaccgcccctccagtacagacgcccctgccggtaatcccccatcaaaaggatcccgctttagacaccaatggatcactcgtggcgccaagtccaagccccgaggctagagcgtccccagggactccgggtacccccgagctgcggccaaccttttctccagctttttccagacctagtgctttcagttccctggccgaagcttccgaccccggtccgcctagggcctcacttagagcaaaaacctccccagaaggtgccagagacctccttggccctaaagcactccctggaagcagccaaccacgtcagtacaacaaccccataggcctgtattctgcagaaaccctgcgcgagatggctcagatgtaccaaatgtcgctccgcggtaaggcaagcggcgttggcctccccggtggctctctcccgatcaaagacctggctgtggactccgcctcacctgtctaccaggctgtgatcaagtctcaaaacaagccagaagacgaggccgacgagtgggctcgacggtctagcaacctccagtctaggagtttccgaattttggcccagatgacaggcactgaattcatgcaggacccggacgaagaggccctcaggcggagccgccctcaagcttcatcttatagccctgcggtcgccgcttcaagcgctcccgcaactcatacttcttatagcgaagggcctgctgccccagcaccaaaaccacgcgttgtgacaacagcctcgattagacccagtgtttatcagcccgtccccgctagcacctactcccctagtccaggggcaaattactcaccaaccccgtatacaccctctccagttccaacttatactccctccccagcccctgcctatacccccagtcccgctcccaactacaatcccgcaccatcggttgcttattccggaggccctgccgaacctgcctccaggcccccatgggttaccgacgactcgttcagccagaaattcgctcccggaaaaagtaccacttctatctctaaacagacactcccgcgaggtggaccagcatacactcccgctgggccacaagttccccctctcgcaagagggaccgtccaaagagccgagcgttttcctgcttctagtcggacacccttgtgtgggcattgcaataacgtcatcaggggaccgttcttggtagcaatgggaagatcatggcatcctgaagagttcacatgcgcctattgtaagacaagcttagcagacgtttgcttcgtggaggagcagaataacgtgtactgcgagaggtgctacgagcagttcttcgcccctctctgtgcaaaatgcaataccaagatcatgggagaggtgatgcacgctctgagacagacttggcacactacttgttttgtatgcgctgcgtgcaaaaagcctttcggaaactccttgttccatatggaggacggcgagccatactgtgagaaggattatattaatcttttttctaccaagtgtcacggttgtgatttccctgtcgaggcgggagacaagttcatcgaggccctgggtcatacctggcatgatacgtgcttcatttgtgcagtgtgtcacgtgaacctggaggggcagccattctacagcaaaaaagatagacctctctgcaagaaacacgcccatactataaacctttag

SEQ ID NO: 282619 - DNA, 1947 bp, Artificial Sequence
  derived and/or modified sequence
atgagctacagcgtgaccctgaccggccccggcccctggggcttcagactgcagggcggcaaggacttcaacatgcccctgaccatcagcagaatcacccccggcagcaaggccgcccagagccagctgagccagggcgacctggtggtggccatcgacggcgtgaacaccgacaccatgacccacctggaggcccagaacaagatcaagagcgccagctacaacctgagcctgaccctgcagaagagcaagagacccatccccatcagcaccaccgccccccccgtgcagacccccctgcccgtgatcccccaccagaaggaccccgccctggacaccaacggcagcctggtggcccccagccccagccccgaggccagagccagccccggcacccccggcacccccgagctgagacccaccttcagccccgccttcagcagacccagcgccttcagcagcctggccgaggccagcgaccccggcccccccagagccagcctgagagccaagaccagccccgagggcgccagagacctgctgggccccaaggccctgcccggcagcagccagcccagacagtacaacaaccccatcggcctgtacagcgccgagaccctgagagagatggcccagatgtaccagatgagcctgagaggcaaggccagcggcgtgggcctgcccggcggcagcctgcccatcaaggacctggccgtggacagcgccagccccgtgtaccaggccgtgatcaagagccagaacaagcccgaggacgaggccgacgagtgggccagaagaagcagcaacctgcagagcagaagcttcagaatcctggcccagatgaccggcaccgagttcatgcaggaccccgacgaggaggccctgagaagaagcagaccccaggccagcagctacagccccgccgtggccgccagcagcgcccccgccacccacaccagctacagcgagggccccgccgcccccgcccccaagcccagagtggtgaccaccgccagcatcagacccagcgtgtaccagcccgtgcccgccagcacctacagccccagccccggcgccaactacagccccaccccctacacccccagccccgtgcccacctacacccccagccccgcccccgcctacacccccagccccgcccccaactacaaccccgcccccagcgtggcctacagcggcggccccgccgagcccgccagcagacccccctgggtgaccgacgacagcttcagccagaagttcgcccccggcaagagcaccaccagcatcagcaagcagaccctgcccagaggcggccccgcctacacccccgccggcccccaggtgccccccctggccagaggcaccgtgcagagagccgagagattccccgccagcagcagaacccccctgtgcggccactgcaacaacgtgatcagaggccccttcctggtggccatgggcagaagctggcaccccgaggagttcacctgcgcctactgcaagaccagcctggccgacgtgtgcttcgtggaggagcagaacaacgtgtactgcgagagatgctacgagcagttcttcgcccccctgtgcgccaagtgcaacaccaagatcatgggcgaggtgatgcacgccctgagacagacctggcacaccacctgcttcgtgtgcgccgcctgcaagaagcccttcggcaacagcctgttccacatggaggacggcgagccctactgcgagaaggactacatcaacctgttcagcaccaagtgccacggctgcgacttccccgtggaggccggcgacaagttcatcgaggccctgggccacacctggcacgacacctgcttcatctgcgccgtgtgccacgtgaacctggagggccagcccttctacagcaagaaggacagacccctgtgcaagaagcacgcccacaccatcaacctgtag

SEQ ID NO: 282620 - protein, 194 aa, Artificial Sequence
  derived and/or modified sequence
EPVQPHWFYCKEVEYKQLWMPFSVFDSLNLEEIYNSVQPDPESVVLGTDGGRYDVYLYDRIRKAAYWEEEPAEVRRCTWFYKGDTDSRFIPYTEEFSEKLEVIVQFQPSSVPDEWGTTQDGQTRPRVVKRGIDDNLDEIPDGEMPQVDHLVFVVHGIGPVCDLRFRSIIECVDDFRVVSLKLLRTHFKKSLDDG

SEQ ID NO: 282621 - DNA, 462 bp, Artificial Sequence
  derived and/or modified sequence
tgaagcgtgcagagccccgcccagcagcaggtgcccgccagacccggcgcccccagcgtgcaggtgcccagccccttcctgctgcagaaccagtacgagcccgtgcagccccactggttctactgcaaggaggtggagtacaagcagctgtggatgcccttcagcgtgttcgacagcctgaacctggaggagatctacaacagcgtgcagcccgaccccgagagcgtggtgctgggcaccgacggcggcagatacgacgtgtacctgtacgacagaatcagaaaggccgcctactgggaggaggagcccgccgaggtgagaagatgcacctggttctacaagggcgacaccgacagcagattcatcccctacaccgaggagttcagcgagaagctggaggtgagagtgctgtacttcttcatgagcttcttcaagaagtgcagaagctacatccactggtag

SEQ ID NO: 282622 - DNA, 585 bp, Artificial Sequence
  derived and/or modified sequence
gagcccgtgcagccccactggttctactgcaaggaggtggagtacaagcagctgtggatgcccttcagcgtgttcgacagcctgaacctggaggagatctacaacagcgtgcagcccgaccccgagagcgtggtgctgggcaccgacggcggcagatacgacgtgtacctgtacgacagaatcagaaaggccgcctactgggaggaggagcccgccgaggtgagaagatgcacctggttctacaagggcgacaccgacagcagattcatcccctacaccgaggagttcagcgagaagctggaggtgatcgtgcagttccagcccagcagcgtgcccgacgagtggggcaccacccaggacggccagaccagacccagagtggtgaagagaggcatcgacgacaacctggacgagatccccgacggcgagatgccccaggtggaccacctggtgttcgtggtgcacggcatcggccccgtgtgcgacctgagattcagaagcatcatcgagtgcgtggacgacttcagagtggtgagcctgaagctgctgagaacccacttcaagaagagcctggacgacggctag

SEQ ID NO: 282623 - DNA, 462 bp, Artificial Sequence
  derived and/or modified sequence
tgatcagtccagagtcccgcccaacaacaggtgccggctaggcccggggctccgtctgtccaggtgccttcacctttcctgctgcagaaccagtatgagcctgtccagccgcattggttctactgcaaggaagtcgagtacaagcaattatggatgccgtttagcgtgtttgacagcctcaacctcgaggagatttataatagtgtgcaacccgatccagagagcgttgtcctcggtacagacggcggccgttatgacgtgtatctgtacgacaggattcgcaaggcagcttattgggaggaagagccagccgaagttagacgctgcacatggttttacaagggcgatacagactcacggtttattccctacaccgaagaattctccgagaaactggaggtacgcgtgctgtattttttcatgagcttctttaagaaatgtcgttcatatattcattggtag

SEQ ID NO: 282624 - DNA, 585 bp, Artificial Sequence
  derived and/or modified sequence
gaacccgtgcagcctcattggttctattgcaaagaagtggagtataaacagctgtggatgcccttcagtgtgttcgatagccttaatctcgaggaaatatacaacagtgtgcagcccgatcctgaaagtgtcgtgctgggcactgacgggggccgttacgacgtgtatctgtacgaccgtattcggaaggctgcttattgggaggaggagcccgccgaagtaagaaggtgcacatggttctataaaggcgacaccgactcccgctttatcccatacaccgaagaattttcagagaagctggaagttattgtgcagttccagccaagctccgtacccgacgagtggggcacaacgcaagacggacaaacaagaccacgtgttgtgaagcgtggtatcgatgataacctcgatgagataccggatggagaaatgcctcaggttgatcacttggtctttgtcgtccatggtattgggcccgtgtgcgacctgcgcttccgatctatcatcgagtgcgttgatgatttcagggtcgtctctctcaagctattgaggacccatttcaaaaaaagccttgacgacggctag

SEQ ID NO: 282625 - DNA, 462 bp, Artificial Sequence
  derived and/or modified sequence
tgaagcgtgcagagccctgcccagcagcaggtgcctgcccggcctggggcccccagcgtgcaggtgcccagccccttcctgctgcagaaccagtatgagcctgtgcagccccactggttctactgcaaggaggtggagtacaagcagctgtggatgcccttctctgtgtttgacagcctgaacctggaggagatctacaacagcgtgcagcctgaccctgagagcgtggtgctgggcacagatggcggccgctatgatgtgtacctgtatgaccgcatcaggaaggccgcctactgggaggaggagcctgctgaggtgcggcgctgcacctggttctacaagggggacacagacagccgcttcatcccctacacagaggagttcagcgagaagctggaggtgcgggtgctgtacttcttcatgtccttcttcaagaagtgccgcagctacatccactggtag

SEQ ID NO: 282626 - DNA, 585 bp, Artificial Sequence
  derived and/or modified sequence
gagcctgtgcagccccactggttctactgcaaggaggtggagtacaagcagctgtggatgcccttctctgtgtttgacagcctgaacctggaggagatctacaacagcgtgcagcctgaccctgagagcgtggtgctgggcacagatggcggccgctatgatgtgtacctgtatgaccgcatcaggaaggccgcctactgggaggaggagcctgctgaggtgcggcgctgcacctggttctacaagggggacacagacagccgcttcatcccctacacagaggagttcagcgagaagctggaggtgattgtgcagttccagcccagctctgtgcctgatgagtggggcaccacccaggacggccagacccggccccgggtggtgaagaggggcattgatgacaacctggatgagatcccagatggagagatgccccaggtggaccacctggtgtttgtggtgcatggaattggccctgtgtgtgacctgcgcttccgcagcatcattgaatgtgtggatgacttccgggtggtgtccctgaagctgctgcggacccacttcaagaagagcctggatgatggatag

SEQ ID NO: 282627 - DNA, 462 bp, Artificial Sequence
  derived and/or modified sequence
tgaagcgtgcagagccccgcccagcagcaggtgcccgcccggcccggggcacccagcgtgcaggtcccaagtccattcttattgcaaaatcagtatgaacctgtgcagccacactggttctattgtaaagaggtggagtacaagcagctttggatgccattcagtgtctttgattccctcaatcttgaagagatatacaactctgtgcagcctgacccagagtcggtcgtccttggaacagatggtgggaggtatgatgtgtacttatacgataggattcgaaaggccgcttactgggaagaagagcctgccgaagtgcgcaggtgtacatggttttacaagggagatacggattctcgattcatcccatacactgaggagtttagtgaaaagctggaggttagagtgctctacttttttatgtcctttttcaagaaatgccgatcttacatccactggtag

SEQ ID NO: 282628 - DNA, 585 bp, Artificial Sequence
  derived and/or modified sequence
gagcccgtgcagccccactggttctactgcaaggaggtggagtacaagcaactctggatgccattcagcgtgtttgactcactcaatctggaggagatctacaatagcgtgcaacccgacccagaatcagtggtgttaggaacagatggaggacgctatgacgtttacttatacgatcggatacggaaagccgcatactgggaggaagagcccgccgaggtgagaaggtgcacctggttctacaagggagataccgactccagattcatcccatatacggaggaattttcggagaaactggaagtgatagtacagtttcagccttcttccgtccctgatgagtggggcaccacacaggacggccagacccggcctcgcgtagtgaagagaggtattgatgacaatttagacgagattccagatggagagatgccacaggtggatcatctggtcttcgtggttcatggaattgggcccgtgtgtgatctgcggttccggtctatcatcgagtgtgttgacgacttcagggtggtctctttaaagcttctgcgaacacactttaaaaaaagtctggatgatggctag

SEQ ID NO: 282629 - DNA, 462 bp, Artificial Sequence
  derived and/or modified sequence
tgaagcgtccagtcccccgctcagcagcaggtacctgccagacccggtgctccctcagtgcaagtgccgtcaccttttttattgcagaaccagtacgaaccagtgcagcctcactggttttactgtaaagaggtggagtataagcaactgtggatgcccttcagtgtattcgattcattgaacctggaagaaatatacaacagcgtccagcctgacccggagtctgttgtgctgggcactgatggcggaaggtacgatgtgtacctgtacgatagaattaggaaagctgcatattgggaggaggagcccgctgaggttcggagatgtacgtggttttacaagggagacaccgattccagatttataccatatacggaggaattttctgaaaagctcgaggttcgggtgctgtacttcttcatgagcttcttcaagaagtgccgatcctatatccattggtag

SEQ ID NO: 282630 - DNA, 585 bp, Artificial Sequence
  derived and/or modified sequence
gaacccgttcaacctcactggttctattgtaaagaggtcgaatataaacagctatggatgccattttccgtattcgattccctcaacctagaagaaatatacaactctgtgcagccggatcccgaatcggtcgtgctcggtaccgacggagggaggtacgatgtatatttatacgacaggatcaggaaggccgcttactgggaggaggaacccgctgaggtccgcagatgtacctggttttataaaggcgatacagactctcgatttattccttacactgaggagttcagcgaaaagcttgaggttatcgtgcagttccaaccgtctagtgtaccagacgaatgggggaccacacaggatggccagacccgccctagggtggtgaagcgcggaatcgacgataacctggacgaaataccggacggagagatgccgcaggtcgaccatttagtgtttgtggttcatgggattgggcctgtctgtgatcttagatttcgtagcataatagagtgtgtggatgatttcagagtagtgtctcttaagctcctcaggactcattttaaaaagtcactggacgatggctag

SEQ ID NO: 282631 - DNA, 782 bp, Artificial Sequence
  derived and/or modified sequence
ttcagtgcagtcaccggcacagcagcaggtacctgccagacctggggctccctctgttcaagtgccatctccttttctacttcaaaaccaatatgagcctgttcagccccactggttttactgcaaggaggtagaatacaaacaactgtggatgccttttagtgtgttcgactctttgaatcttgaagaaatctataattcagttcagccagatccggagagcgtggttcttggcacggatggagggcgctacgatgtttacctctatgaccgaataaggaaggctgcctactgggaagaggagccagccgaagtgagacgctgtacttggttttacaagggggacacagatagtcgatttattccctatactgaggagttcagtgaaaaactagaggtacgggtgctttatttctttatgagtttctttaaaaaatgtaggtcctatatacattggtgagtaacatcattcacagtggagcggactttacttacaagacagcttgttttgatgctgttcacagagaagattactttttaagtggtgtcatcactcatgaggtgctaatcgtggcatctgtgtctaaagatagaatatgatttgcagagacacatcacagatctaataaggtgcttgtgtcaagccttcaatagaacctaggccgctgggatttgttgttgatagaagatgccaagcatatggacattttcaaattagtattcagtaaaaggcttgaaattaacctctgatttgtgaaaataaataaatagaattggaagaa

SEQ ID NO: 282632 - DNA, 582 bp, Artificial Sequence
  derived and/or modified sequence
gagcctgttcagccccactggttttactgcaaggaggtagaatacaaacaactgtggatgccttttagtgtgttcgactctttgaatcttgaagaaatctataattcagttcagccagatccggagagcgtggttcttggcacggatggagggcgctacgatgtttacctctatgaccgaataaggaaggctgcctactgggaagaggagccagccgaagtgagacgctgtacttggttttacaagggggacacagatagtcgatttattccctatactgaggagttcagtgaaaaactagaggttattgttcagttccagccctcctcagtgccagatgaatggggcaccacgcaagatggacagacaaggcccagggttgtaaagcgtggaattgatgataaccttgatgaaattcccgacggggagatgcctcaagttgaccatttggtgtttgtggtgcatggcattggacctgtgtgtgacttacgctttaggagcattattgagtgtgtggatgattttagggtggtttctctcaaattgctgcggacacatttcaagaaatctttagatgacggg

SEQ ID NO: 282633 - DNA, 2035 bp, Artificial Sequence
  derived and/or modified sequence
ctctcacacatgccctccctcgatggcccccagctcttgtaggacaagccctcatggcagagctagatggcaccctaggggccatacaggtgcgtgcactccttgcctcgcggatgaggaagatgagcccagaggaggagctgacatggctgagtggccaggtgggatctggagcctagtgtccttgccgtctggacccctcccagcatatcatgctgtgtcctactaaggctcccaaaatggggacaaacttttcatctttcagcttctcccagtgcaccttcttgctgcctaagccctgactctctgcttaggtttcaaaaaatgagacaactcatgagagaaaagaaaatggtcagatccgcaatgcatggaaaaatatctctttatgtgtgtcatctcctcaagactcccaacaaagcctatgccagcctctctcttacagaggaacaaacagaggccaggaggttacgtggctcgtccaaggctagacagcattaaaatgtggtggcaccaagagtcaacctggaccaggcgtcaaaactcaagctgttctacttttaccttctcctaatcatgtacagtgattattcatattgcaaactcgcagctttagtcttactggaggggtgacacctggattacgggacagctaccacagtagaagagatcaaattgcccttaaaaatctccagtctgatgtcacagaggcaaaatctgacttcaccaaggagaccctggcatcacaaaacacaaaaatgatttcatccatagtcatctcccagatgattgatgagaataagtcaagagaaaacagggcctccttgcccctaccgtgtgccattgctcagtctcgtgcacatcacgccaagcaatctctggctaaccgcagcggagtcaacattcacagagcatttgcgttacttccgggcagattaggaatcccggcaccgtcagatgagcgaggacctgaggcagagctgccgcccaaagaggagagaccctgtgggggcccccgcagagggtttgcatccatcaccatcacggccagacgcgtgggccccccagcccgcgccctggtgtgggggactgctggggactctctgtgccccaagtgcagggctgaggacacactgttccaggcgcccccggctctggccaatggcgcccatccaggtcggcatcagagatcttttgcctgcacagagttctccagaaacagctccgtggtgcggctgaaggttcccgaggcccacactgggttgtgtgagagacgcaagtactgggtcacccatgcagacgacaaagagaccagtttttctccagacaccccactgtcaggaaagagcccgctggtgttcagttcctgtgtccacctcagggtgtctcagcagtgtccagattcaatctattacgtagacaagtctctctccgtccccattgagccacctcaaattgccagccccaaaatgcacagatccgtcctgtcgctcaacctcaattgtagttcccacagattaacagcagatggagtagatggcctagtgaacagagagccaataagcgaagccctgaagcaggagctcctggagggagaccaggacctcgtaggccagcgctggaacccaggtttacaagaaagtcacttgaaggaaaccccatcgttgaggcgggtgcatttggggaccggcgcttgtccttggagtggttcttttccattggaaaacacagaattggcaaatgtgggagctaaccaagtcactgtaagaaaaggggaaaaggaccatacaactcattgtcacgccagcgatcatgccaaccaactgtccattcacattcctggctggagttacagggcagacttattacaagaaggacaacataagcagctatcaatgttccaaagataaatcccactttagtggttaaagagattgctcaagctaagcacttcgtcttccttattgatgatgattccagaaatacaccactgcattgttgtatgttaccccagttaaagcacatcctcattttt

SEQ ID NO: 282634 - protein, 404 aa, Artificial Sequence
  derived and/or modified sequence
MRFFTSVACYGSCLFASELLIRCKDWLKGRPALFTALLACVLYLCEWTGAKHVPGSSYVEMLQASTSNPIPGDGFSRATKDSMIRKFLEGNSMGMTNLERDQCHLGQEEDVYHTVDDDEAFSVDLASRPPVPVPRPETTAPGAHQLPDNEPYIFKVFAEKSQERPGNFYVSSESIRKGPPVRPWRDRPQSSIYDPFAGMKTPGQRQLITLQEQVKLGIVNVDEAVLHFKEWQLNQKKRSESFRFQQENLKRLRDSITRRQREKQKSGKQTDLEITVPIRHSQHLPAKVEFGVYESGPRKSVIPPRTELRRGDWKTDSTSSTASSTSNRSSTRSLLSVSSGMEGDNEDNEVPEVTRSRSPGPPQVDGTPTMSLERPPRVPPRAASQRPPTRETFHPPPPVPPRGR

SEQ ID NO: 282635 - protein, 627 aa, Artificial Sequence
  derived and/or modified sequence
MVVQPDRIRCGAETTVYVIVRCKLDDRVATEAEFSPEDSPSVRMEAKVENEYTISVKAPNLSSGNVSLKIYSGDLVVCETVISYYTDMEEIGNLLSNAANPVEFMCQAFKIVPYNTETLDKLLTESLKNNIPASGLHLFGINQLEEEDMMTNQRDEELPTLLHFAAKYGLKNLTALLLTCPGALQAYSVANKHGHYPNTIAEKHGFRDLRQFIDEYVETVDMLKSHIKEELMHGEEADAVYESMAHLSTDLLMKCSLNPGCDEDLYESMAAFVPAATEDLYVEMLQASTSNPIPGDGFSRATKDSMIRKFLEGNSMGMTNLERDQCHLGQEEDVYHTVDDDEAFSVDLASRPPVPVPRPETTAPGAHQLPDNEPYIFKVFAEKSQERPGNFYVSSESIRKGPPVRPWRDRPQSSIYDPFAGMKTPGQRQLITLQEQVKLGIVNVDEAVLHFKEWQLNQKKRSESFRFQQENLKRLRDSITRRQREKQKSGKQTDLEITVPIRHSQHLPAKVEFGVYESGPRKSVIPPRTELRRGDWKTDSTSSTASSTSNRSSTRSLLSVSSGMEGDNEDNEVPEVTRSRSPGPPQVDGTPTMSLERPPRVPPRAASQRPPTRETFHPPPPVPPRGR

SEQ ID NO: 282636 - DNA, 1215 bp, Artificial Sequence
  derived and/or modified sequence
atgagattcttcaccagcgtggcctgctacggcagctgcctgttcgccagcgagctgctgatcagatgcaaggactggctgaagggcagacccgccctgttcaccgccctgctggcctgcgtgctgtacctgtgcgagtggaccggcgccaagcacgtgcccggcagcagctacgtggagatgctgcaggccagcaccagcaaccccatccccggcgacggcttcagcagagccaccaaggacagcatgatcagaaagttcctggagggcaacagcatgggcatgaccaacctggagagagaccagtgccacctgggccaggaggaggacgtgtaccacaccgtggacgacgacgaggccttcagcgtggacctggccagcagaccccccgtgcccgtgcccagacccgagaccaccgcccccggcgcccaccagctgcccgacaacgagccctacatcttcaaggtgttcgccgagaagagccaggagagacccggcaacttctacgtgagcagcgagagcatcagaaagggcccccccgtgagaccctggagagacagaccccagagcagcatctacgaccccttcgccggcatgaagacccccggccagagacagctgatcaccctgcaggagcaggtgaagctgggcatcgtgaacgtggacgaggccgtgctgcacttcaaggagtggcagctgaaccagaagaagagaagcgagagcttcagattccagcaggagaacctgaagagactgagagacagcatcaccagaagacagagagagaagcagaagagcggcaagcagaccgacctggagatcaccgtgcccatcagacacagccagcacctgcccgccaaggtggagttcggcgtgtacgagagcggccccagaaagagcgtgatcccccccagaaccgagctgagaagaggcgactggaagaccgacagcaccagcagcaccgccagcagcaccagcaacagaagcagcaccagaagcctgctgagcgtgagcagcggcatggagggcgacaacgaggacaacgaggtgcccgaggtgaccagaagcagaagccccggccccccccaggtggacggcacccccaccatgagcctggagagaccccccagagtgccccccagagccgccagccagagaccccccaccagagagaccttccacccccccccccccgtgccccccagaggcagatag

SEQ ID NO: 282637 - DNA, 1884 bp, Artificial Sequence
  derived and/or modified sequence
atggtggtgcagcccgacagaatcagatgcggcgccgagaccaccgtgtacgtgatcgtgagatgcaagctggacgacagagtggccaccgaggccgagttcagccccgaggacagccccagcgtgagaatggaggccaaggtggagaacgagtacaccatcagcgtgaaggcccccaacctgagcagcggcaacgtgagcctgaagatctacagcggcgacctggtggtgtgcgagaccgtgatcagctactacaccgacatggaggagatcggcaacctgctgagcaacgccgccaaccccgtggagttcatgtgccaggccttcaagatcgtgccctacaacaccgagaccctggacaagctgctgaccgagagcctgaagaacaacatccccgccagcggcctgcacctgttcggcatcaaccagctggaggaggaggacatgatgaccaaccagagagacgaggagctgcccaccctgctgcacttcgccgccaagtacggcctgaagaacctgaccgccctgctgctgacctgccccggcgccctgcaggcctacagcgtggccaacaagcacggccactaccccaacaccatcgccgagaagcacggcttcagagacctgagacagttcatcgacgagtacgtggagaccgtggacatgctgaagagccacatcaaggaggagctgatgcacggcgaggaggccgacgccgtgtacgagagcatggcccacctgagcaccgacctgctgatgaagtgcagcctgaaccccggctgcgacgaggacctgtacgagagcatggccgccttcgtgcccgccgccaccgaggacctgtacgtggagatgctgcaggccagcaccagcaaccccatccccggcgacggcttcagcagagccaccaaggacagcatgatcagaaagttcctggagggcaacagcatgggcatgaccaacctggagagagaccagtgccacctgggccaggaggaggacgtgtaccacaccgtggacgacgacgaggccttcagcgtggacctggccagcagaccccccgtgcccgtgcccagacccgagaccaccgcccccggcgcccaccagctgcccgacaacgagccctacatcttcaaggtgttcgccgagaagagccaggagagacccggcaacttctacgtgagcagcgagagcatcagaaagggcccccccgtgagaccctggagagacagaccccagagcagcatctacgaccccttcgccggcatgaagacccccggccagagacagctgatcaccctgcaggagcaggtgaagctgggcatcgtgaacgtggacgaggccgtgctgcacttcaaggagtggcagctgaaccagaagaagagaagcgagagcttcagattccagcaggagaacctgaagagactgagagacagcatcaccagaagacagagagagaagcagaagagcggcaagcagaccgacctggagatcaccgtgcccatcagacacagccagcacctgcccgccaaggtggagttcggcgtgtacgagagcggccccagaaagagcgtgatcccccccagaaccgagctgagaagaggcgactggaagaccgacagcaccagcagcaccgccagcagcaccagcaacagaagcagcaccagaagcctgctgagcgtgagcagcggcatggagggcgacaacgaggacaacgaggtgcccgaggtgaccagaagcagaagccccggccccccccaggtggacggcacccccaccatgagcctggagagaccccccagagtgccccccagagccgccagccagagaccccccaccagagagaccttccacccccccccccccgtgccccccagaggcagatag

SEQ ID NO: 282638 - DNA, 1215 bp, Artificial Sequence
  derived and/or modified sequence
atgcggtttttcacctcagtagcatgttatggatcatgcctatttgcgtcagaacttctgattaggtgcaaggactggcttaaggggcgcccagctcttttcaccgcattgctggcatgcgtcctgtacctgtgcgaatggactggcgccaagcatgtgccaggcagttcctacgtcgagatgctacaggcatctacttccaatcctattccaggggatggattctcccgcgctacaaaggacagtatgattaggaagttccttgaggggaattccatggggatgacgaacctagaaagagaccagtgccatctcgggcaggaagaggatgtctaccacactgtggatgacgacgaggccttttctgtggatctggcctctcgaccgcctgttcctgtcccgaggcctgagaccacagcccccggcgcccatcagctgccagataacgaaccatacatcttcaaagtgtttgccgaaaaatcacaggaaagacccggcaatttttacgtttcgtccgagagtatcaggaagggaccccccgtgagaccttggcgcgatcgcccacagtccagcatctacgacccattcgccggcatgaaaaccccaggacagagacagctgatcacccttcaggagcaagtcaagctaggcatcgttaacgtggacgaggccgtcctccattttaaggagtggcagcttaaccagaagaaacgtagtgagtcctttagatttcaacaagagaatctcaagagacttagggattctataactcgtaggcaacgggaaaagcagaagagtgggaaacagaccgacttggaaattactgtgcccattagacactctcagcacctgcccgcaaaagtggagttcggagtttacgagagcgggccccggaagagcgtgattccacctaggaccgaactgcggagaggtgactggaaaaccgactccacgtcttcgacagcatcctccaccagcaataggagttctacccgaagcctcctatcagtgagctctggaatggagggcgacaacgaggacaatgaagtgcctgaagtaacccggtcaaggtcccctggccctccccaggtcgacggaacacctactatgagcctggaacgaccccctcgcgtccccccgcgcgccgcttctcagcgtcccccgaccagagaaacatttcatcccccgccccccgttccgccacgggggcgttag

SEQ ID NO: 282639 - DNA, 1884 bp, Artificial Sequence
  derived and/or modified sequence
atggtagtgcagcctgaccggatccgctgcggtgccgaaacaaccgtctacgtgatagtcagatgcaaactcgatgatcgcgtagctaccgaggctgagtttagtccagaggactccccatccgtcagaatggaagctaaagtcgagaacgagtacaccatctctgtgaaggctcctaacctctcctccggcaacgtcagcctcaaaatctactcaggggatcttgtcgtctgcgaaaccgtcatttcttactacactgatatggaggagattgggaaccttctgtccaacgctgccaatcccgttgagtttatgtgtcaggcgttcaagattgtaccctacaacacagaaacgctggataagttgctgacagaatctctcaagaataacatcccagctagcgggttacacctgttcggtatcaaccagcttgaggaagaagatatgatgaccaaccagagagatgaggaactgccaactctcttacacttcgcagccaaatacggactcaagaatcttaccgctctgctgttgacttgcccgggcgctctgcaggcctatagtgtggccaacaaacatgggcattatccaaatactattgcagagaaacatgggtttcgggatttaagacagttcatagacgaatacgttgaaaccgtagatatgctgaagtcgcacatcaaagaagaactcatgcatggcgaggaggccgacgcagtctatgagtctatggcacacctctctacagacctgctaatgaagtgcagccttaaccctgggtgcgatgaagatttatatgagtccatggccgcattcgtgccagctgccaccgaagacctgtacgtggagatgctccaggcttccactagcaaccccatcccaggagacggtttttcccgagcaacaaaagactcaatgatccggaaatttctggagggcaatagtatggggatgacaaacctggagagagatcagtgccaccttggacaggaagaggatgtctaccacaccgtcgacgatgatgaggccttttcggtggacctcgcatccagaccacctgttcccgtcccccgacccgagactacagctcctggagctcaccagctgcccgataatgagccatacattttcaaggtatttgcagagaagagccaggagcgccctggcaatttttacgtgagcagtgagtccataagaaaggggccgccagtccgcccttggagagatcggccacaaagttctatttatgatccattcgcggggatgaaaacacctggacaacgccagctcattacccttcaagaacaggtgaagcttggaattgtgaacgttgatgaggctgtccttcattttaaagaatggcaactgaatcagaagaagcggtcagagtctttcagatttcagcaagagaacctgaagcgtctgcgggatagtatcaccaggaggcagagggagaaacaaaagtccgggaaacagacggatctggagatcaccgtccccattagacattcccagcatctgcctgctaaggttgagttcggagtgtatgaaagcgggccccgcaagagtgtgattcccccccggactgagcttcgtcggggggattggaagaccgatagtacatcatccacggcgtcttctactagcaatcgcagctcaacccggtcattactgagcgtctcaagtggcatggagggggacaacgaggacaacgaggtgccagaggtgacaagaagcaggtcgcctggacctccccaggttgacggtacacccaccatgtctctggagagacccccccgcgttccaccacgtgccgcatcccaacgacccccaacacgcgagacctttcatcccccgccaccagtgccaccacgcgggagatag

SEQ ID NO: 282640 - DNA, 1215 bp, Artificial Sequence
  derived and/or modified sequence
atgaggttcttcacctctgtggcctgctacggcagctgcctgtttgccagcgagctgctgatccgctgcaaggactggctgaagggccgcccagccctcttcaccgccctgctggcctgtgtgctgtacctgtgtgagtggacaggagccaagcacgtgcccggcagcagctatgtggagatgctgcaggccagcaccagcaaccccatccctggagatggcttcagccgggccaccaaggacagcatgatcaggaagttcctggagggcaacagcatgggcatgaccaacctggagcgggaccagtgccacctgggccaggaggaggatgtgtaccacacagtggatgatgatgaggccttctctgtggacctggccagcaggcctcctgtgcctgtgcccaggcctgagaccacagcccctggggcccaccagctgcctgacaatgagccctacatcttcaaggtgtttgctgagaagagccaggagaggcctggcaacttctacgtgagcagcgagagcatcagaaaaggacctcctgtgcggccctggagggaccggccccagagcagcatctatgacccctttgctggcatgaagaccccaggccagaggcagctgatcaccctgcaggagcaggtgaagctgggcatcgtgaatgtggatgaggccgtgctgcacttcaaggagtggcagctgaaccagaagaagaggtctgagagcttccgcttccagcaggagaacctgaagaggctgcgggacagcatcacccggcggcagcgggagaagcagaagagcggcaagcagacagacctggagatcaccgtgcccatccgccacagccagcacctgcctgccaaggtggagtttggagtgtatgaaagtggccccaggaagagcgtcatcccccccaggacagagctgcggcggggggactggaagacagacagcaccagcagcacagccagcagcaccagcaacagaagcagcaccaggagcctgctgtctgtgagcagcggcatggagggggacaatgaagataatgaggtgcctgaggtgaccaggagccgcagccctggccccccccaggtggatggcacccccaccatgagcctggagaggcctccccgggtgcccccccgggccgccagccagaggcctcccacccgggagaccttccaccccccacctcctgtgcccccccggggccgctag

SEQ ID NO: 282641 - DNA, 1884 bp, Artificial Sequence
  derived and/or modified sequence
atggtggtgcagcctgaccgcatccgctgtggggctgagaccaccgtgtatgtgattgtgcgctgcaagctggatgacagagtggccacagaggccgagttctccccagaggacagccccagcgtgaggatggaggccaaggtggagaatgagtacaccatctctgtgaaggcccccaacctgagcagtggaaatgtgtccctgaagatctacagcggggacctggtggtgtgtgagaccgtcatctcctactacacagacatggaggagatcggcaacctgctgagcaatgctgccaaccctgtggagttcatgtgccaggccttcaagatcgtgccctacaacacagagaccctggacaagctgctgacagagagcctgaagaacaacatcccagccagcggcctgcacctgtttggcatcaaccagctggaggaggaggacatgatgaccaaccagagagatgaggagctgcccaccctgctgcactttgctgccaagtatggcctgaagaacctgacagccctgctgctgacctgccctggggccctgcaggcctacagcgtggccaacaagcacggccactaccccaacaccatcgccgagaagcacggcttccgggacctgcggcagttcattgatgaatatgtggagaccgtggacatgctgaagagccacatcaaggaggagctgatgcatggagaggaggctgatgctgtgtatgaatccatggcccacctgagcacagacctgctgatgaagtgcagcctgaaccctggctgtgatgaggacctgtatgagagcatggccgcctttgtgcctgctgccacagaggacctgtatgtggagatgctgcaggccagcaccagcaaccccatccctggagatggcttcagccgggccaccaaggacagcatgatcaggaagttcctggagggcaacagcatgggcatgaccaacctggagcgggaccagtgccacctgggccaggaggaggatgtgtaccacacagtggatgatgatgaggccttctctgtggacctggccagccggccccctgtgcctgtgcccaggcctgagaccacagcccctggggcccaccagctgcctgacaatgagccctacatcttcaaggtgtttgctgagaagagccaggagcggcccggcaacttctacgtgtcctctgagagcatcaggaagggcccccctgtgcggccctggagggaccggccccagagcagcatctatgacccctttgctggcatgaagaccccaggccagaggcagctgatcaccctgcaggagcaggtgaagctgggcatcgtgaatgtggatgaagctgtgctgcacttcaaggagtggcagctgaaccagaagaagaggtctgagagcttccgcttccagcaggagaacctgaagaggctgcgggacagcatcacccggcggcagcgggagaagcagaagagcggcaagcagacagacctggagatcaccgtgcccatccgccacagccagcacctgcctgccaaggtggagtttggagtgtatgagagcggccccaggaagagcgtcatcccccccaggacagagctgcggcggggggactggaagacagacagcaccagcagcacagccagcagcaccagcaacagaagcagcaccaggagcctgctgtctgtgagcagcggcatggagggggacaatgaagataatgaggtgcctgaggtgaccaggagccgcagccctggccccccccaggtggatggcacccccaccatgagcctggagcggcccccccgggtgccccccagggctgccagccagaggcctcccacccgggagaccttccaccccccacctcctgtgcccccccggggccgctag

SEQ ID NO: 282642 - DNA, 1215 bp, Artificial Sequence
  derived and/or modified sequence
atgcggttcttcaccagcgtggcctgctacggcagctgcctgttcgcatccgagcttcttattcggtgtaaagattggcttaaggggagacctgccctgttcaccgccctcctggcttgcgtcctgtatctctgtgaatggaccggagccaagcacgtacctggttcaagttacgtggagatgctccaggcatctactagcaaccctatccctggtgatgggttctcaagggccactaaggacagcatgattcgcaagtttctggagggcaattccatgggaatgacaaatctggagcgtgaccagtgccatctgggccaggaagaagacgtgtaccacacagttgacgacgatgaagctttctcagtagatctggctagcaggccccccgttcctgtcccccgccctgagaccaccgctcccggcgcccatcagctgcccgataatgaaccgtatattttcaaggtctttgccgagaagagccaggaaagacctgggaacttctatgtgtctagtgagtctattagaaaggggcccccggtgaggccatggagggataggccacagtcgagtatttatgaccctttcgccgggatgaagacacccgggcaacgccaactgattacactgcaggagcaggtgaaactcggcatcgtgaatgtggatgaagccgttttacactttaaggagtggcaactgaaccaaaagaagcgctccgagtctttcagatttcaacaagaaaacctcaaaaggcttcgcgactctatcacccgccgtcaaagggagaagcagaaatccggtaagcagaccgacttggagattaccgtgcccatacgtcactcccagcacttgcctgcgaaggtggagtttggtgtgtacgaatcaggtcctaggaaaagtgtcatccctcccagaaccgagctgcggcgcggggattggaaaacagacagcacatcgagtacagcatcctcgacttctaatcggtcatccacccgaagcctgctgtcagttagtagtggaatggagggggataatgaggacaacgaggtgcccgaggtgacccgctccagaagtccaggccctccgcaggttgacggcacccctacaatgagtcttgagcggccacctcgagtacccccaagggcggcttcacaaagacctccgacgcgcgagacgttccatccccccccgccagtaccacctcgaggtagatag

SEQ ID NO: 282643 - DNA, 1884 bp, Artificial Sequence
  derived and/or modified sequence
atggtggtgcagcccgaccggatccggtgcggcgccgagaccaccgtgtatgtaattgtccgctgtaagctggacgacagggtcgccacagaagccgagttttcaccagaagatagccccagcgtgagaatggaagccaaggtggagaatgagtacaccatctctgtcaaagctcccaacttgtcctctggaaatgtgagtctgaaaatttactctggtgatctggtagtgtgcgaaaccgtgatctcgtattataccgacatggaagaaatcggcaacttattgtctaatgctgcaaatccagtggaatttatgtgtcaggcttttaagatcgttccctataacactgaaaccctagacaaactcttgacagagtcgttaaagaacaacatacccgctagtggacttcatctgtttgggatcaatcagctggaggaagaggatatgatgaccaatcagagagatgaggaactgcccacgttactgcactttgcggcaaaatatggtctgaaaaacctcactgccctcttgcttacttgcccgggtgcgttacaggcgtattcagtggccaacaagcacggtcactaccccaatactatagctgagaagcacggctttcgcgatttaagacagtttatcgatgaatacgttgagaccgtggacatgctgaagagccatattaaggaggagcttatgcatggggaggaggcagacgctgtatatgaatctatggctcacctatccaccgacctccttatgaaatgtagtttgaaccctggctgtgacgaggatctctatgagagcatggccgcttttgtccctgcagccacggaggatctgtacgttgaaatgctccaagcatcaaccagtaatcccatccccggggacggcttcagccgcgccacaaaagattctatgatcagaaagttcttggagggcaactcaatgggcatgactaacctcgaaagagaccaatgtcacctgggtcaggaggaggacgtctaccatacagtggacgacgacgaggcattttcagtagacttagcctccaggcccccagtcccagtccctcggccagaaactaccgctcccggagcacaccagctgcccgacaacgaaccttatatctttaaggtctttgctgaaaagtctcaggagcgcccaggaaatttttacgtgtcttctgaatcaatcaggaaaggcccgccggtgcgaccttggcgggaccgtcctcagtcttccatctacgacccctttgctgggatgaaaacccccggacaacgccagctgatcaccctgcaggagcaggtcaagctgggtatagttaatgtggacgaagcagtgcttcatttcaaggagtggcagttaaaccagaaaaaacggagcgagtccttcaggttccagcaggaaaatctgaagcggctgcgggatagtattaccagacggcagagagagaaacaaaagtcaggaaagcagacagatctggaaattactgtcccaattcgccacagtcagcatctgcctgccaaagtcgaatttggggtttatgagtcaggccccaggaagtctgtgattcctccaaggacagagctgaggcgcggcgattggaagaccgatagcacgtcatccacggcaagctccacctccaaccgttccagtacacgaagtctgttatctgtgagcagtgggatggagggagataacgaggacaatgaagtgcccgaggtgacgcgctctagatcaccgggtcccccccaggtagacgggacaccgaccatgagcttggaacgtcctccacgcgttccgcccagggccgcttcacaacgcccaccaacacgcgaaacctttcaccctccaccacccgtacccccaaggggtaggtag

SEQ ID NO: 282644 - DNA, 1766 bp, Artificial Sequence
  derived and/or modified sequence
aaatggctcctgattggtaaattgcatctggaactgggaggatctgtacaggaactagaaatacttgaaagggacagcattctttgggctttcctgagggcattgactctggcatacctctcatggtgaccctggaagctccgcctctggagttgctatgagagaaattgctcttgtaggacatgaggtttttcaccagcgtggcctgctatggatcttgtctctttgcatctgagttgctgatcagatgcaaggactggctcaaaggaagaccagctctcttcactgccctgctagcttgtgtcctttatctttgtgagtggactggtgccaagcatgtcccagggtcatcttatgttgaaatgcttcaggccagtacatctaacccaatccctggagatggtttctctcgggccactaaggactctatgatccgcaagtttttagaaggcaacagcatgggaatgaccaatctggagagagatcagtgccatcttggtcaggaagaagatgtttatcacacggtggatgacgatgaggccttttctgtggacctggccagcaggccccctgtcccagtgcccagaccagagaccactgctcctggtgctcaccagctgcctgacaacgaaccatacatttttaaagtttttgcagaaaaaagtcaagagcggcctgggaatttctacgtttcctcagagagcatcaggaaagggccgcccgtcagaccatggagggacaggccccagtcgagtatatatgacccttttgcgggaatgaaaacgccaggccagcggcagcttatcaccctccaggagcaggtgaagctgggcattgtcaacgtggatgaggctgtgctccacttcaaagagtggcagctcaaccagaagaaacgatcggagtcctttcgtttccagcaggaaaatcttaaacggctaagagacagcatcacccgaagacagagagagaagcaaaaatcaggaaagcagacagacttggagatcacggtcccaattcggcactcacagcacctgcctgcaaaagtggagtttggagtctatgagagtggccccaggaaaagtgtcattccccctaggacggagctgagacgaggagactggaaaacagacagcacctccagcacagcaagtagcacaagtaaccgctccagcacccggagcctcctcagtgtgagcagcgggatggaaggggacaacgaggataatgaagtccctgaggttaccagaagtcgcagtccaggccccccacaagtggatgggacacccaccatgtccctcgagagaccccccagggtgcctccgagagctgcctcacagaggcctccgaccagggagaccttccatcctcctccacctgttccacccagaggacgctgattccacctcctaaaacctgcctacttcaggactttaagactcacagtcttcagcctgttaatgatgtcttcatgttgagttttatagcatgactgttgaccttaagatccattctcattgctgataatgctgcagccctgctggtttgggcttgcctcgaagattttattaaggcacgaagaagtgaaaaactaagggcttcattcaccatcaccaagtatatcgaaccatatacttgtttgccaaaaggatgaagacttaatcgaaatacttacctctaatttgccatatcagaagcctaaaaagaatgatcataaatgtacttcaccagtgattttactgaaatgcacttatattagtctttatgta

SEQ ID NO: 282645 - DNA, 1215 bp, Artificial Sequence
  derived and/or modified sequence
atgcggttcttcacatcagtggcctgttatggtagctgtctatttgcatccgagttactgatacgatgtaaagactggcttaaaggaagaccagctctctttactgccctgctggcatgcgtcttgtacctgtgcgaatggactggggcaaagcacgtgccaggctcttcctacgtagagatgttgcaggccagcacaagtaacccaataccaggtgatggattttcccgtgcgaccaaggattctatgatccggaagttcctcgaagggaattcaatgggcatgacaaacttggaacgggaccagtgtcatcttggtcaagaagaagatgtgtaccataccgtcgacgacgatgaagcattttcggtggacttagcgtctcgaccccctgtgcctgtgcccagacccgagacaacggcacccggtgcgcaccagctgcccgacaacgaaccttatatctttaaggtgttcgccgagaaatcacaggagcggcctgggaacttttatgtgtcctccgagtctatccggaaaggaccaccagtgaggccctggcgcgacaggccgcaatcttcaatttacgacccatttgccggaatgaagacacccggacagcggcagctgattacactgcaggagcaagtgaaacttggcattgtaaatgtcgacgaggcagttctccatttcaaagagtggcaactaaatcagaagaagagaagcgagagtttcaggtttcagcaagagaatttaaagcgactgagagatagtataacgcggaggcagcgagagaaacagaaaagcggaaagcaaactgacctcgaaattacagtccctattagacattctcagcacctcccggcaaaggtcgaattcggtgtatacgaatctggaccccgtaagagtgttattccgccaaggaccgaactccggagaggtgattggaagaccgattccacatcatctacggcctccagcacttctaacaggagcagcacccgaagcttgttatccgtgtctagcggcatggagggtgataatgaggataatgaagttccggaagtcacccgatctcgctcgcccggtccccctcaggtggatggtacgccaaccatgagtctcgaacggccacccagggtgcccccacgggctgccagccaacgccctcctaccagggagactttccatccaccaccacccgttccacctagaggcaggtag

SEQ ID NO: 282646 - DNA, 1884 bp, Artificial Sequence
  derived and/or modified sequence
atggtagtccaaccagaccgaatccgatgcggagcagagactacagtgtacgtgattgttcgctgtaaacttgatgatcgggtcgctacagaagccgagttcagcccggaagatagcccctcagtccgtatggaggccaaggtggaaaacgaatacactatctctgttaaggcgcctaacctgtcttcaggcaatgtctccctaaaaatctatagcggcgatcttgtggtttgtgaaacagttattagctactacaccgacatggaggaaattgggaatctgctttccaacgctgctaaccctgtggagttcatgtgtcaggcttttaagattgtgccgtacaatactgaaaccctggacaaactcctcaccgaaagcctgaaaaacaatatcccggcaagcggactccacctgttcggaatcaaccaattggaggaggaggacatgatgacaaatcagagggacgaagagctgcctacactgctgcacttcgccgctaaatacggcctcaagaaccttaccgcgctgctgctgacatgccccggagcgctacaagcttactcggtcgccaacaaacatggtcactacccaaacacaatcgcagagaaacacggtttcagagacctgcggcagtttatagacgaatatgtggaaactgtggacatgttaaaaagccatatcaaagaggagctgatgcatggcgaggaggctgacgctgtatatgaaagcatggcccatctgagcaccgatcttttaatgaagtgttctcttaatcctggatgcgacgaagacttatacgagtcgatggcggcttttgtgcccgcagccacggaggacctctacgtggaaatgctgcaagcttccactagtaaccctatccctggagatggattctctagggccactaaagacagcatgattcgaaagttcctcgaaggtaacagtatgggcatgaccaacctggagcgcgaccagtgtcacttgggacaggaggaagatgtttaccacacagtggatgatgacgaggcctttagtgttgatctggcgtctaggcctcccgttcctgtgccacgccctgaaaccacagctcctggcgctcatcagcttccggataatgaaccctatattttcaaggtgtttgctgaaaaatcgcaggagcggccaggcaacttttacgtgagctcagagtctatccggaaggggcctcccgtacgcccttggagagacagacctcagagctccatttacgatcccttcgccggaatgaaaacgccagggcagcgccagctgattactctccaagaacaggtgaagctggggattgtcaacgtagatgaagccgtcctccactttaaggaatggcagttgaaccagaaaaagcgatcagaatcatttagattccaacaggagaacttaaagcggctccgcgattccataacacggaggcagcgggaaaaacaaaagagcgggaaacaaacagacctggagatcacagtccccatcagacacagccagcacttgcccgctaaagtggaattcggagtgtatgagtctggtcctcggaaatctgtgattccccctcggacagagcttcgacgtggtgactggaagaccgacagtacctcctccacagcctcctctacgagcaaccgttcatcgactcgcagccttctttccgtgagttccggaatggagggtgataatgaggacaatgaggtccctgaggtcacccgaagtcgcagcccaggacctcctcaggtcgacgggacccctactatgtctctggaacgtcctcccagagtgccgccacgggcagcctcgcagagacctcccacacgagaaactttccatccccctccgcctgttcccccacgcggacgttag

SEQ ID NO: 282647 - DNA, 2769 bp, Artificial Sequence
  derived and/or modified sequence
gcagagcgattcgcgtcccggaagcggcggtggcggccgcggcgtaggcggaggagattttcggacctgcgacttccgaacaaccctggcaggaggagcggcgttcagccgggggaggcctgaagaaacgctccggggcccagtggctctacccctgctcctgcccgaccctgccgcctccctcacggagccagcggccgggtgcatggtactcagtaggtgccctgatgatttcagtgcccgccctgctgggctaccttcaggaggtttgccgggcacggctgcctgattccgagctgatgcggaggaagtatcatagcgtgaggcaggaggacctgcagagaggtcgcctgtctcgtcccgaggccgtggctgaggtgaagagcttcttgatccagctggaggccttcctgagccgcctgtgctgcacatgtgaagccgcctaccgcgtgctgcactgggagaaccccgtcgtgtcctcacagttctatggggctcttctgggcacagtctgcatgctgtatttgctgccactctgctgggttctcacccttttaaacagcacgctctttctggggaatgtggagttcttccgagttgtgtctgagtacagggcatctctgcagcagaggatgaacccaaagcaggaagagcatgcctttgagagtcctccaccaccagatgttggggggaaggatggtctgatggacagcacgcctgccctcacacccacggagagtctctcttcccaggacctcacaccgggcagcgtggaggaggctgaggaggctgagccagatgaagagtttaaagatgcgattgaggaggatgatgagggcgccccgtgcccagcagaggatgagctggccctgcaggacaacgggttcctgagcaagaatgaggtgctgcgcagcaaggtgtctcggctcacggagcggctccgcaagcgctaccccaccaacaacttcgggaactgcacgggctgctcggccaccttctcagtgctgaagaagaggcggagctgcagtaattgtggaaacagcttctgctctcgatgctgctccttcaaggtgcccaagtcctccatgggggccacagcccctgaagcccagagggagactgtgtttgtgtgtgcctcgtgtaaccagaccttgagcaagtgagaagagaggccagggtccaaccaggcacccgtccttgggaccagcagtagaccccccactctccccacccctggcccactgtggtgtgtgctgggcaaatgtggcctgaatgctaggtaggcttccccttccttcctcactctctccagctggattctggagctgttctccatccatgagagtggctggcaatggctgctctcaatcccttgagggagaagagcccctggagggcctggcatgtttgtcctgctctgcctgggactgagcgagtggacttagggctgggcaggcagtagccaccagagggcagcagcgaactaggccaggcctgactggggtctgaagatcagggtcagtgtggctgtgcctgggaattccagacctgaggttgggaaaagaggtttttctcctgcagggtactgggccaggccctcagcctcagagagcctgcagaagggcttgggagtgccacaccccatctctgctgattgaatgtccctccaggcaccaggatctcatcatttccccatcagagggtgtggccaggcctaacaagaccatgggtgcttctagaaacagggttgaagttcccagattccctgagaggagaatgtgtataggagggtttggctgagtccttcagcgttaagtggaggaaagcttggggaagccccaatagctggacagacctcggcctcccctcgaagacacctcaattcacagactctcagcccacacaatgccccagtgtccccagctccgctggagcagctgcagggcacttggatcacaacttctgcaccctctgtccagagtctagggcagtcctccactggcccagcactccagtttcctttccctgcctcttgtccaatggagtgggaggccaggtgagtggagcagaggtcctgaagcccttgacccctgggggcctgggtagtgtaggatctcgctgggctgggtcctggattccagggctattccctggaggacagtctcagttatgggataaggccccctgggggtctccatttctttccaacagtttcatgttcactactggactcttacgggctcagtatctctcccttagccatgagctggctcaggcatcccttcccttccctggagctgccctgcctttctcaagtatttatttatttattgcatggttcctgggaacatgtggcacaagtaatgggatgaggaggaattgggggtgggggtcttctacctaggactcttccctggagtcatgggctgcctgggacccaggacccatgagggggctgagaggtttctacactcgaggagcaggggtccagagaggcaggctggggaggcaagggacccatcctaggcccgctttcttgccgagccaagcagcttagctggggctgtgcagccaggggcttacccaggccagtggaggtgccacagccctggggagccagacaggctttggtatcgtatcgcctctgtgtccttttaagagaggagagttcagtaccccgtgctttctttacactggagaggaactaaaaggatctctgtgtctatggagaattgtcaataaaaaggcctcaagcttcttgtttttgtc

SEQ ID NO: 282648 - protein, 307 aa, Artificial Sequence
  derived and/or modified sequence
MKNLVVPMWEGKWKTAKRARMNYKVKLEEISGLLVDALYTNTIYYLIKVDYREVWLIRLFYNFSFLEKNQDFTFKMESPSDSAVVLPSTPQASANPSSPYTNSSRKQPMSATLRERLRKTRFSFNSSYNVVKRLKVESEENDQTFSEKPASSTEENCLEFQESFKHIDSEFEENTNLKNTLKNLNVCESQSLDSGSCSALQNEFVSEKLPKQRLNAEKAKLVKQVQEKEDLLRRLKLVKMYRSKNDLSQLQLLIKKWRSCSQLLLYELQSAVSEENKKLSLTQLIDHYGLDDKLLHYNRSEEEFIDV

SEQ ID NO: 282649 - DNA, 924 bp, Artificial Sequence
  derived and/or modified sequence
atgaagaacctggtggtcccaatgtgggagggtaaatggaagaccgctaaacgggcccgaatgaattataaggtgaaactggaggagattagtggcctcctggtggacgccctgtacaccaacaccatttattacctgattaaagtagattatcgggaagtgtggctgataaggctgttctataatttctcgtttcttgaaaaaaaccaggattttacatttaagatggaaagcccctccgactctgctgtagtcttgccatctacgccacaggcttcagccaatcccagcagtccatatactaattcttcgaggaagcagccaatgtccgcgacacttagagagcgcctgaggaaaacacgcttcagctttaactcttcatacaatgtagtgaagagactgaaggtcgaaagcgaggagaatgatcaaaccttttcagagaagccagccagtagtacagaggaaaattgtttggagtttcaggagtccttcaaacacatcgacagtgagtttgaggagaataccaatctgaagaatacgttaaagaatctgaatgtttgtgagtctcaaagtcttgattcaggatcatgttctgccctgcaaaatgaattcgtctcagaaaagctccctaagcagcgactgaatgctgagaaggcgaaactcgtgaagcaggttcaagagaaggaagatctcttgagacggctaaagctcgtgaaaatgtacagatccaagaatgatctcagccagttgcagttgctcatcaagaagtggcgctcctgctctcagctactcctctacgaactgcagagcgctgtgtctgaggaaaataagaaattgtcccttacccagcttattgatcactacgggcttgacgataagcttctccactacaacaggtccgaggaggagtttatagacgtctag

SEQ ID NO: 282650 - DNA, 924 bp, Artificial Sequence
  derived and/or modified sequence
atgaagaacctggtggtgcccatgtgggagggcaagtggaagacagccaagagggccaggatgaactacaaggtgaagctggaggagatcagcggcctgctggtggatgccctgtacaccaacaccatctactacctgatcaaggtggactaccgggaggtgtggctgatccgcctcttctacaacttctccttcctggagaagaaccaggacttcaccttcaagatggagagccccagcgacagcgctgtggtgctgcccagcaccccccaggccagcgccaaccccagcagcccctacaccaacagcagcaggaagcagcccatgtctgccaccctgcgggagcggctgaggaagacccgcttctccttcaacagcagctacaacgtggtgaagaggctgaaggtggagagcgaggagaatgaccagaccttcagcgagaagccagccagcagcacagaggagaactgcctggagttccaggagagcttcaagcacattgattctgaatttgaggagaacaccaacctgaagaacaccctgaagaacctgaatgtgtgtgagagccagagcctggacagcggcagctgcagcgccctgcagaatgaatttgtgtctgagaagctgcccaagcagaggctgaatgctgagaaggccaagctggtgaagcaggtgcaggagaaggaggacctgctgcggcggctgaagctggtgaagatgtaccgcagcaagaatgacctgagccagctgcagctgctgatcaagaagtggaggagctgcagccagctgctgctgtatgagctgcagagcgctgtgtctgaggagaacaagaagctgagcctgacccagctgattgaccactacggcctggatgacaagctgctgcactacaacagaagtgaggaggagttcattgatgtgtag

SEQ ID NO: 282651 - DNA, 924 bp, Artificial Sequence
  derived and/or modified sequence
atgaagaacctggtggtgcccatgtgggagggcaagtggaagaccgccaagagggcacggatgaattacaaggttaagctcgaggagatttccggactgttagtggatgcactttataccaacactatctattatctgatcaaggttgattatagagaggtttggctgatccgactcttttacaattttagctttcttgaaaagaaccaggatttcacatttaagatggagagcccttctgacagtgccgtcgttctcccatctactccgcaggccagtgccaacccgagctctccatacacaaattcttcccgtaagcagccaatgagtgccaccctgagggagcggctacgcaagacgcggttcagctttaactcttcatataatgtggtcaaacgtcttaaagtcgagtctgaagaaaacgatcaaaccttctctgagaaacctgccagtagtacagaggagaattgcctggaattccaggagtcattcaagcatattgatagtgagtttgaggaaaacactaacctcaaaaacacacttaaaaacttaaacgtgtgcgaatcccagtctttagattcgggaagttgtagcgcccttcagaacgaatttgtgtcagaaaagctgcctaaacagagacttaacgctgagaaggccaaattggtgaagcaggtgcaggagaaggaagatctgcttcgacggctgaaactggttaaaatgtatagatcaaagaacgacctgtcccaactgcagcttctcatcaaaaagtggcgaagctgttcccaactgctgctctacgaattgcagtcagcggtgtctgaagaaaataagaagttgtctttgacccagttaatcgaccactatgggctcgacgataagttactgcattacaacaggagcgaggaggaatttatcgatgtgtag

SEQ ID NO: 282652 - DNA, 1583 bp, Artificial Sequence
  derived and/or modified sequence
agtcggctgtggagtcgagttgagctccctttccgggtctggggaactcaacctcaccttatgcctggggtctccggggaactagtgggctttctgcaacggggggaaggaggggacgactcccgcccctagtttacccctcaaaagttaatgcctttgtcggaggaagcaatttcagtccactctccttttcagtccctgttggccgcttaaactaaaaggctacagacgggcttaaatgcgtctccgctgtgtttcttatgcctcgggccggcagggtaacgggttctagtcacagcttgtagagttcaggatgggtgacattcaggtcctattgtttttgagtcaaggtttcggctatagcttcttgaattatgaagctgtcataataaagaattcctgattatctaaagctgttattcttccctacttccaaggcagaatttgaatatattttggtggatgaaacgaaaacaaggagagtcttgtgactatgagatactagctggttgatgtatcatgaaaaacttagtggtccctatgtgggaaggtaaatggaaaactgcaaaaagagcaagaatgaattacaaagtgaaattagaagaaatatctggcttacttgtggatgctttgtacaccaatacaatatattatttgataaaagtcgactatagagaggtgtggttaattcgattattttataatttttcttttttagagaaaaaccaagatttcactttcaagatggaaagtccgtcagactcagctgtggttttacctagcactcctcaggcctctgcgaatccatcatctccctatacaaatagttcccgaaaacaacctatgagtgcaacacttagagaaagattaaggaaaacaagattttcatttaattcctcttacaatgtggtgaaacgtcttaaagtagagagtgaagaaaatgatcagaccttttcagagaaaccagcatcttccacagaggaaaactgtttggaatttcaagaaagttttaaacatatagacagtgaatttgaagaaaatacaaatttgaaaaatactttgaagaatctcaatgtctgtgaatctcagtcacttgattctggatcatgcagtgctctccaaaatgagtttgtgagtgagaagcttcctaaacaaagattaaacgctgaaaaagccaaattggtgaagcaggttcaggagaaagaagaccttcttcggaggctaaaactagtcaaaatgtatagatcaaagaatgatctgtctcagttacagttgttaataaagaagtggagaagctgtagccagctcttgctttatgagttgcagtcagctgtgtctgaagagaacaagaaactaagccttactcaattgatagaccactatgggttagatgataaattactacactataacagaagtgaagaagaatttatagatgtttaattcctgatttttgctccagaatatctttgagaatgacaacttaattaaaagatacttaggcactttttttttttttttgagactgagtttcgctcttgtcatcctggctggagtgtgatggtgcgatcttgactcactgc

SEQ ID NO: 282653 - DNA, 924 bp, Artificial Sequence
  derived and/or modified sequence
atgaagaatctggtagtccctatgtgggaaggcaaatggaaaactgctaagagggccaggatgaactacaaggtcaaattagaggaaatcagtggactactggtcgacgccctctacacaaacaccatctactacctaatcaaagtggattaccgtgaggtttggctgattaggttattttataacttcagtttcctcgagaagaaccaggactttacgttcaagatggagtcaccttccgatagcgctgtggtcctgccgtccacaccacaggcctccgcgaacccgtcgagcccttacacgaattccagcaggaagcaaccaatgagcgccactctaagggagcgcctgcgtaagactaggtttagcttcaactcttcttataacgtggttaagcgattgaaagtggagagcgaggaaaacgatcagacttttagtgaaaaacccgcttcctcgactgaggagaattgtctggagtttcaggagagttttaaacacattgactccgagtttgaggagaacactaatctgaaaaataccctcaagaatctcaatgtttgcgaatcacaaagccttgactccggcagttgcagcgccttgcagaacgaatttgtgtccgagaaactgccaaagcagcggttgaacgccgagaaagctaagttggtgaaacaggtgcaggagaaagaagacctgctgaggagactgaaactcgtgaaaatgtaccgctctaagaatgacttgtcccagcttcagctcttgatcaaaaaatggcggtcctgctcccagcttctgttgtacgagctccagagcgccgtgtctgaggaaaataagaagctgagcctcacccagttaattgaccactacggactggatgacaaactcctgcattataatagatccgaagaagaatttattgacgtttag

SEQ ID NO: 282654 - DNA, 924 bp, Artificial Sequence
  derived and/or modified sequence
atgaagaacctggtggtgcccatgtgggagggcaagtggaagaccgccaagagagccagaatgaactacaaggtgaagctggaggagatcagcggcctgctggtggacgccctgtacaccaacaccatctactacctgatcaaggtggactacagagaggtgtggctgatcagactgttctacaacttcagcttcctggagaagaaccaggacttcaccttcaagatggagagccccagcgacagcgccgtggtgctgcccagcaccccccaggccagcgccaaccccagcagcccctacaccaacagcagcagaaagcagcccatgagcgccaccctgagagagagactgagaaagaccagattcagcttcaacagcagctacaacgtggtgaagagactgaaggtggagagcgaggagaacgaccagaccttcagcgagaagcccgccagcagcaccgaggagaactgcctggagttccaggagagcttcaagcacatcgacagcgagttcgaggagaacaccaacctgaagaacaccctgaagaacctgaacgtgtgcgagagccagagcctggacagcggcagctgcagcgccctgcagaacgagttcgtgagcgagaagctgcccaagcagagactgaacgccgagaaggccaagctggtgaagcaggtgcaggagaaggaggacctgctgagaagactgaagctggtgaagatgtacagaagcaagaacgacctgagccagctgcagctgctgatcaagaagtggagaagctgcagccagctgctgctgtacgagctgcagagcgccgtgagcgaggagaacaagaagctgagcctgacccagctgatcgaccactacggcctggacgacaagctgctgcactacaacagaagcgaggaggagttcatcgacgtgtag

SEQ ID NO: 282655 - protein, 328 aa, Artificial Sequence
  derived and/or modified sequence
MSLEQEEETQPGRLLGRRDAVPAFIEPNVRFWITERQSFIRRFLQWTELLDPTNVFISVESIENSRQLLCTNEDVSSPASADQRATVHPDSSNLIPKLFRPAAFLPFMAPTVFLSMTPLKGIKSVILPQVFLCAYMAAFNSINGNRSYTCKPLERSLLMAGAVASSTFLGVIPQFVQMKYGLTGPWIKRLLPVIFLVQASGMNVYMSRSLESIKGIAVMDKEGNVLGHSRIAGTKAVRETLASRIVLFGTSALIPEVFTYFFKRTQYFRKNPGSLWILKLSCTVLAMGLMVPFSFSIFPQIGQIQYCSLEEKIQSPTEETEIFYHRGV

SEQ ID NO: 282656 - protein, 220 aa, Artificial Sequence
  derived and/or modified sequence
SPLVFLSMTPLKGIKSVILPQVFLCAYMAAFNSINGNRSYTCKPLERSLLMAGAVASSTFLGVIPQFVQMKYGLTGPWIKRLLPVIFLVQASGMNVYMSRSLESIKGIAVMDKEGNVLGHSRIAGTKAVRETLASRIVLFGTSALIPEVFTYFFKRTQYFRKNPGSLWILKLSCTVLAMGLMVPFSFSIFPQIGQIQYCSLEEKIQSPTEETEIFYHRGV

SEQ ID NO: 282657 - DNA, 987 bp, Artificial Sequence
  derived and/or modified sequence
atgagcctggagcaggaggaggagacccagcccggcagactgctgggcagaagagacgccgtgcccgccttcatcgagcccaacgtgagattctggatcaccgagagacagagcttcatcagaagattcctgcagtggaccgagctgctggaccccaccaacgtgttcatcagcgtggagagcatcgagaacagcagacagctgctgtgcaccaacgaggacgtgagcagccccgccagcgccgaccagagagccaccgtgcaccccgacagcagcaacctgatccccaagctgttcagacccgccgccttcctgcccttcatggcccccaccgtgttcctgagcatgacccccctgaagggcatcaagagcgtgatcctgccccaggtgttcctgtgcgcctacatggccgccttcaacagcatcaacggcaacagaagctacacctgcaagcccctggagagaagcctgctgatggccggcgccgtggccagcagcaccttcctgggcgtgatcccccagttcgtgcagatgaagtacggcctgaccggcccctggatcaagagactgctgcccgtgatcttcctggtgcaggccagcggcatgaacgtgtacatgagcagaagcctggagagcatcaagggcatcgccgtgatggacaaggagggcaacgtgctgggccacagcagaatcgccggcaccaaggccgtgagagagaccctggccagcagaatcgtgctgttcggcaccagcgccctgatccccgaggtgttcacctacttcttcaagagaacccagtacttcagaaagaaccccggcagcctgtggatcctgaagctgagctgcaccgtgctggccatgggcctgatggtgcccttcagcttcagcatcttcccccagatcggccagatccagtactgcagcctggaggagaagatccagagccccaccgaggagaccgagatcttctaccacagaggcgtgtag

SEQ ID NO: 282658 - DNA, 987 bp, Artificial Sequence
  derived and/or modified sequence
atgtcactcgagcaggaggaggaaacacagccaggccgcctgctaggacgacgcgacgctgtcccggcctttattgagcctaatgtgcgcttttggattaccgaacgacaatctttcatcaggaggttcctgcagtggactgaactgctggaccctaccaatgtgttcatctctgtggagtcaattgaaaacagtcgacagttactttgtacaaacgaggatgtttctagtcccgcttctgccgaccagcgcgccaccgtgcaccccgactcatcaaacctcatcccgaaactctttaggccggccgctttccttccttttatggcgccaacagtcttcttatctatgactcctctgaaaggaattaagagtgtgatcttgccacaggtctttctgtgcgcctacatggcggcattcaattctataaatgggaaccgaagctacacctgcaaaccgctggaaagatctctgctgatggccggtgcggtggcctcttcgacttttctcggtgttatcccccagttcgtgcagatgaaatacggattaacagggccttggatcaaaagattactgcctgttatctttctcgtgcaggcttccggaatgaacgtttacatgagccgaagtcttgaatcgatcaaagggatcgccgtgatggataaggagggcaatgtcttaggccactcccgcatcgctggcaccaaggctgtacgagagacactggcttcccggattgtgctttttgggacctccgctttaatccctgaggtttttacatactttttcaagaggacgcagtattttagaaagaatcctggcagtttgtggatactgaaacttagctgcacagtcttggctatggggcttatggttccattttccttctcgatttttccacagatcggccagatccagtattgtagtcttgaggaaaaaattcagagcccaaccgaggagacagaaattttttaccataggggcgtctag

SEQ ID NO: 282659 - DNA, 987 bp, Artificial Sequence
  derived and/or modified sequence
atgagcctggagcaggaggaggagacccagcccggccgcctgctgggcagaagagatgctgtgcctgccttcatcgagcccaacgtgcgcttctggatcacagagcggcagagcttcatccgccgcttcctgcagtggacagagctgctggaccccaccaacgtgttcatctctgtggagagcattgagaacagccggcagctgctgtgcaccaatgaagatgtgagcagccctgccagcgctgaccagagggccaccgtgcacccagacagcagcaacctgatccccaagctgttccggcctgctgccttcctgcccttcatggcccccaccgtcttcctgtccatgacccccctgaagggcatcaagagcgtcatcctgccccaggtgttcctgtgtgcctacatggccgccttcaacagcatcaatggaaacagaagctacacctgcaagcccctggagaggagcctgctgatggccggggctgtggccagcagcaccttcctgggcgtcatcccccagtttgtgcagatgaagtatggcctgaccggcccctggatcaagaggctgctgcccgtcatcttcctggtgcaggccagcggcatgaatgtgtacatgagccgcagcctggagagcatcaagggcattgctgtgatggacaaggagggcaatgtgctgggccacagcagaattgctggcaccaaggctgtgcgggagaccctggccagcagaattgtgctgtttggcaccagcgccctgatccctgaggtgttcacctacttcttcaagaggacccagtacttcaggaagaaccctggcagcctgtggatcctgaagctgagctgcaccgtgctggccatgggcctgatggtgcccttctccttcagcatcttcccccagatcggccagatccagtactgcagcctggaggagaagatccagagccccacagaggagacagagatcttctaccacagaggagtgtag

SEQ ID NO: 282660 - DNA, 987 bp, Artificial Sequence
  derived and/or modified sequence
atgagcctggagcaggaggaggagacccagcccggccggctgctggggcgtcgcgatgcggtccccgcgtttatagaacctaatgtgagattttggatcaccgagcgacaatctttcatccggaggttccttcagtggacagagctcttagacccaaccaacgttttcatttctgtggaatcgatcgagaacagtcggcagctgttatgtactaacgaagacgtctcatccccagccagcgccgatcagcgggccactgtgcaccccgactcttcaaatctcattcccaagctttttaggcccgccgcatttcttcccttcatggctcccacagtattcctgtctatgaccccgctaaaagggattaaaagcgtgatccttccacaggtgtttctctgcgcctatatggctgcttttaacagtatcaacggaaaccggtcatatacatgcaagccactggagaggtccctgctaatggcaggcgctgtggcgtcatccaccttcctcggcgttatcccacaattcgtgcaaatgaaatatggactgaccggtccctggataaagagactcttgcccgtgatcttcttggtccaggcttcagggatgaacgtgtacatgagcaggtctctggagtccattaagggcattgccgtcatggataaagaagggaatgtacttgggcactctaggatcgcaggtacaaaagctgtgagggaaacgttggctagtcggatcgtcctgtttggcaccagtgctctcatccctgaagtctttacttatttctttaagaggactcagtattttagaaagaacccaggctctttgtggatcctgaaactctcctgtactgttctggccatggggctcatggtccccttttcttttagcattttcccgcaaatcgggcagattcagtactgctcacttgaagagaagatccagtctcctactgaggagaccgagatcttttaccataggggcgtttag

SEQ ID NO: 282661 - DNA, 987 bp, Artificial Sequence
  derived and/or modified sequence
atgtccctcgagcaggaagaggaaactcaaccaggacgcttgctgggtcgcagagacgccgtaccggcttttatcgaacccaatgtacgcttttggataacagaacggcaaagttttattaggcgctttttgcaatggactgaacttttggaccctactaacgtctttattagtgtcgagagcattgaaaactctcgtcagctgctctgcaccaacgaggacgtgtccagtcctgcctctgccgatcagagagctactgtccatcccgatagttccaatctgatccccaagctatttcggccagccgcatttctcccgtttatggccccaaccgtgttcctgagcatgacccctctgaaagggattaaatccgtgatcctgccacaagttttcctctgcgcatacatggcagcattcaatagtatcaatggcaatcgcagttacacatgtaagcccttggaacggagcctgctgatggctggggcagtggctagcagcaccttcctaggcgttataccgcaatttgtccaaatgaagtacggtctgaccggcccttggattaagcgactgctgcccgttatattcctcgttcaagcgtcgggaatgaatgtgtatatgtcccgcagcttagaatctattaagggaatcgctgtgatggacaaggagggaaacgtcctggggcacagccggatcgcagggacaaaggcagtgcgtgagaccttggctagccgtattgtgttgtttggcacatctgccctcatcccagaagttttcacctactttttcaagcgcacacagtatttcaggaagaaccctggctccctgtggattcttaagttaagttgcacagtgctcgcgatgggtttaatggtgcctttttcattcagcatttttccacagataggacaaatacaatactgtagtctggaggaaaaaatccaatcaccaacagaggagaccgagattttttaccatcggggagtgtag

SEQ ID NO: 282662 - DNA, 1315 bp, Artificial Sequence
  derived and/or modified sequence
ctctaaccagcgcaaaatgtccctggaacaggaggaggaaacgcaacctgggcggctcctaggacgcagagacgccgtccccgccttcattgagcccaacgtgcgcttctggatcaccgagcgccaatcctttattcgacgatttcttcaatggacagaattattagatcctacaaatgtgttcatttcagttgaaagtatagaaaactcgaggcaactattgtgcacaaatgaagatgtttccagccctgcctcggcggaccaaagggcaacagtgcatcccgacagcagcaacctgatccccaagctttttcgacctgcagcgttcctgcctttcatggcacccacggtatttttgtcaatgacgccactgaaagggatcaagtccgtgattttacctcaggttttcctctgtgcctacatggcagcgttcaacagcatcaatggaaacagaagttacacttgtaagccactagaaagatcattactaatggcgggagccgttgcttcttcaactttcttaggagtaatccctcagtttgtccagatgaagtatggcctgactggcccttggattaaaagactcttacctgtgatcttcctcgtgcaagccagtggaatgaatgtctacatgtcccgaagtcttgaatccattaaggggattgcggtcatggacaaggaaggcaatgtcctgggtcattccagaattgctgggacaaaggctgttagagaaacgctagcatccagaatagtgctgtttgggacctcagctctgattcctgaagtcttcacctacttttttaaaaggacccagtatttcaggaaaaacccagggtcattgtggattttgaaactgtcttgtactgtcctggcaatgggactgatggtgccattttcttttagtatatttccacagattggacagatacagtactgtagtcttgaagagaaaattcagtctccaacagaagaaacagaaatcttttatcacagaggggtgtaggcgtgagttttaggtgaatttatgtggttcctgcttgaaaaccttcccctctccaggttcggtttagagaactttgccacaggtcttctggggaccccagaggtgtctgtgctgacaaggcgacttcagattccatactgagatcgttcccaggctggcgtctctggggtttttaaggctggctggagaagacagtgggagggtgccccgtctgacacccctggggttgctgagggaacggttggagtggggatcggcctgcgaaaggatactgtgaaatcactaattaactaataaacctgtctcaagttg

SEQ ID NO: 282663 - DNA, 739 bp, Artificial Sequence
  derived and/or modified sequence
cgccaagtacggcccgggcccggcgcgactaggggcagggagggggcgggccgggccgcgtggagtcgggctgacccgggtgaccttggccaggccacgtgggcgccccctgtctccgtttcctcctctcggagttgtgccgggaacgcgcaccaccggccttcaccccttagggcgcggcaggggacgcaggggaaatcgaagctgccagatgcccacgaccacaacgtcaccctccagattgccctctcggaggggcccagtccgcgcaggtggctgctccctactgcctgagctgtggctgagcagcagattggggagaaacaggctctcgcaccttgtcctttattcgacgatttcttcaatggacagaattattagatcctacaaatgtgttcatttcagttgaaagtatagaaaactcgaggcaactattgtgcacaaatgaagatgtttccagccctgcctcggcggaccaaagggcaacagtgcatcccgacagcagcaacctgatccccaagctttttcgacctgcagcgttcctgcctttcatggcacccacggtatttttgtcaatgacgccactgaaagggatcaagtccgtgattttacctcaggttttcctctgtgcctacatggcagcgttcaacagcatcaatggaaacagaagttacacttgtaagccactagaaagatcattactaatggcgggagccgttgcttcttcaactttcttagg

SEQ ID NO: 282664 - DNA, 537 bp, Artificial Sequence
  derived and/or modified sequence
atggcccccaccgtgttcctgagcatgacccccctgaagggcatcaagagcgtgatcctgccccaggtgttcctgtgcgcctacatggccgccttcaacagcatcaacggcaacagaagctacacctgcaagcccctggagagaagcctgctgatggccggcgccgtggccagcagcaccttcctgggcgtgatcccccagttcgtgcagatgaagtacggcctgaccggcccctggatcaagagactgctgcccgtgatcttcctggtgcaggccagcggcatgaacgtgtacatgagcagaagcctggagagcatcaagggcatcgccgtgatggacaaggagggcaacgtgctgggccacagcagaatcgccggcaccaaggccgtgagagagaccctggccagcagaatcgtgctgttcggcaccagcgccctgatccccgaggtgttcacctacttcttcaagagaacccagtacttcagaaagaaccccggcagcctgtggatcctgaagctgagctgcaccgtgctgtag

SEQ ID NO: 282665 - DNA, 663 bp, Artificial Sequence
  derived and/or modified sequence
agccccctggtgttcctgagcatgacccccctgaagggcatcaagagcgtgatcctgccccaggtgttcctgtgcgcctacatggccgccttcaacagcatcaacggcaacagaagctacacctgcaagcccctggagagaagcctgctgatggccggcgccgtggccagcagcaccttcctgggcgtgatcccccagttcgtgcagatgaagtacggcctgaccggcccctggatcaagagactgctgcccgtgatcttcctggtgcaggccagcggcatgaacgtgtacatgagcagaagcctggagagcatcaagggcatcgccgtgatggacaaggagggcaacgtgctgggccacagcagaatcgccggcaccaaggccgtgagagagaccctggccagcagaatcgtgctgttcggcaccagcgccctgatccccgaggtgttcacctacttcttcaagagaacccagtacttcagaaagaaccccggcagcctgtggatcctgaagctgagctgcaccgtgctggccatgggcctgatggtgcccttcagcttcagcatcttcccccagatcggccagatccagtactgcagcctggaggagaagatccagagccccaccgaggagaccgagatcttctaccacagaggcgtgtag

SEQ ID NO: 282666 - DNA, 192 bp, Artificial Sequence
  derived and/or modified sequence
atggcccccaccgtgttcctgagcatgacccccctgaagggcatcaagagcgtgatcctgccccaggtgttcctgtgcgcctacatggccgccttcaacagcatcaacggcaacagaagctacacctgcaagcccctggagagaagcctgctgatggccggcgccgtggccagcagcaccttcctgggctag

SEQ ID NO: 282667 - DNA, 537 bp, Artificial Sequence
  derived and/or modified sequence
atggcacccacggttttcctctcaatgaccccacttaagggaattaagtccgtcatcctgccccaagtttttttatgtgcctacatggctgccttcaactccatcaacggcaaccgttcttatacttgcaaaccgctggagcgttctcttctgatggccggggcagtggcttcctctacctttctcggggtgatcccacagtttgtgcagatgaagtatggactcaccggaccatggatcaagcgacttctacctgtgatcttcctcgttcaggcttcaggtatgaatgtctatatgtctcgctctctggaatccattaagggcattgcggtaatggataaagagggcaatgtgctgggtcactccaggatagcaggtacaaaggccgtaagagaaacactggcatctcgcatcgttttgttcggaaccagcgccctcatccctgaggtgttcacatactttttcaagagaacccagtacttcagaaagaaccctggaagtctgtggatactaaagttgagctgcaccgtgttatag

SEQ ID NO: 282668 - DNA, 663 bp, Artificial Sequence
  derived and/or modified sequence
tcgccactcgtctttcttagtatgacaccccttaagggcatcaagtccgtaatcctgccacaggtgtttctgtgtgcatatatggcagctttcaactctatcaatgggaaccggagctacacttgtaaacctcttgagaggagtttgctcatggcaggcgcagttgcaagttcaacctttctgggggtaatacctcaattcgtacaaatgaagtacggcctgactggcccctggatcaagcgcctgctgccagtgatatttctggttcaggcaagcggtatgaacgtgtacatgtctaggtcactcgaaagtatcaaagggatcgctgtcatggataaggagggcaacgtcctggggcactcaagaatcgccggtacgaaagctgtacgggaaaccctggcttcgagaattgtactctttggcacaagtgccctcatccccgaagtgtttacttacttttttaagaggactcagtattttcggaagaatcctggtagcctgtggatactcaagctcagttgtaccgttttagcaatgggcctgatggttccctttagtttctctatttttccacagattggccaaattcagtactgtagtctggaagagaaaatacagtcgcccaccgaagagaccgaaatcttctatcaccgtggagtctag

SEQ ID NO: 282669 - DNA, 192 bp, Artificial Sequence
  derived and/or modified sequence
atggctccaactgtttttttatcaatgacacctctgaagggaatcaagtccgtgatccttccccaagtgtttttgtgcgcttatatggccgctttcaactcaattaatgggaacagatcctacacttgcaagccgctggaaagatctcttctcatggcaggggctgtggcaagcagtacatttcttggatag

SEQ ID NO: 282670 - DNA, 537 bp, Artificial Sequence
  derived and/or modified sequence
atggcccccaccgtcttcctgtccatgacccccctgaagggcatcaagagcgtcatcctgccccaggtgttcctgtgtgcctacatggccgccttcaacagcatcaatggaaacagaagctacacctgcaagcccctggagaggagcctgctgatggccggggctgtggccagcagcaccttcctgggcgtcatcccccagtttgtgcagatgaagtatggcctgaccggcccctggatcaagaggctgctgcctgtgatcttcctggtgcaggccagcggcatgaatgtgtacatgagccgcagcctggagagcatcaagggcattgctgtgatggacaaggagggcaatgtgctgggccacagcagaattgctggcaccaaggctgtgcgggagaccctggccagccgcatcgtgctgtttggcaccagcgccctgatccctgaggtgttcacctacttcttcaagaggacccagtacttcaggaagaaccctggcagcctgtggatcctgaagctgagctgcaccgtgctgtag

SEQ ID NO: 282671 - DNA, 663 bp, Artificial Sequence
  derived and/or modified sequence
agccccctggtgttcctgtccatgacccccctgaagggcatcaagagcgtcatcctgccccaggtgttcctgtgtgcctacatggccgccttcaacagcatcaatggaaacagaagctacacctgcaagcccctggagaggagcctgctgatggccggggctgtggccagcagcaccttcctgggcgtcatcccccagtttgtgcagatgaagtatggcctgaccggcccctggatcaagaggctgctgcccgtcatcttcctggtgcaggccagcggcatgaatgtgtacatgagccgcagcctggagagcatcaagggcattgctgtgatggacaaggagggcaatgtgctgggccacagcagaattgctggcaccaaggctgtgcgggagaccctggccagcagaattgtgctgtttggcaccagcgccctgatccctgaggtgttcacctacttcttcaagaggacccagtacttcaggaagaaccctggcagcctgtggatcctgaagctgagctgcaccgtgctggccatgggcctgatggtgcccttctccttcagcatcttcccccagatcggccagatccagtactgcagcctggaggagaagatccagagccccacagaggagacagagatcttctaccacagaggagtgtag

SEQ ID NO: 282672 - DNA, 192 bp, Artificial Sequence
  derived and/or modified sequence
atggcccccaccgtcttcctgtccatgacccccctgaagggcatcaagagcgtcatcctgccccaggtgttcctgtgtgcctacatggccgccttcaacagcatcaatggaaacagaagctacacctgcaagcccctggagaggagcctgctgatggccggggctgtggccagcagcaccttcctgggctag

SEQ ID NO: 282673 - DNA, 537 bp, Artificial Sequence
  derived and/or modified sequence
atggcccccaccgtgttcctgagcatgacccccctgaagggcatcaaaagcgtgatcctgcctcaggtgttcctgtgcgcttatatggctgccttcaacagtatcaatgggaaccggtcctatacttgtaaaccgcttgaacggtcattgctgatggcgggcgcggtggcatcctccacctttctaggggtgatcccccagttcgttcagatgaaatacggtctaactggcccctggatcaagcggctccttcctgttatttttctggtccaagcttctggtatgaacgtttacatgtcgcgcagcttagagtccattaaggggatcgccgtgatggataaagaagggaacgtccttggccactcgcgcattgccggcactaaggctgttcgtgagaccctggcttcccgaattgttctgtttggaactagtgccctgatcccagaggtctttacttatttctttaagagaactcagtattttagaaaaaaccccggcagtctgtggattcttaagttatcatgcacagtactgtag

SEQ ID NO: 282674 - DNA, 663 bp, Artificial Sequence
  derived and/or modified sequence
agccccctggtgttcctgagcatgacccccctgaagggcatcaagagcgtgatactgccacaagtgttcctgtgtgcttacatggcagcgtttaactctattaatggcaacaggtcatatacctgcaagccgctggagaggtctctgctgatggcaggcgctgtcgcctcctctaccttcttaggggtgataccgcagttcgtacagatgaagtatgggctcaccgggccatggatcaagagactgctgcctgtcatttttttagtgcaggccagcggtatgaacgtgtacatgtccaggtcactggaatcaatcaaaggtatagcggtgatggacaaagagggaaacgtcctgggacattcccgcatagccggcactaaggctgtgagggaaactcttgccagcaggatcgtgcttttcgggacttccgctctgattcccgaagtcttcacctacttttttaaaaggactcagtattttcgcaagaatcctgggtccctgtggatcctcaagctgtcttgtacagttctcgcgatgggcctgatggttcctttttccttcagcatttttcctcaaatcgggcagattcagtactgctcactggaggaaaagatacagtcccctaccgaagagacggaaatcttctatcaccgaggagtgtag

SEQ ID NO: 282675 - DNA, 192 bp, Artificial Sequence
  derived and/or modified sequence
atggcccccaccgtgttcctgagcatgacccccctgaagggcatcaaaagcgtgatccttccccaagtctttctttgtgcttatatggccgccttcaacagtatcaacggcaacagaagctacacctgcaagcccctcgagaggtctctgttaatggccggggctgtagcgtcttccacattccttggctag

SEQ ID NO: 282676 - DNA, 537 bp, Artificial Sequence
  derived and/or modified sequence
atggctcctaccgtgtttctgagcatgacccctctcaaaggaatcaagagtgtgatcttgccccaggtgttcctgtgcgcttatatggcagccttcaactccattaacggaaataggagctatacctgtaagccgctggagagaagtctcctcatggcaggagccgtggcttccagcacgtttctgggagtgattccacagttcgtgcagatgaagtacgggctgacaggaccctggatcaagagacttcttcctgtgatatttctcgttcaagcaagcggaatgaatgtctacatgtccaggagcctggaatccatcaaaggtattgcagtgatggacaaagagggtaatgtcctgggccattcccgaattgcaggtaccaaagccgtccgggaaacattggctagtcggattgtcttatttggcacttccgcgctgatccccgaggtgttcacctattttttcaaacgaactcagtacttcaggaaaaatccagggtccctttggatcctgaagctgtcatgtacagtgctttag

SEQ ID NO: 282677 - DNA, 663 bp, Artificial Sequence
  derived and/or modified sequence
tcacctctggtatttctttcaatgacacccttgaagggcattaagagcgtcattctcccccaggttttcctttgcgcttacatggccgcttttaattccattaatggcaatagatcatacacctgcaagccccttgaaaggagtctgctaatggcgggtgccgtcgcctcgagcaccttcctcggagttatccctcaattcgtgcagatgaaatatgggctaaccggcccatggattaagcgcctcttacctgtgatttttcttgtacaggccagcggaatgaatgtgtatatgtctcggagcctcgagtccatcaaaggcattgctgtcatggacaaagaaggcaacgtgctggggcacagccgtattgcgggaaccaaagcagtgcgggagacacttgcctcccgcatagtcctcttcggcacttcagcactcatccccgaggtatttacatactttttcaaaagaacacagtacttccggaaaaatccaggctccctgtggattctcaagctgagctgcactgtgctcgcaatgggacttatggtgccgtttagcttttctatctttccacagattggccagatccagtactgttcgcttgaggaaaagatacagtcgcctaccgaagagactgagattttctaccatagaggagtgtag

SEQ ID NO: 282678 - DNA, 192 bp, Artificial Sequence
  derived and/or modified sequence
atggcgcctactgtattcctgagtatgactcccctgaagggtatcaaaagcgtgatactcccccaagtgtttctgtgtgcatatatggcagccttcaatagtatcaacgggaaccgaagttatacttgtaaacctttagagcgcagtttgctgatggcgggagctgttgcctccagtaccttcctgggctag

SEQ ID NO: 282679 - DNA, 975 bp, Artificial Sequence
  derived and/or modified sequence
tctcccctggtatttttgtcaatgacgccactgaaagggatcaagtccgtgattttacctcaggttttcctctgtgcctacatggcagcgttcaacagcatcaatggaaacagaagttacacttgtaagccactagaaagatcattactaatggcgggagccgttgcttcttcaactttcttaggagtaatccctcagtttgtccagatgaagtatggcctgactggcccttggattaaaagactcttacctgtgatcttcctcgtgcaagccagtggaatgaatgtctacatgtcccgaagtcttgaatccattaaggggattgcggtcatggacaaggaaggcaatgtcctgggtcattccagaattgctgggacaaaggctgttagagaaacgctagcatccagaatagtgctgtttgggacctcagctctgattcctgaagtcttcacctacttttttaaaaggacccagtatttcaggaaaaacccagggtcattgtggattttgaaactgtcttgtactgtcctggcaatgggactgatggtgccattttcttttagtatatttccacagattggacagatacagtactgtagtcttgaagagaaaattcagtctccaacagaagaaacagaaatcttttatcacagaggggtgtaggcgtgagttttaggtgaatttatgtggttcctgcttgaaaaccttcccctctccaggttcggtttagagaactttgccacaggtcttctggggaccccagaggtgtctgtgctgacaaggcgacttcagattccatactgagatcgttcccaggctggcgtctctggggtttttaaggctggctggagaagacagtgggagggtgccccgtctgacacccctggggttgctgagggaacggttggagtggggatcggcctgcgaaaggatactgtgaaatcactaattaactaataaacctgtctcaagttg

SEQ ID NO: 282680 - protein, 203 aa, Artificial Sequence
  derived and/or modified sequence
MSSDFEGYEQDFAVLTAEITSKIARVPRLPPDEKKQMVANVEKQLEEAKELLEQMDLEVREIPPQSRGMYSNRMRSYKQEMGKLETDFKRSRIAYSDEVRNELLGDDGNSSENQRAHLLDNTERLERSSRRLEAGYQIAVETEQIGQEMLENLSHDREKIQRARERLRETDANLGKSSRILTGMLRRGCSVKKQCNLSLAPKA

SEQ ID NO: 282681 - DNA, 612 bp, Artificial Sequence
  derived and/or modified sequence
atgagcagcgacttcgagggctacgagcaggacttcgccgtgctgaccgccgagatcaccagcaagatcgccagagtgcccagactgccccccgacgagaagaagcagatggtggccaacgtggagaagcagctggaggaggccaaggagctgctggagcagatggacctggaggtgagagagatccccccccagagcagaggcatgtacagcaacagaatgagaagctacaagcaggagatgggcaagctggagaccgacttcaagagaagcagaatcgcctacagcgacgaggtgagaaacgagctgctgggcgacgacggcaacagcagcgagaaccagagagcccacctgctggacaacaccgagagactggagagaagcagcagaagactggaggccggctaccagatcgccgtggagaccgagcagatcggccaggagatgctggagaacctgagccacgacagagagaagatccagagagccagagagagactgagagagaccgacgccaacctgggcaagagcagcagaatcctgaccggcatgctgagaagaggctgcagcgtgaagaagcagtgcaacctgagcctggcccccaaggcctag

SEQ ID NO: 282682 - DNA, 612 bp, Artificial Sequence
  derived and/or modified sequence
atgagcagcgactttgagggttacgaacaggacttcgctgtgttgaccgccgagatcacctccaagattgccagagtgcctaggctgcctcccgatgaaaagaagcagatggtggctaacgttgaaaagcagctggaggaggctaaggaactgttggaacaaatggatctcgaagtccgcgagataccgccgcagagtcgcggaatgtattccaacaggatgaggtcttataagcaggaaatggggaagttagagacggacttcaagagatctagaattgcttattctgacgaagtccgtaatgaactgctgggcgacgacggtaacagctcagaaaatcagagggcccatttactggacaatactgagagactcgagcgctcatccagacggctcgaagcaggttatcagattgctgtggaaactgagcagataggccaggagatgctggagaatctgagccatgaccgcgaaaagatacaaagagcacgcgagcgcttgagagagactgacgcaaatctgggtaagagctcacggattcttacgggcatgttgagacgggggtgctccgtgaagaaacagtgcaatttgtccttggcacccaaagcttag

SEQ ID NO: 282683 - DNA, 612 bp, Artificial Sequence
  derived and/or modified sequence
atgagcagtgactttgagggctatgagcaggactttgctgtgctgacagctgagatcaccagcaagatcgcccgggtgccccggctgcccccagatgagaagaagcagatggtggccaacgtggagaagcagctggaggaggccaaggagctgctggagcagatggacctggaggtgcgggagatccccccccagagccggggcatgtacagcaacaggatgaggagctacaagcaggagatgggcaagctggagacagacttcaagaggagcagaattgcctacagtgatgaggtgagaaatgagctgctgggagatgatggcaacagcagcgagaaccagagggcccacctgctggacaacacagagcggctggagaggagcagccggcggctggaggccggctaccagattgctgtggagacagagcagatcggccaggagatgctggagaacctgagccatgaccgggagaagatccagagggcccgggagcggctgcgggagacagatgccaacctgggcaagagcagccgcatcctgaccggcatgctgcggcggggctgcagcgtgaagaagcagtgcaacctgagcctggcccccaaggcctag

SEQ ID NO: 282684 - DNA, 612 bp, Artificial Sequence
  derived and/or modified sequence
atgagcagcgacttcgagggctacgagcaggacttcgccgtgctgaccgccgaaattacaagtaagatcgcccgtgtgcctcgcctgccccctgatgaaaagaaacagatggtggcaaatgtggaaaagcagctcgaggaagcgaaagagctgttggaacaaatggacttggaagtgagggagattcccccgcagtctagaggtatgtacagtaatagaatgaggtcttacaagcaggaaatgggaaagttagagactgattttaagaggtctcgaatcgcctattctgatgaggtgcgtaatgagctcctgggcgacgacggcaattccagtgagaatcagcgtgcacatttacttgataacaccgagcgactggaaaggagctccaggcgattggaggctggttaccagatagccgttgaaaccgaacaaatcggtcaggaaatgctcgagaacctcagccacgatagggagaaaattcagcgggcccgggaaagacttagagagacggacgccaatcttgggaagtcctctagaattttgaccggcatgctgcggaggggttgttcagtcaaaaagcaatgtaacctctccctggctcccaaagcttag

SEQ ID NO: 282685 - DNA, 612 bp, Artificial Sequence
  derived and/or modified sequence
atgagctccgacttcgagggatatgagcaggatttcgcagtcctgaccgccgaaatcacttcgaagattgctcgtgttcctcgcctccccccagacgagaaaaagcagatggtcgccaacgtggagaagcagcttgaggaagcaaaggagctcctcgaacaaatggacctggaggtgcgcgagattcccccacagagcaggggtatgtactcaaatcgcatgcgtagttataaacaggagatgggtaaacttgagactgactttaaaagatcgcgtatagcctattccgacgaggtgcgtaacgaactcctcggcgacgatggaaacagttccgagaatcagcgcgctcacctcttggacaataccgaaagactagagcgatcctccagacgcctggaggctggctatcagattgctgtggagactgaacagatcggtcaggagatgctcgagaacttatcacatgatcgagaaaagatccagcgagccagagagaggttgagggagactgatgctaatctcggcaagagctcccgtatcctcaccggaatgctgaggcggggttgctctgttaagaagcagtgtaaccttagcctggcccctaaggcttag

SEQ ID NO: 282686 - DNA, 1738 bp, Artificial Sequence
  derived and/or modified sequence
ccgttctgctctcgggggcaccttccggggttcctaagccgcggggcccctcgctgcccctcgaggccctttccctgacctaggctttggcctgggctactcgttccggagccgccatgtcgtccgacttcgaaggttacgagcaggacttcgcggtgctcactgcagagatcaccagcaagattgcgagggtcccacgactcccgcctgatgaaaagaaacagatggttgcaaatgtggagaaacagcttgaagaagcgaaagaactgcttgaacagatggatttggaagtccgagagataccaccccaaagtcgagggatgtacagcaacagaatgagaagctacaaacaagaaatgggaaaactcgaaacagattttaaaaggtcacggatcgcctacagtgacgaagtacggaatgagctcctgggggatgatgggaattcctcagagaaccagagggcacatctgctcgataacacagagaggctggaaaggtcatctcggagactagaggctggataccaaatagcagtggaaaccgagcaaattggtcaggagatgttggaaaaccttagtcatgacagagaaaagatacagcgagcacgtgaaagacttcgggaaacagatgctaatttgggaaaaagctccaggattctgacagggatgttgcgaaggggttgttctgtgaaaaaacaatgtaacctgtctctggccccaaaggcttgaaccagaaccagccagtggaaattactcaaacacgtattgtgccttcaatgagaagccttctcactgaaagagctgccctggacggaaaatgagtagtgagatgatgctggtggaagtatttatagatgcgcagtgcatgagtacttggcaaggatgctatcaaaggggaaactgacatcaaatgtgctgtggttctgggtgatttatctggtcccttcccatcccagagctttatgattctgtaataatcaagggagaaacccattacatagtggacaattttttttctttttttttctttttctttttttttttgagacagagtcttgccctgtcgcctggctggagtggagtggcacaatcttggctcactgcaacctccacctcccaggtccaagcgattctcttgcctcagcctcccaagtagctgggactacaggcacacaccaccacgcccagctaatttttgtatttctttttttttttttttgtagagatggagtttcaccatgttggccaggatggtctcgatctcttaaccttgtgagccaccgtgcccaaccctaacaattatttttaaaaggaggaatttaaatgagctgtggattattcattttgtcccataagaagataattaaaaaatgacaaaaatgaactgaacaaaaaagttctaacaaaataataaggctgaatttttaaagtctcttccgcatcttctgttccctgggatgccttagacggggtgtgcagtattttaggtacatcgtgagcaaggagcctgcattcccagggggcggcagggacagcatgtaaggtcttagtccagctctgtgatctgaaggcaaagcctctatgtgtgaaacacaggggtacctcaaaaatagaacaagagcactccatccatgtgcggatgactgtcaaggtcactgagacctacagtgatctggaaaattaaagctctctggccgcctttcctctcaggacatacttctggagatcaaaaaaaaaaa

SEQ ID NO: 282687 - protein, 208 aa, Artificial Sequence
  derived and/or modified sequence
MDFSIIQYSKFMTLLAMSLQNLKTLHMSLEESIKWLGEVMAEIGPTHSQKSEDWNIFDVKQANAIIDYLKISLFQHYKLYEFMFYSAREEIVIGTEQVIEVVKSACGPFPNPLEEGISFDIYSTFIEPPTILDTEMKRLDQEQGPEESQPETDTSDMDPLVGFTIEDVKSVLDQVTDDILIGIQTEINEKLQIQEEAFNARIEKLKKA

SEQ ID NO: 282688 - protein, 84 aa, Artificial Sequence
  derived and/or modified sequence
  misc_feature (1)..(1): Xaa can be any naturally occurring amino acid
XADPGGNHARIGALHMSLEESIKWLGEVMAEIGPTHSQKSEDWNIFDVKQANAIIDYLKISLFQHYKLYEFMFYSAREEIVIGT

SEQ ID NO: 282689 - DNA, 627 bp, Artificial Sequence
  derived and/or modified sequence
atggacttcagcatcatccagtacagcaagttcatgaccctgctggccatgagcctgcagaacctgaagaccctgcacatgagcctggaggagagcatcaagtggctgggcgaggtgatggccgagatcggccccacccacagccagaagagcgaggactggaacatcttcgacgtgaagcaggccaacgccatcatcgactacctgaagatcagcctgttccagcactacaagctgtacgagttcatgttctacagcgccagagaggagatcgtgatcggcaccgagcaggtgatcgaggtggtgaagagcgcctgcggccccttccccaaccccctggaggagggcatcagcttcgacatctacagcaccttcatcgagccccccaccatcctggacaccgagatgaagagactggaccaggagcagggccccgaggagagccagcccgagaccgacaccagcgacatggaccccctggtgggcttcaccatcgaggacgtgaagagcgtgctggaccaggtgaccgacgacatcctgatcggcatccagaccgagatcaacgagaagctgcagatccaggaggaggccttcaacgccagaatcgagaagctgaagaaggcctag

SEQ ID NO: 282690 - DNA, 627 bp, Artificial Sequence
  derived and/or modified sequence
atggattttagcattatccagtactccaaatttatgacccttctggccatgagtctccagaacctcaagacactccacatgtctctggaggagagcattaagtggttaggcgaagtgatggccgagatagggcccacgcactctcagaaatccgaggattggaatatttttgacgttaaacaggccaatgccataatcgactacctgaagattagtcttttccagcactataaactgtacgaattcatgttctatagtgcgagagaagaaattgtgataggaaccgagcaggtcatcgaagtcgtcaaatcggcatgcggtcctttccccaaccccctggaggaaggcatttcatttgacatttattcaaccttcatagaaccccccacaatcctggatacagagatgaagcgactcgatcaggaacaaggtccagaggagtcccagccagagacagatacatctgacatggatcccctcgtggggtttacgatcgaggacgttaaatctgtgctcgatcaggttacagacgacatcctgatcggtatccagactgaaattaacgagaagctgcagatacaggaggaggcctttaacgcccgcatagagaaattgaagaaggcttag

SEQ ID NO: 282691 - DNA, 627 bp, Artificial Sequence
  derived and/or modified sequence
atggacttcagcatcatccagtacagcaagttcatgaccctgctggccatgagcctgcagaacctgaagaccctgcacatgagcctggaggagagcatcaagtggctgggggaggtgatggccgagatcggccccacccacagccagaagtctgaggactggaacatctttgatgtgaagcaggccaatgccatcatcgactacctgaagatcagcctcttccagcactacaagctgtatgagttcatgttctacagcgcccgggaggagatcgtgattggaacagagcaggtgattgaggtggtgaagagcgcctgtggccccttccccaaccccctggaggagggcatcagctttgacatctacagcaccttcatcgagccccccaccatcctggacacagagatgaagaggctggaccaggagcagggccctgaggagagccagcctgagacagacaccagtgacatggaccccctggtgggcttcaccattgaagatgtgaagtctgtgctggaccaggtgacagatgacatcctgattggcatccagacagagatcaatgagaagctgcagatccaggaggaggccttcaatgcccgcatcgagaagctgaagaaggcctag

SEQ ID NO: 282692 - DNA, 627 bp, Artificial Sequence
  derived and/or modified sequence
atggacttcagcatcatccagtacagcaagttcatgaccctgctggctatgtcccttcagaatttaaagacgctgcatatgagcctggaggagtcaatcaaatggctgggcgaggtgatggccgagatcggacctactcactcacagaagagtgaggattggaatatcttcgacgtcaaacaagcaaatgctataattgactatctgaaaatttccttatttcagcactataaattatacgaattcatgttttacagcgcacgtgaggaaattgttataggaactgaacaggtaatcgaggtagtcaagtcggcgtgtggtcccttcccaaatccactcgaggagggaattagctttgacatctattctacattcattgagcctcctacaatcctggataccgagatgaagaggctggatcaggagcaggggcctgaagagtcacaacccgagacagacacaagcgatatggacccgctggtcggtttcaccatcgaggatgtgaaatcggtgctggatcaagtcacagatgatatactcatcggcatacagacagagattaacgagaagctgcagattcaggaggaagcttttaatgcccgcattgagaaacttaaaaaggcctag

SEQ ID NO: 282693 - DNA, 627 bp, Artificial Sequence
  derived and/or modified sequence
atggatttcagcattatccagtactcaaagtttatgaccttgctggccatgagcctgcagaacctaaagaccctgcacatgagcctggaggaaagtattaaatggctcggcgaagttatggcggagatagggcctacacactcccagaaaagcgaggactggaatatcttcgatgtgaagcaggccaacgcgatcatcgattaccttaagatcagtctgttccagcattacaagctttatgagtttatgttctacagcgcccgagaagagatagtcatcggcaccgagcaggtgatcgaagtcgtgaaatccgcctgtggaccgttccctaatcctctcgaggagggcatttctttcgacatttactccactttcatcgagcctccaactattcttgacactgagatgaagcggctagatcaggaacagggacccgaggagagccaacctgagaccgacacatccgatatggacccgctggtagggtttaccattgaagacgtgaagtctgtgctggaccaggttaccgatgatattcttatcgggattcagaccgaaatcaacgaaaagctgcagatccaggaggaggcgtttaacgccagaatagaaaagctgaagaaagcgtag

SEQ ID NO: 282694 - protein, 121 aa, Artificial Sequence
  derived and/or modified sequence
MVRILANGEIVQDDDPRVRTTTQPPRGSIPRQSFFNRGHGAPPGGPGPRQQQAGARLGAAQSPFNDLNRQLVNMGFPQWHLGNHAVEPVTSILLLFLLMMLGVRGLLLVGLVYLVSHLSQR

SEQ ID NO: 282695 - protein, 103 aa, Artificial Sequence
  derived and/or modified sequence
MSPVLSGIHSIYSAWVTSVNITDCKPPSISGAAHQGPTAPGRMVRILANGEIVQDDDPRVRTTTQPPRGSIPRQSFFNRGHGAPPGGPGPRQQQAGARLGAAQ

SEQ ID NO: 282696 - DNA, 1062 bp, Artificial Sequence
  derived and/or modified sequence
aaccgcctggagccgccgggagtggacgccgccgaggcccggagtcgcgcctgcagacacagcatctactcagcgtgggtcacctctgtgaacatcactgactgcaagcctccctcaatttctggtgcagcccatcagggacccacagcgcctgggaggatggtgcggatcttggccaatggggaaatcgtgcaggatgacgacccccgagtgaggaccactacccagccaccaagaggtagcattcctcgacagagcttcttcaacaggggccatggtgctcccccagggggtcctggcccccgccagcagcaggcaggtgccaggctgggtgctgctcagtcccccttcaatgacctcaaccggcagctggtgaacatgggctttccgcagtggcatcttggcaaccatgctgtggagccggtgacctccatcctgctcctcttcctgctcatgatgcttggtgttcgtggcctcctcctggttggccttgtctacctggtgtcccacctgagtcagcggtgacctctgagggctgataggggtgggtttgttgagagggacttgctgggccttggtgtgagagcaggcatatttggaggggatctggtggtgccttgaaggtatgatcagagaggggaccacaggtgtgtgtttcccctttgtgttaagcgtgaggcagagggagacgttagtccagcatttccaaagtgtgggtgggtccgttggttcccaagatacttttaggtggtatggggcctgcattaagtggcacaaaatcagagcaagaaagcgatgcccttcccaattctctcaatccttttatgccgagaagatctcagctggatgccaacatgttccgatgcctgtggaagacatgccgacgtctcctctgcctagggagcaggacttgggcttagggcaggtggaaaaaattccagacttttttagcactgtttttgttttaatggtatatttttattggctactttattgtttaggacaagtggtagtggcattctatttattgtgaccttttcaataaatagatttaagtaaaaa

SEQ ID NO: 282697 - DNA, 403 bp, Artificial Sequence
  derived and/or modified sequence
gccagggccagcgggcttcaggagggggacgcgcctgtcccgggctccaggctacgggcaagaccacagggctcctgacctttttcggcatacatgtcaccagtgctatctggaatacacagcatctactcagcgtgggtcacctctgtgaacatcactgactgcaagcctccctcaatttctggtgcagcccatcagggacccacagcgcctgggaggatggtgcggatcttggccaatggggaaatcgtgcaggatgacgacccccgagtgaggaccactacccagccaccaagaggtagcattcctcgacagagcttcttcaacaggggccatggtgctcccccagggggtcctggcccccgccagcagcaggcaggtgccaggctgggtgctgctcagt

SEQ ID NO: 282698 - DNA, 312 bp, Artificial Sequence
  derived and/or modified sequence
atgagccccgtgctgagcggcatccacagcatctacagcgcctgggtgaccagcgtgaacatcaccgactgcaagccccccagcatcagcggcgccgcccaccagggccccaccgcccccggcagaatggtgagaatcctggccaacggcgagatcgtgcaggacgacgaccccagagtgagaaccaccacccagccccccagaggcagcatccccagacagagcttcttcaacagaggccacggcgccccccccggcggccccggccccagacagcagcaggccggcgccagactgggcgccgcccagtag

SEQ ID NO: 282699 - DNA, 312 bp, Artificial Sequence
  derived and/or modified sequence
atgtctccagtcttgtcggggatccattctatctactccgcttgggtgacctccgtaaacattaccgactgtaaaccaccgtcaatcagtggggctgcacaccagggacctaccgccccaggcagaatggtcaggattttagctaacggggagatcgtgcaagacgacgacccacgtgtgcgtaccactacccagccaccgagaggatctattcctcgccagtcattctttaaccgagggcatggcgctccgcccggcgggcccggccctaggcagcagcaagccggtgccagacttggggctgcgcagtag

SEQ ID NO: 282700 - DNA, 312 bp, Artificial Sequence
  derived and/or modified sequence
atgagccctgtgctgagcggcatccacagcatctacagcgcctgggtgacctctgtgaacatcacagactgcaagccacccagcatcagcggggccgcccaccagggccccacagcccctggccgcatggtgcgcatcctggccaatggagagatcgtgcaggatgatgacccccgggtgaggaccaccacccagcccccccggggcagcatcccccggcagagcttcttcaacagaggacatggagcccctcctgggggccctggcccccggcagcagcaggccggggcccggctgggcgccgcccagtag

SEQ ID NO: 282701 - DNA, 312 bp, Artificial Sequence
  derived and/or modified sequence
atgagccccgtgctgagcggcatccacagcatctacagcgcctgggtgactagcgtgaatatcactgactgtaaaccgccctccattagcggagccgcccaccagggccccacagcacccggcaggatggtgaggattttagctaacggcgaaatcgttcaggatgacgatcctagggtacggacaactacacagccccctagaggctcgattccgaggcagagcttctttaacaggggtcatggggcgcctccagggggccctggcccaagacagcagcaggccggcgcacggctaggagcggctcaatag

SEQ ID NO: 282702 - DNA, 312 bp, Artificial Sequence
  derived and/or modified sequence
atgagtcctgtgttgtctgggatccactctatctattccgcatgggtgaccagcgtgaacatcaccgattgtaagcctccaagcataagcggagccgcacaccaaggcccaaccgcgcctggacggatggttcgcatcctggcaaatggtgaaattgtccaggacgacgacccccgagtgaggacaaccacccaacctccccgaggctccatcccacgtcaatccttcttcaatcggggacatggggcaccaccaggagggcctggccctcgtcagcagcaagcgggagcaagattgggcgctgctcagtag

SEQ ID NO: 282703 - protein, 458 aa, Artificial Sequence
  derived and/or modified sequence
MFSCFCFSLQDNSFSSTTVTECDEDPVSLHEDQTDCSSLRDENNKENYPDAGALVEEHAPPSWEPQQQNVEATVLVDSVLRPSMGNFKSRKPKSIFKAESGRSHGESQETEHVVSSQSECQVRAGTPAHESPQNNAFKCQETVRLQPRIDQRTAISPKDAFETRQDLNEEEAAQVHGVKDPAPASTQSVLADGTDSADPSPVHKDGQNEADSAPEDLHSVGTSRLLYHITDGDNPLLSPRCSIFSQSQRFNLDPESAPSPPSTQQFMMPRSSSRCSCGDGKEPQTITQLTKHIQSLKRKIRKFEEKFEQEKKYRPSHGDKTSNPEVLKWMNDLAKGRKQLKELKLKLSEEQGSAPKGPPRNLLCEQPTVPRENGKPEAAGPEPSSSGEETPDAALTCLKERREQLPPQEDSKVTKQDKNLIKPLYDRYRIIKQILSTPSLIPTIVSQDTCMLLLCTDV

SEQ ID NO: 282704 - DNA, 1377 bp, Artificial Sequence
  derived and/or modified sequence
atgttcagctgcttctgcttcagcctgcaggacaacagcttcagcagcaccaccgtgaccgagtgcgacgaggaccccgtgagcctgcacgaggaccagaccgactgcagcagcctgagagacgagaacaacaaggagaactaccccgacgccggcgccctggtggaggagcacgccccccccagctgggagccccagcagcagaacgtggaggccaccgtgctggtggacagcgtgctgagacccagcatgggcaacttcaagagcagaaagcccaagagcatcttcaaggccgagagcggcagaagccacggcgagagccaggagaccgagcacgtggtgagcagccagagcgagtgccaggtgagagccggcacccccgcccacgagagcccccagaacaacgccttcaagtgccaggagaccgtgagactgcagcccagaatcgaccagagaaccgccatcagccccaaggacgccttcgagaccagacaggacctgaacgaggaggaggccgcccaggtgcacggcgtgaaggaccccgcccccgccagcacccagagcgtgctggccgacggcaccgacagcgccgaccccagccccgtgcacaaggacggccagaacgaggccgacagcgcccccgaggacctgcacagcgtgggcaccagcagactgctgtaccacatcaccgacggcgacaaccccctgctgagccccagatgcagcatcttcagccagagccagagattcaacctggaccccgagagcgcccccagcccccccagcacccagcagttcatgatgcccagaagcagcagcagatgcagctgcggcgacggcaaggagccccagaccatcacccagctgaccaagcacatccagagcctgaagagaaagatcagaaagttcgaggagaagttcgagcaggagaagaagtacagacccagccacggcgacaagaccagcaaccccgaggtgctgaagtggatgaacgacctggccaagggcagaaagcagctgaaggagctgaagctgaagctgagcgaggagcagggcagcgcccccaagggcccccccagaaacctgctgtgcgagcagcccaccgtgcccagagagaacggcaagcccgaggccgccggccccgagcccagcagcagcggcgaggagacccccgacgccgccctgacctgcctgaaggagagaagagagcagctgcccccccaggaggacagcaaggtgaccaagcaggacaagaacctgatcaagcccctgtacgacagatacagaatcatcaagcagatcctgagcacccccagcctgatccccaccatcgtgagccaggacacctgcatgctgctgctgtgcaccgacgtgtag

SEQ ID NO: 282705 - DNA, 1377 bp, Artificial Sequence
  derived and/or modified sequence
atgttttcctgcttctgcttttctctccaggataacagtttctcctccactaccgtgaccgaatgtgatgaggaccccgttagcctgcacgaggaccagactgactgcagttccctgagagacgagaataacaaagaaaactacccagatgctggagcactggtcgaggaacatgctccaccttcttgggagcctcagcagcagaacgtcgaagctactgtcctggtggacagtgttttgagaccttcaatgggaaattttaaatcgaggaaaccaaagagcatctttaaagccgaatctggtcggtctcacggagagtcgcaggagacagagcacgtggtgtcctctcagtccgaatgccaagtcagggctggaacaccagcccacgagtcacctcagaataacgcgttcaaatgccaggagactgtgagattgcagcctagaatcgatcagcgcacggctatcagtcctaaggacgcattcgagactcggcaagacctgaatgaggaggaggctgcacaggtgcacggcgtcaaggatccagcacccgccagtacccagagcgtcctggctgacggaacagacagcgccgatccttctcccgttcacaaggacggacagaatgaagcggactccgcgccagaggacctgcattccgtcgggacatctagactgctatatcacattacggatggggataatcccctcttgtccccaagatgcagcattttctctcagtcacaacgattcaatcttgacccggagtctgctccaagccctccatctacccagcagtttatgatgcccaggtcctcaagtcgctgctcctgtggagacggaaaagaacctcaaaccatcacacagctgacaaaacacatccagtctctgaaacgaaagattcgaaaattcgaagagaaatttgagcaagaaaagaagtatcgcccatcacatggagacaagaccagcaatccagaggtcctgaagtggatgaatgatttagctaagggacggaaacagctgaaagagcttaagctaaaactttctgaggagcagggttctgctcctaagggaccccccagaaatcttttgtgcgagcagcccaccgtccctcgggagaatggcaagccagaggccgcagggccagaaccatcatccagcggcgaggagaccccagatgcagctctcacctgtctcaaggagcgcagagaacagttgcctccccaagaagacagcaaggtgaccaaacaagacaagaacctcattaaaccgctgtacgatcgctaccggataattaagcagattttgtctacaccttccctgattcctacaatcgttagccaagacacttgcatgcttctactctgcaccgatgtatag

SEQ ID NO: 282706 - DNA, 3456 bp, Artificial Sequence
  derived and/or modified sequence
gtgcagacagcagcccaaggtagagcgagcgtgccgggcgagcccggagacttgccttgcaatgccatgtttgtgtatgtgctcactcccggagagcaatcagggagacggctccccggccagacttggctgatgttttcttgtttctgtttcagccttcaggataattccttcagcagcaccactgtaacagagcctgagagaaggggagagaggtgtgccaaagtgtgcatctgcaggccgaagatgaggcctggacttcctgctccaggtgcacaggtgtgacgaagatccagtctctctacatgaagaccagactgattgctccagtctcagagatgaaaacaataaagagaactaccccgacgcaggggctctggtagaagagcacgcgccgccctcttgggagccgcagcagcagaatgtagaggcgaccgtgctggtggacagcgtattgcgacccagcatgggcaacttcaagtccaggaagcccaagtccatcttcaaagcggagagcgggaggagccacggagaaagtcaggagacagagcatgtggtatccagccagtcagagtgtcaggtgagagcaggaacaccagctcatgagagtccacaaaacaatgccttcaagtgccaagaaacagtgcgacttcaaccaagaatagaccagaggactgccatttcgccaaaggatgcttttgaaactcggcaggacttaaatgaggaagaagctgctcaggtgcatggagtcaaggacccggcgccagcatcaacccagagcgtgcttgccgatgggacagattctgcagacccctcaccagtccacaaagatgggcagaatgaggccgacagtgcaccagaagacctccactctgtggggaccagcaggctgctctatcacatcactgatggtgataacccactgctgtcgccacgatgctccatcttcagccaaagccagagattcaacttagaccccgagtcagccccatctccacccagcactcagcagtttatgatgccgcggagttcttcacgctgcagctgtggagatggcaaggagccacagaccatcacccagctcaccaagcacatccagagcctcaagcggaaaattcggaaatttgaagaaaaatttgaacaagaaaagaaataccggccttcacatggtgacaagacttctaatcctgaagtcctgaaatggatgaatgatttggctaaaggtcgtaaacagctcaaagaactaaagctaaagctgtcagaagaacaagggagtgctcccaaaggtccacctagaaacctgttgtgtgagcaacccacagtccccagagaaaatgggaaaccggaagctgcgggcccggagccaagctcctctggagaagagactccagatgctgccttgacatgcctgaaggagagaagagagcaacttcctccccaggaggattctaaggtaactaagcaagacaagaacctcataaagccgctttatgaccgatacagaattatcaagcaaatcttgtcaacaccttcccttattccaacaattgaggaagaggactctgatgaagaccgtccacagggaagccaacaaccttctttggcagatccagcatctcaccttcctgttggtgaccacctcacctactctaatgagactgagcctgttagggcccttttaccagatgaaaagaaagaagtaaaaccaccagctctctccatgtctaatttacatgaggctaccatgcctgtacttcttgaccatctccgagaaactagggctgacaagaagagactgcggaaagccttaagagaatttgaagaacagttttttaaacaaacaggaagaagtccacaaaaggaagataggataccaatggcagatgagtattatgaatataagcacataaaagccaaactgagactattagaggtcctcatcagcaagcaagatgtggccaaaactatttgaggttcaggaaatgttatgatcactttcacccatgatataaagtaaagtttattttcctctgccatccttgctaagtagttttgacacaatgaaaatggaagcactttagtggtagtattagctgtttttaagaaggaatagcaagtttaattatatacaaggagaagggatttaaacggggggaagaatacaacaggtagccatataattgggaaaaaattcagtgtcctccatgccaagcagaaaactcatagtcaatacaagtatttttaaaaatgtctaatattttatcaaatctaaataacatagctaggacacttgttagggaaagtttatttagtatccaaagactgtttatgttgatgtatggaaaagagcatgattttaaaaaatcaatcataggaggaaaagaaattcgcttttcaagtaggaaggaatacagctagcaagaaagcaatttatttgaaacttctaatggatttttgagtgataaaacatttactaccttgtcctttaagtctgctaggctctcagtaccctaaaataaactagattgtgttgctatttttttctttctctataaaaataacacattattttatccgttatttgaaattttacatttctggttaccaaagttcattctgatagcatgtactttgtgaattattatctttgtctataactgacagatgtttatattaaaataaaatattgtattaaaaatttaaaataggtattttggatagatatgtgtctgtagtatataatctaatgtgtccatagtattattgctaatcttttggtttactataagatgatataactattttttcattgggaatatacatttttcttaatgttccaacatctatactttgtaaagtcaaaacatttcccatgagctgtagttattcatccttctgtacaaaatgaaaagtttggaaattgtttgccctgataccttgaaaaagaagccagaatatttatttgcttcatcaacttcagtgtatatcattttgtgttattttatacgaaaacatgtttattattttcatttttgtaaaaggaagtaaaaggtcaacattttctctcatgtaccaaccttgtttgtatttctattttctgtaatgtttaagtatgatgttgaagaaattcacattctcttatagtttggatgggaagactattgactatttcagaaacagacttatttcagaggcttattgttttctctgtatttacctaatattttataacttttatgaatcagaataatgtccttcataaatttgtttaattgaagtcatctacttctaacaggacagatacacaactatttgaggtttacaaattacatctttgataagggaaatggtttcgtgacatgtacacagttgctattaaaatgtaactctatatattctatatgattgtaaatattttatacaacaatacaaataaaatatttttctattatattt

SEQ ID NO: 282707 - DNA, 1963 bp, Artificial Sequence
  derived and/or modified sequence
atgttttcttgtttctgtttcagccttcaggataattccttcagcagcaccactgtaacagagtgtgacgaagatccagtctctctacatgaagaccagactgattgctccagtctcagagatgaaaacaataaagagaactaccccgacgcaggggctctggtagaagagcacgcgccgccctcttgggagccgcagcagcagaatgtagaggcgaccgtgctggtggacagcgtattgcgacccagcatgggcaacttcaagtccaggaagcccaagtccatcttcaaagcggagagcgggaggagccacggagaaagtcaggagacagagcatgtggtatccagccagtcagagtgtcaggtgagagcaggaacaccagctcatgagagtccacaaaacaatgccttcaagtgccaagaaacagtgcgacttcaaccaagaatagaccagaggactgccatttcgccaaaggatgcttttgaaactcggcaggacttaaatgaggaagaagctgctcaggtgcatggagtcaaggacccggcgccagcatcaacccagagcgtgcttgccgatgggacagattctgcagacccctcaccagtccacaaagatgggcagaatgaggccgacagtgcaccagaagacctccactctgtggggaccagcaggctgctctatcacatcactgatggtgataacccactgctgtcgccacgatgctccatcttcagccaaagccagagattcaacttagaccccgagtcagccccatctccacccagcactcagcagtttatgatgccgcggagttcttcacgctgcagctgtggagatggcaaggagccacagaccatcacccagctcaccaagcacatccagagcctcaagcggaaaattcggaaatttgaagaaaaatttgaacaagaaaagaaataccggccttcacatggtgacaagacttctaatcctgaagtcctgaaatggatgaatgatttggctaaaggtcgtaaacagctcaaagaactaaagctaaagctgtcagaagaacaagggagtgctcccaaaggtccacctagaaacctgttgtgtgagcaacccacagtccccagagaaaatgggaaaccggaagctgcgggcccggagccaagctcctctggagaagagactccagatgctgccttgacatgcctgaaggagagaagagagcaacttcctccccaggaggattctaaggtaactaagcaagacaagaacctcataaagccgctttatgaccgatacagaattatcaagcaaatcttgtcaacaccttcccttattccaacaattgtaagtcaggatacttgcatgctgttactttgtactgatgtgtagttaacaggatgtcacatagtagtacaagagttataaaagacccttcatggcagtatatactgcaaacaaggctagttgtcatttcaaaaagtgaaaatttggtcttctctaaccccattactatatttaacagtggctgatattagaactattgtaaaataggaacatatagcacttgtatgtctagagccaattttaacatttgctttcattatcttgggtgaaaagaaatgatagatttcagtttggcattttctaatttgtaacacagctagacaaaacagagcctttctgttctgtgtgttggttaattttttcctttaatcagaaaattaacaatatattcttgatataatgcaacatttgtttttggtaccatttgaccatactgtacaagatatgagaagatttatttcaatagaaaatataagtactgaaattgaattaggctacttttaataaagaatgatttatgggaatacagaactagaaaagcatcacaaatcctactccatcaatatcaaaacagttacttgttcaagatatcaatataaaaaggaataaatattaacaaatataaatttaa

SEQ ID NO: 282708 - DNA, 1377 bp, Artificial Sequence
  derived and/or modified sequence
atgttcagctgcttctgcttcagcctgcaggacaacagcttcagcagcaccaccgtgacagaatgtgatgaggaccctgtgtccctgcacgaggaccagacagactgcagcagcctgagagatgagaacaacaaggagaactacccagatgctggggccctggtggaggagcacgccccacccagctgggagccccagcagcagaatgtggaggccaccgtgctggtggacagcgtgctgcggcccagcatgggcaacttcaagagcaggaagcccaagagcatcttcaaggccgagagcggccgcagccacggggagagccaggagacagagcacgtggtgagcagccagagcgagtgccaggtgcgggccggcaccccagcccacgagagcccccagaacaatgccttcaagtgccaggagaccgtgcggctgcagcccagaattgaccagaggacagccatcagccccaaggatgcctttgagacccggcaggacctgaatgaggaggaggccgcccaggtgcacggcgtgaaggaccctgccccagccagcacccagagcgtgctggctgatggaacagacagcgctgaccccagccctgtgcacaaggatggccagaatgaggccgacagcgcccctgaggacctgcacagcgtgggcaccagccggctgctgtaccacatcacagatggagacaaccccctgctgagcccccgctgcagcatcttcagccagagccagcgcttcaacctggaccctgagagcgcccccagcccccccagcacccagcagttcatgatgcccaggagcagcagccgctgcagctgtggagatggcaaggagccccagaccatcacccagctgaccaagcacatccagagcctgaagaggaagatcaggaagtttgaggagaagtttgagcaggagaagaagtaccggcccagccatggagacaagaccagcaaccctgaggtgctgaagtggatgaatgacctggccaagggcaggaagcagctgaaggagctgaagctgaagctgtctgaggagcagggcagcgcccccaagggcccccccaggaacctgctgtgtgagcagcccaccgtgccccgggagaatggcaagccagaggccgccggccctgagcccagcagcagcggggaggagaccccagatgctgccctgacctgcctgaaggagcggcgggagcagctgcccccccaggaggacagcaaggtgaccaagcaggacaagaacctgatcaagcccctgtatgaccgctaccgcatcatcaagcagatcctgagcacccccagcctcatccccaccatcgtgtcccaggacacctgcatgctgctgctgtgcacagatgtgtag

SEQ ID NO: 282709 - DNA, 1377 bp, Artificial Sequence
  derived and/or modified sequence
atgttcagctgcttctgcttcagcctgcaggacaacagcttcagcagcacaaccgttaccgaatgtgatgaagacccagtgagcctccacgaggatcaaactgactgtagctccctgcgggatgagaacaataaggagaactaccccgatgctggcgccttggtggaggaacatgctccaccctcatgggagccccagcaacaaaatgttgaggcaactgtgcttgtcgactctgttctgcggccatctatgggcaattttaagagccgcaagccgaagtctatcttcaaagccgaatcgggccggagccacggcgagagccaggagactgagcatgtggtgtcaagtcagtccgagtgccaagtgcgtgcaggcactcctgctcatgagtctcctcagaacaatgccttcaaatgtcaggagacagtccgcctgcaacctcgtatagaccagcgtacagcaatctctccgaaggacgccttcgaaacccgtcaggacctgaacgaagaggaggcggcccaggtgcacggagtgaaggacccggcaccggcctcaacccaatcagtgctggcagacggaactgacagtgctgaccctagccccgtgcacaaagacgggcaaaacgaggcagatagcgcacctgaggatcttcactctgttggaacttcaagactcctttaccacattaccgacggcgataatcctctgctgagccctcgctgctcaatcttttcccagtctcaaaggtttaatttagatcctgagtctgctccttcccctccgtccacacagcagttcatgatgccacggtccagcagcagatgcagctgcggggatggtaaggagcctcaaaccataacacagctcacaaaacacattcaatcccttaagcggaagattcggaaatttgaagagaagtttgagcaggagaagaagtacagaccaagccatggcgataagacttctaatcccgaagttttaaaatggatgaacgatctcgctaagggcaggaaacaacttaaagagctgaaactgaagctttccgaagaacagggatccgccccaaaagggcccccccgcaacctgctctgtgagcaacccaccgtcccgagagagaatgggaagcccgaggccgcagggcctgagccttcatcatctggagaagagaccccagacgctgctttgacctgtctaaaagaacggcgggagcaactgccaccacaggaagattccaaggtgactaaacaagacaagaatttgattaagcctctttatgatcggtatcgtatcatcaaacagatactctctactccctctctgattcccacaattgtaagccaagacacctgtatgctcctgctctgtacggatgtgtag

SEQ ID NO: 282710 - DNA, 1377 bp, Artificial Sequence
  derived and/or modified sequence
atgttctcctgtttctgcttttccctgcaggacaacagctttagtagcaccacagttaccgagtgcgacgaggaccccgtgtcactgcatgaggatcagacagactgctcctcactgagagacgaaaacaacaaggagaactaccctgatgccggagccttggttgaagagcacgcacccccttcctgggagcctcagcagcagaatgtggaggccacagtgctggtggactctgtcttgcgcccttccatgggcaactttaaatctcgaaagccaaagagtatctttaaggccgagagcggaagaagccacggagagtcccaggagacagaacacgttgttagtagtcagtcagagtgtcaagtccgcgcaggtacccccgctcacgaatcccctcagaataatgcgttcaaatgccaggaaactgtgcgtcttcagcctcgcattgatcagagaacagccataagccctaaggatgcctttgagacccgtcaggaccttaacgaagaggaggccgcacaggtccatggcgtgaaagatcccgcaccagccagcacgcagagcgtcctggccgacggcaccgactccgctgatcctagccccgttcacaaggatggacagaacgaagccgattcagcacctgaggacctccactcagtgggaacgagtcgcttattatatcatataacggatggagacaaccctttattgtctcctcgctgctccatcttttcccagagccagaggttcaatcttgaccccgaaagcgcaccctcccccccatcaactcagcaattcatgatgcccagaagctcttcccgctgtagctgtggtgacgggaaagaaccacagacgatcacacagctgaccaagcacatccagtctttgaagcgtaagattcgcaaatttgaggagaagtttgaacaggagaaaaaataccgtccttcccatggtgacaaaacctccaaccctgaggtgctaaagtggatgaatgatctggcaaaaggcaggaagcaactgaaagagctaaagttaaaactttccgaggagcagggaagcgccccaaaaggaccaccgaggaacctgttgtgtgaacagcccacagttcccagggagaacggcaaacccgaggctgctggacctgagccctccagtagcggtgaagagacccccgatgcagcactgacttgcctaaaggagcgccgagaacagctccctccacaggaggacagcaaggtaactaagcaggacaagaatcttatcaagcctctctacgatcggtatagaattatcaaacagattctgagtaccccctcccttatcccgactattgtaagccaggatacctgcatgctcctcctgtgtactgatgtgtag

SEQ ID NO: 282711 - DNA, 582 bp, Artificial Sequence
  derived and/or modified sequence
attctcattgccagcctcggggggtggctggcacaaagagcccaagattaaacgcggcgcctgggctggcgaggtcggggtcgtgtggtaactctccaggtgctcctcgctggatcccggggtcccagccccgccgccgcgccccgcccagctctgtccccgcagcctcgcgggctgccgggctttgtggttcgcccgtgccgctgggcccctgctgggggtgtcgttacgagcatgtgcagacagcagcccaagccttcaggataattccttcagcagcaccactgtaacagagcctgagagaaggggagagaggtgtgccaaagtgtgcatctgcaggccgaagatgaggcctggacttcctgctccaggtgcacaggtgtgacgaagatccagtctctctacatgaagaccagactgattgctccagtctcagagatgaaaacaataaagagaactaccccgacgcaggggctctggtagaagagcacgcgccgccctcttgggagccgcagcagcagaatgtagaggcgaccgtgctggtggacagcgtattgcgacccagcatgggcaacttcaagt

SEQ ID NO: 282712 - DNA, 459 bp, Artificial Sequence
  derived and/or modified sequence
attcacagctctgtagtccggggctgggcgcttcctctctgggactgaaataagagcgctctagacagatcagccttcaggataattccttcagcagcaccactgtaacagagcctgagagaaggggagagaggtgtgccaaagtgtgcatctgcaggccgaagatgaggcctggacttcctgctccaggtgcacaggtgtgacgaagatccagtctctctacatgaagaccagactgattgctccagtctcagagatgaaaacaataaagagaactaccccgacgcaggggctctggtagaagagcacgcgccgccctcttgggagccgcagcagcagaatgtagaggcgaccgtgctggtggacagcgtattgcgacccagcatgggcaacttcaagtccaggaagcccaagtccatcttcaaagcggagagcgggaggagccacggagaaagtcag

SEQ ID NO: 282713 - protein, 532 aa, Artificial Sequence
  derived and/or modified sequence
MMLSEQAQKWFPTHVQVTVLQAKDLKPKGKSGTNDTYTIIQLGKEKYSTSVAEKTLEPVWKEEASFELPGLLIQGSPEKYILFLIVMHRSLVGLDKFLGQVAINLNDIFEDKQRRKTEWFRLESKQGKRIKNRGEIKVNIQFMRNNMTASMFDLSMKDKTRSPFAKLKDKMKGRKNDGTFSDTSSAIIPSTHMPDANSEFSSGEIQMKSKPKKPFLLGPQRLSSAHSMSDLSGSHMSSEKLKAGTIGQTHLLGHQLDSFGTVPESGSLKSPHRRTLSFDTSKMNQPDSIVDEGELCFGRQNDPFTNVTASLPQKFATLPRKKNPFEESSETWDSSMNLFSKPIEIRKENKREKREKVSLFERVTGKKDSRRSDKLNNGGSDSPCDLKSPNAFSENRQDYFDYESTNPFTAKFRASNIMPSSRNTLLTPAVAEWRGSLRWAELFHMSPTSNEDLRKIPDSNPFDATAGYRSLTYEEVLQELVKHKELLRRKDTHIRELEDYIDNLLVRVMEETPSILRVPYEPSRKAGKFSNS

SEQ ID NO: 282714 - DNA, 1599 bp, Artificial Sequence
  derived and/or modified sequence
atgatgctgagtgagcaggcccagaagtggtttcccacccacgtgcaagtcacagttttacaagctaaggatttaaagccaaaaggtaagtcaggcacgaacgatacatacacaattattcagctcggcaaagagaaatacagtaccagtgttgcggaaaaaactctggaacccgtgtggaaggaggaggcgtcattcgagctgcctggtctgctgattcagggcagccctgaaaagtatatactgttcctgattgtgatgcatcgatcactggtggggctggataagttcctcgggcaagttgcaataaatctgaatgatatctttgaggataagcagcgaaggaagacagaatggtttcgtctggagagcaagcaggggaagagaattaagaatcgaggagaaatcaaagttaatatccagttcatgcgcaataacatgaccgcaagcatgttcgacctgagtatgaaggacaagactaggtctccattcgctaaacttaaggataagatgaagggtcggaagaatgatggcacgttctcagatacgtcatccgctatcatcccatccactcatatgcccgatgccaatagtgagttctcatccggcgaaatacagatgaagtcaaaacctaagaaaccattcctcctgggaccacagcgactgtccagtgctcactctatgtccgacctgtcaggttctcacatgtcatcagagaagctcaaagcaggcaccattgggcagacacatctcctgggccaccagttggacagctttgggaccgttcccgagtcaggctctctgaagtctccccataggaggacactgtcatttgacacaagtaagatgaatcaaccagactcaattgtcgatgagggagagctgtgcttcggacgtcagaatgatccatttaccaacgttactgcgagcttgccacagaagttcgcgacgttgcccagaaaaaagaatcctttcgaggagagctcagaaacctgggacagctccatgaatctgtttagtaagcctatcgagattcgcaaagagaacaaacgggagaaacgtgaaaaagtttctctgttcgaacgtgtcaccggaaaaaaggactcgcggaggtctgacaaactgaataatggagggagcgatagcccctgtgatctcaagtcccccaacgcttttagcgaaaatcgccaggactatttcgactacgagtccacgaaccccttcaccgcaaagttccgtgccagcaacattatgccatcctcaagaaataccctcctgacaccggctgttgctgaatggaggggcagcctgcgatgggccgaattgttccacatgtcccctactagcaacgaagatctgcgcaagattccggatagtaatccctttgatgctaccgccggctacaggtctctgacttacgaggaggttcttcaggaactcgtgaagcacaaggagctgctgcgacgcaaagacacacatatcagagagctggaagactacatcgataacctgttagtgagagtcatggaagagaccccctctattcttagggttccttacgaaccgtcgcgcaaagctgggaaattctccaatagttag

SEQ ID NO: 282715 - DNA, 1599 bp, Artificial Sequence
  derived and/or modified sequence
atgatgctgtctgagcaggcccagaagtggttccccacccacgtgcaggtgacagtgctgcaggccaaggacctgaagcccaagggcaagagcggcaccaatgacacctacaccatcatccagctgggcaaggagaagtacagcacctctgtggccgagaagaccctggagcctgtgtggaaggaggaggccagctttgagctgcccggcctgctgatccagggcagccctgagaagtacatcctcttcctgattgtgatgcacaggagcctggtgggcctggacaagttcctgggccaggtggccatcaacctgaatgacatctttgaggacaagcagaggaggaagacagagtggttccggctggagagcaagcagggcaagaggatcaagaacagaggagagatcaaggtgaacatccagttcatgaggaacaacatgacagcctccatgtttgacctgtccatgaaggacaagaccaggagcccctttgccaagctgaaggacaagatgaagggcaggaagaatgatggcaccttcagtgacaccagcagcgccatcatccccagcacccacatgccagatgccaacagcgagttcagcagcggggagatccagatgaagagcaagcccaagaagcccttcctgctgggcccccagaggctgagcagcgcccacagcatgtctgacctgagcggcagccacatgagcagcgagaagctgaaggccggcaccatcggccagacccacctgctgggccaccagctggacagctttggaacagtgcctgagagcggcagcctgaagagcccccacaggaggaccctgagctttgacaccagcaagatgaaccagcctgacagcatcgtggatgaaggagagctgtgcttcggccggcagaatgaccccttcaccaacgtgacagccagcctgccccagaagtttgccaccctgcccaggaagaagaacccctttgaggagagcagcgagacctgggacagctccatgaacctcttcagcaagcccatcgagatcaggaaggagaacaagcgggagaagcgggagaaggtgtccctgtttgagcgggtgacaggcaagaaggacagccgccgcagtgacaagctgaacaatggaggcagtgacagcccctgtgacctgaagagccccaatgccttcagcgagaaccggcaggactactttgattatgagagcaccaaccccttcaccgccaagttccgggccagcaacatcatgcccagcagcaggaacaccctgctgaccccagctgtggccgagtggaggggcagcctgcgctgggccgagctgttccacatgagccccaccagcaatgaagacctgaggaagatcccagacagcaacccctttgatgccacagctggctaccgcagcctgacctatgaggaggtgctgcaggagctggtgaagcacaaggagctgctgcggaggaaggacacccacatccgggagctggaggactacatcgacaacctgctggtgcgggtgatggaggagacccccagcatcctgcgggtgccctatgagcccagcaggaaggccggcaagttcagcaacagctag

SEQ ID NO: 282716 - DNA, 1599 bp, Artificial Sequence
  derived and/or modified sequence
atgatgctgagcgagcaggcccagaagtggttccccacccacgtgcaggttaccgtcttgcaggccaaggatctgaaacccaagggaaaatcagggactaatgacacttataccatcatccagttggggaaggaaaagtactcaaccagcgtagccgagaaaactctggagcccgtatggaaggaggaagccagctttgaacttccaggtctgctgatacaggggagccccgagaaatacattctgttcttaatagtgatgcaccgctccctggtggggctggataagtttctagggcaggtggccattaatttaaatgatatttttgaagataaacaaaggagaaagacggagtggtttcgactggagtctaaacagggaaagcggatcaaaaacagaggggaaattaaggtaaatattcagttcatgcgaaacaacatgacggcttccatgttcgatctttctatgaaggataaaacccggagtccctttgctaagttaaaagataagatgaagggtagaaagaacgacggcacatttagtgatactagttctgcaatcatcccgtcgacacatatgcctgatgcaaactcggagttcagctctggcgagatacagatgaaatccaagcccaaaaaacccttcttgttagggccacaacgcctttcatcggctcactctatgtctgatttaagcggaagccatatgtccagtgaaaaattgaaggccggcactattggacagacgcacttgctggggcatcaactggactctttcggaaccgttccagagtccggatctcttaagtctccccatcgaaggaccctgagctttgacacttccaaaatgaatcagcccgacagcatcgtggacgagggtgagctttgtttcggcagacagaacgatccatttaccaacgtcacggccagcctgcctcagaagttcgccactctgccacgaaagaagaacccctttgaggaatcgtccgaaacctgggactccagcatgaatttattttccaagccaattgaaatcagaaaagagaataaaagagaaaaaagggaaaaggtgagcctctttgaacgagtcactggaaagaaggattcccgccggagtgacaagctaaataacggcgggtccgattctccatgtgacttgaagagccctaatgcattcagcgagaatagacaggattactttgattacgagagtactaatccattcacagccaaattccgcgcttcgaacataatgcctagttccaggaacacactcttaacaccggcagttgccgagtggaggggctcccttaggtgggccgagctgttccacatgtcccccacttcgaatgaggacttacggaaaatccccgactctaatcccttcgacgctacagctgggtacaggagcctgacctatgaagaagtgctgcaggaattggtcaagcataaagaactgttaagacgaaaggatacccatattagggaactggaggattatatcgataacctcctcgtacgcgtgatggaggagactccaagtatcttacgagttccctatgaaccctctcgcaaggccggaaaattttccaacagctag

SEQ ID NO: 282717 - DNA, 1599 bp, Artificial Sequence
  derived and/or modified sequence
atgatgctgtccgaacaggcccagaagtggttccccacccacgtacaagtgactgtgctgcaggccaaggacctgaagcccaagggaaagagcggtaccaacgacacatacactattattcaattgggcaaagagaaatatagcacgtcagtcgctgagaaaaccctggaacctgtgtggaaagaagaggcgtcgtttgaactgccaggtctgcttatccaaggatcaccagaaaagtacatcctgttccttattgtcatgcaccgctctctggtcggcctagacaagtttcttgggcaggtcgccattaacctcaatgacatatttgaagacaagcagcgccgaaagactgagtggtttcggcttgaatcgaagcagggcaagcggatcaaaaacagaggcgagatcaaagtcaacatccaattcatgcgcaacaacatgactgcctcgatgtttgacctgtcaatgaaggacaaaacccgatcgcctttcgctaagcttaaagacaaaatgaaggggcgaaagaacgatggaacgttttcagacaccagctccgcaatcattccctcgacacatatgccagatgcaaacagcgagttcagctcaggtgagatacagatgaagagtaaacccaagaagccattccttctcgggccacagaggctgagctccgcccactctatgagcgatctttcgggaagccacatgtccagtgagaagctgaaagccggaaccattggccagactcatctccttggtcaccagctagattcgttcggaactgtacctgaatcgggttctctgaagagccctcaccggcgtaccctgagcttcgatacatcgaagatgaaccaacctgattcaatcgtggatgaaggtgaattatgttttggacgccaaaacgacccattcactaatgtcacagcatcgctgccccagaagtttgctacgctacctagaaagaaaaaccccttcgaggaaagcagcgagacttgggactcctccatgaatctttttagcaagcctatagagatacgtaaggaaaacaagagggaaaagagggagaaagtctcactcttcgagagagttacaggcaagaaagacagccgaagatccgataagctgaacaatggcggttccgatagcccctgtgatctcaaaagtccaaacgctttttccgaaaacagacaagactatttcgactacgaatcgacgaacccatttacggccaagttccgggcttccaacattatgccgtcttcacgcaatactttactgacccctgcagtcgcagaatggcggggttctctgagatgggctgagctgtttcatatgtcaccgacaagcaacgaagatctcaggaagatcccagactctaaccctttcgacgctacggcaggatatcgcagcttaacctacgaagaagtgctccaggagttggtgaaacataaggagttgctccgacggaaggatacacacatccgagaactggaggactatattgacaaccttctggtccgggtgatggaggaaacaccttcaatcctgcgagtaccctacgaacccagtcgcaaggcaggtaaattttcgaacagctag

SEQ ID NO: 282718 - DNA, 1599 bp, Artificial Sequence
  derived and/or modified sequence
atgatgctgtccgagcaagcccaaaagtggtttccaacccacgtgcaggtcacagtgctccaagccaaagatctgaagccaaaaggcaaaagtggtaccaatgacacatacactataattcagctgggcaaggaaaagtactccacctctgtagctgagaaaacccttgagccagtttggaaggaggaggcctctttcgagctacctggattgctaattcagggaagtccagagaaatacattcttttccttatagttatgcacaggtccctggtgggtctggataaatttttagggcaggtggcaatcaatctcaatgacatctttgaggacaaacaaagaaggaaaacagagtggtttagattagaatccaaacaaggaaaacgaatcaaaaacaggggtgagataaaggtcaatattcagtttatgaggaacaatatgaccgcaagtatgtttgacttatcaatgaaggacaaaaccagatctccttttgcaaagttaaaagataagatgaagggtagaaaaaatgatggaacattttctgatacgtcttctgcaatcattccaagtactcacatgcccgatgccaatagtgaattttcaagtggtgaaatacagatgaaatccaaaccaaaaaagccttttctcttgggtcctcagcgactctcgtcagcgcattcaatgtctgatttatctgggtcccatatgtcttctgagaaactgaaggctggcaccataggtcaaacacatcttctcggacaccagttagattcctttggaacagttccagaaagtggaagtctcaaatctccacacagaagaacattaagctttgatacttctaaaatgaaccaacctgacagcattgtggatgaaggtgaattgtgtttcggaagacaaaatgacccatttacaaatgtgactgcttcattaccccaaaaatttgcaacactgccaaggaagaaaaatccatttgaagaaagcagcgaaacatgggacagcagcatgaatttattttcaaaaccaattgaaataagaaaagaaaataaaagagagaaaagggagaaagttagcctgtttgaaagagtgactggaaaaaaagatagcagaagatctgataaacttaacaatgggggatctgatagcccttgtgacttgaaatcacctaatgcatttagtgaaaatcgccaggactattttgattatgagtcaaccaatccatttacagcaaaattcagggcttcaaatataatgccatcttcaagaaatactttgctgacccctgcagtagctgaatggagaggatctttgagatgggcagagctttttcatatgagtccaacaagcaatgaagacctcaggaaaatcccggacagcaacccctttgatgccactgcagggtatcgtagtctgacctatgaagaggttctacaggagctggtgaaacacaaagaactccttaggaggaaagacacccacatccgggaactcgaggactacatcgacaacctccttgtaagggtaatggaagaaacgcccagtattctcagagtgccgtatgaaccatccaggaaagctggcaaattctctaacagttaa

SEQ ID NO: 282719 - DNA, 1599 bp, Artificial Sequence
  derived and/or modified sequence
atgatgctgagcgagcaggcccagaagtggttccccacccacgtgcaggtgaccgtgctgcaggccaaggacctgaagcccaagggcaagagcggcaccaacgacacctacaccatcatccagctgggcaaggagaagtacagcaccagcgtggccgagaagaccctggagcccgtgtggaaggaggaggccagcttcgagctgcccggcctgctgatccagggcagccccgagaagtacatcctgttcctgatcgtgatgcacagaagcctggtgggcctggacaagttcctgggccaggtggccatcaacctgaacgacatcttcgaggacaagcagagaagaaagaccgagtggttcagactggagagcaagcagggcaagagaatcaagaacagaggcgagatcaaggtgaacatccagttcatgagaaacaacatgaccgccagcatgttcgacctgagcatgaaggacaagaccagaagccccttcgccaagctgaaggacaagatgaagggcagaaagaacgacggcaccttcagcgacaccagcagcgccatcatccccagcacccacatgcccgacgccaacagcgagttcagcagcggcgagatccagatgaagagcaagcccaagaagcccttcctgctgggcccccagagactgagcagcgcccacagcatgagcgacctgagcggcagccacatgagcagcgagaagctgaaggccggcaccatcggccagacccacctgctgggccaccagctggacagcttcggcaccgtgcccgagagcggcagcctgaagagcccccacagaagaaccctgagcttcgacaccagcaagatgaaccagcccgacagcatcgtggacgagggcgagctgtgcttcggcagacagaacgaccccttcaccaacgtgaccgccagcctgccccagaagttcgccaccctgcccagaaagaagaaccccttcgaggagagcagcgagacctgggacagcagcatgaacctgttcagcaagcccatcgagatcagaaaggagaacaagagagagaagagagagaaggtgagcctgttcgagagagtgaccggcaagaaggacagcagaagaagcgacaagctgaacaacggcggcagcgacagcccctgcgacctgaagagccccaacgccttcagcgagaacagacaggactacttcgactacgagagcaccaaccccttcaccgccaagttcagagccagcaacatcatgcccagcagcagaaacaccctgctgacccccgccgtggccgagtggagaggcagcctgagatgggccgagctgttccacatgagccccaccagcaacgaggacctgagaaagatccccgacagcaaccccttcgacgccaccgccggctacagaagcctgacctacgaggaggtgctgcaggagctggtgaagcacaaggagctgctgagaagaaaggacacccacatcagagagctggaggactacatcgacaacctgctggtgagagtgatggaggagacccccagcatcctgagagtgccctacgagcccagcagaaaggccggcaagttcagcaacagctag

SEQ ID NO: 282720 - protein, 532 aa, Artificial Sequence
  derived and/or modified sequence
MSKEGVFVNRSLAMEKIKCFGFDMDYTLAVYKSPEYESLGFELTVERLVSIGYPQELLSFAYDSTFPTRGLVFDTLYGNLLKVDAYGNLLVCAHGFNFIRGPETREQYPNKFIQRDDTERFYILNTLFNLPETYLLACLVDFFTNCPRYTSCETGFKDGDLFMSYRSMFQDVRDAVDWVHYKGSLKEKTVENLEKYVVKDGKLPLLLSRMKEVGKVFLATNSDYKYTDKIMTYLFDFPHGPKPGSSHRPWQSYFDLILVDARKPLFFGEGTVLRQVDTKTGKLKIGTYTGPLQHGIVYSGGSSDTICDLLGAKGKDILYIGDHIFGDILKSKKRQGWRTFLVIPELAQELHVWTDKSSLFEELQSLDIFLAELYKHLDSSSNERPDISSIQRRIKKVTHDMDMCYGMMGSLFRSGSRQTLFASQVMRYADLYAASFINLLYYPFSYLFRAAHVLMPHESTVEHTHVDINEMESPLATRNRTSVDFKDTDYKRHQLTRSISEIKPPNLFPLAPQEITHCHDEDDDEEEEEEEE

SEQ ID NO: 282721 - DNA, 1599 bp, Artificial Sequence
  derived and/or modified sequence
atgtctaaggagggggtgttcgtgaaccggtctctggcaatggagaaaattaaatgcttcggcttcgacatggactacacgctcgccgtgtacaagtcacccgaatatgagagtcttggattcgagctgaccgtcgaacggttagtgtctatcgggtacccacaggagctgctgagttttgcctatgacagtacgtttccaaccagaggcttggtgtttgacacactttatggtaatctcctgaaagtggatgcatatggtaacttactagtatgtgctcatggttttaactttatcagaggacctgaaactcgggagcagtaccctaacaaattcatacagcgcgacgatacagagagattttacatcctgaacacgttgtttaacctgcccgagacatatttactggcttgcctagttgatttttttacaaactgcccacgatataccagctgtgaaaccggctttaaggatggcgacctgtttatgtcctacaggtccatgttccaggacgtgagagacgcggttgactgggtccactacaaggggagcctgaaggagaagaccgtggaaaatttagagaagtacgtcgttaaggacgggaaattgcctctgctgctttcccgcatgaaagaagtcggaaaagtgtttctggctacaaactccgactacaagtataccgacaaaataatgacttatctgtttgatttccctcatggcccaaagccagggagctcgcaccggccttggcaaagctatttcgatttaatactggtggacgcaaggaaaccgctgttttttggtgaagggacggtcctccggcaggtggacacgaaaactggcaagctgaaaattggcacctacactggccctctgcagcacggcatcgtgtacagtggcggaagcagcgatacgatttgtgatctgctgggtgctaaagggaaagatatactttatatcggtgatcatatcttcggcgacattctcaagagcaagaagaggcagggatggagaacctttctggtgatcccagaactggctcaagaattacacgtgtggacagacaagtcgtctctgtttgaagaattgcagagtttagatatatttttagccgaactctacaaacatctggattcctcttccaatgaacggcccgatatcagcagcattcaacgacggataaagaaagtgacacacgatatggatatgtgttatggtatgatgggatcactttttaggtcaggcagtcgtcagacactgttcgcgagccaagtgatgaggtatgcggatctgtacgctgcttccttcatcaacttgctctactatcctttcagttatctgtttagggctgcacatgtccttatgccacatgagtccactgtggaacatacacatgttgacatcaacgagatggaatcccctctggccacccgcaaccggacatccgtcgacttcaaagacaccgactataaaagacatcagcttacccggtccatatctgaaattaagccccctaatctgttccccctggcgccacaagagattacccactgtcacgatgaagacgacgacgaagaagaggaggaagaggaagaatag

SEQ ID NO: 282722 - DNA, 1599 bp, Artificial Sequence
  derived and/or modified sequence
atgagcaaggagggcgtgtttgtgaacagaagcctggccatggagaagatcaagtgcttcggctttgacatggactacaccctggccgtgtacaagagcccagaatatgagagcctgggctttgagctgactgtggagcggctggtgtccatcggctacccccaggagctgctgagctttgcctatgacagcaccttccccacccggggcctggtgtttgacaccctgtatggcaacctgctgaaggtggatgcctacggcaacctgctggtgtgtgcccacggcttcaacttcatccggggccctgagacccgggagcagtaccccaacaagttcatccagagagatgacacagagcgcttctacatcctgaacaccctcttcaacctgcctgagacctacctgctggcctgcctggtggacttcttcaccaactgcccccgctacaccagctgtgagaccggcttcaaggatggagacctcttcatgagctaccgctccatgttccaggatgtgagagatgctgtggactgggtgcactacaagggcagcctgaaggagaagacagtggagaacctggagaagtatgtggtgaaggatggcaagctgcccctgctgctgagcaggatgaaggaggtgggcaaggtgttcctggccaccaacagcgactacaagtacacagacaagatcatgacctacctgtttgacttcccccacggccccaagccaggcagcagccaccggccctggcagagctactttgacctgatcctggtggatgccaggaagcccctcttctttggagagggcaccgtgctgcggcaggtggacaccaagacaggcaagctgaagattggcacctacacaggccccctgcagcacggcatcgtgtacagcggcggcagcagtgacaccatctgtgacctgctgggcgccaagggcaaggacatcctgtacatcggggaccacatctttggagacatcctgaagagcaagaagaggcagggctggaggaccttcctggtgattcctgagctggcccaggagctgcacgtgtggacagacaagagcagcctgtttgaggagctgcagagcctggacatcttcctggccgagctgtacaagcacctggacagcagcagcaatgaaagaccagacatcagcagcatccagaggcgcatcaagaaggtgacccatgacatggacatgtgctacggcatgatgggcagcctcttccgcagcggcagccggcagaccctgtttgccagccaggtgatgagatatgctgacctgtatgctgccagcttcatcaacctgctgtactaccccttctcctacctgttccgggccgcccacgtgctgatgcctcatgagagcacagtggagcacacccacgtggacatcaatgagatggagagccccctggccaccaggaacagaacatctgtggacttcaaggacacagactacaagaggcaccagctgaccaggagcatcagcgagatcaagccacccaacctcttccccctggccccccaggagatcacccactgccatgatgaagatgatgatgaggaggaggaggaggaggaggagtag

SEQ ID NO: 282723 - DNA, 1599 bp, Artificial Sequence
  derived and/or modified sequence
atgagcaaggagggcgtgttcgtgaaccggagcctggccatggagaagatcaaatgttttggattcgacatggactacaccttagccgtgtacaaaagtcccgagtacgagagtctgggattcgaattaactgtggaacggctggtaagtattggttacccccaggaacttctgagcttcgcctacgactccacgttccccacgcgtgggttggtgttcgatacactgtatggaaatcttttaaaggtggacgcttatggcaatctcctggtttgcgcccacggatttaacttcatccgcggccctgagaccagagaacagtatccaaataagttcatccaacgtgatgacaccgaacgattctacatcctgaatacgctctttaatctaccagagacctacctcttagcctgcctagtcgacttttttactaattgcccgagatacacttcttgcgagaccggtttcaaagacggcgacctttttatgtcgtataggagcatgttccaggatgtgcgcgatgccgtcgactgggtccactacaaaggctcgctgaaagagaagacggttgagaacctggaaaagtatgtggtgaaggacggaaagctccctttgctgctgagtaggatgaaggaagtgggcaaggtctttctggcgacaaattcggattacaaatacacagataaaatcatgacttacctgttcgactttccacatggacctaagccaggttcatctcatcggccctggcaatcctacttcgacctgatcctggtggacgcacggaaacctctgtttttcggggagggaaccgtactgcgacaggtggataccaagacaggaaagcttaaaattggcacatacacgggccctctgcagcatggaattgtttattcaggaggatcctctgacactatctgtgatctgcttggggccaaaggaaaggatatcctctatatcggggatcatatttttggagacatcctgaaatcaaaaaagaggcagggttggaggacgttcctggttataccggaactagcgcaggagttgcatgtctggactgataagtcctcattattcgaggagctccaatccctggatatctttcttgcggagctgtacaagcacttggacagcagctcaaatgaacggccagacatttcctccattcagcgaagaatcaagaaggtgacacatgacatggatatgtgttatgggatgatgggaagcttatttcggtcaggcagccgacagaccctattcgcaagtcaagtgatgcgttacgcagatctgtacgccgcgtctttcattaacctgctatactatcccttcagctacttgttcagggctgcacacgttttgatgccacacgagagtactgtggaacacactcacgttgacattaatgaaatggaaagtccacttgccacaaggaatagaacatcagtggattttaaagatacagattataaaaggcaccagctaacacgctcaatttccgagattaagccaccaaatttgtttccactggctccccaggaaatcacccactgtcacgacgaggatgacgatgaggaagaggaggaggaggaggagtag

SEQ ID NO: 282724 - DNA, 1599 bp, Artificial Sequence
  derived and/or modified sequence
atgtccaaagagggagtcttcgtgaatagaagcctggccatggagaagattaagtgcttcggatttgatatggactacactctcgcagtttataaatcgcccgaatacgagtcactgggattcgaactaaccgtggagaggctggtgtccattggctatcctcaggagctgctgtcctttgcctatgatagcacatttcctacccgcggtctcgtatttgacacactctacgggaatctgcttaaagtcgacgcctatggcaaccttctggtgtgtgcccacgggtttaacttcatacggggacccgaaactcgagagcaataccctaacaaattcatccaacgcgacgatactgagcgcttctacatactcaacacgctgtttaatctgcctgaaacgtatctcctggcatgcctggtcgactttttcaccaactgccccagatatacatcgtgcgagactggcttcaaggatggtgatctgttcatgtcttacagatcaatgttccaggacgtacgggatgccgtcgactgggttcactataagggtagtcttaaggagaagaccgtggagaatctggagaaatacgtggtaaaggatgggaaattacctctgttacttagcagaatgaaagaggtcgggaaggtattcctcgctaccaactcagattacaaatacaccgataagatcatgacatatctattcgacttcccccatggcccaaagcccggatcatcccaccggccttggcagtcttattttgacctcatacttgtagacgcaaggaaacccctgtttttcggcgagggaacggtcctgcgccaggtcgacaccaagacagggaagctcaagatcggtacgtacaccgggccactgcagcacggaatcgtgtattcaggcggatctagcgacacaatctgcgacctcttgggtgcaaagggcaaagatattctctatattggagaccatatctttggtgatatcttaaagagcaaaaaacggcagggctggcgtactttcttggtgatccccgaattagctcaggagcttcacgtgtggactgacaagagttcgctttttgaagagctccagagcctggatatttttcttgcagaactttataaacatctggattcatcgagcaatgaaaggccagatatcagtagcatccaaaggcgcattaagaaggtgacacacgatatggacatgtgctacgggatgatggggtctctgtttaggtcaggatcccgccagaccttgtttgcctctcaggtgatgcgttacgccgatttatacgccgcatcttttatcaacttgctgtattatccgttcagctacctctttagggctgcccacgtgctgatgcctcacgagtcaaccgtggagcatacacacgtggatatcaacgaaatggaatctccgttggctacccgaaatcgcacttctgtggatttcaaggacacagattataagcgacaccaattaacaaggtccatttccgaaattaagcctcctaacctgttccctttggctccccaggaaattacacactgccatgatgaggatgatgatgaggaagaggaagaggaagaagagtag

SEQ ID NO: 282725 - DNA, 2009 bp, Artificial Sequence
  derived and/or modified sequence
acgattcctgtctcttacaggaacttgccatttggattgtctccttccttaactggccagccttaaacagttcaggccattagttatttttcctagtcttgaaatttttaaaaaaattattcttaagttttcaagtatttaaagctgaggatattggtcactgagatattgcctagttagggttcggcattgtgcccaaatttgttgggcctctcagggcctgagttctctgtgctttaacaaatgagctacagttctcaagagatcagtgaagcttgtttgttgatcctgtattctcatccagaggaagtagatctttgagaatgtctaaggaaggggtgtttgtgaaccgaagtttagcaatggaaaagataaagtgttttggttttgatatggattatacccttgctgtgtacaagtccccagagtatgagtcccttggttttgagcttactgtggagagattagtttctattggctatccccaggagttgctcagctttgcttatgattctacattccctaccaggggacttgtctttgacacactgtatggaaatcttttgaaagtcgatgcctatggaaacctcttggtctgtgcacatggatttaactttataaggggaccagaaactagagaacagtatccaaataaatttatccagcgagatgatactgaaagattttacattctgaacacactattcaacctaccagagacctacctgttggcctgcctagtagatttttttactaattgtcccagatataccagttgtgaaacaggatttaaagatggggacctcttcatgtcctaccggagtatgttccaggatgtaagagatgctgttgactgggttcattacaagggctcccttaaggaaaagacagttgaaaatcttgagaagtatgtagtcaaagatggaaaactgcctttgcttctgagccggatgaaggaagtagggaaagtatttcttgctaccaacagtgactataaatatacagataaaattatgacttacctgtttgacttcccacatggccccaagcctgggagctcccatcgaccatggcagtcctactttgacttgatcttggtggatgcacggaaaccactcttttttggagaaggcacagtactgcgtcaggtggatactaaaactggcaagctgaaaattggtacctacacagggcccctacagcatggtatcgtctactcaggaggttcttctgatacgatctgtgacctgttgggagccaagggaaaagacattttgtatattggagatcacatttttggggacattttaaaatcaaagaaacggcaagggtggcgaacttttttggtgattcctgaactcgcacaggagctacatgtctggactgacaagagttcacttttcgaagaacttcagagcttggatattttcttggctgaactctacaagcatcttgacagcagtagcaatgagcgtccagacatcagttccatccagagacgtattaagaaagtaactcatgacatggacatgtgctatgggatgatgggaagcctgtttcgcagtggctcccggcagaccctttttgccagtcaagtgatgcgttatgctgacctctatgcagcatctttcatcaacctgctgtattaccctttcagctacctcttcagggctgcccatgtcttgatgcctcatgaatcaacggtggagcacacacacgtagatatcaatgagatggagtctcctcttgccacccggaaccgcacatcagtggatttcaaagacactgactacaagcggcaccagctgacacggtcaattagtgagattaaacctcccaacctcttcccactggccccccaggaaattacacactgccatgacgaagatgatgatgaagaggaggaggaggaggaagaataaggaggaaaaccaaaaccccaagcacccattaaacaagtcctggcaggactcacaggaacaaacgaggtccctgttagggttctactc

SEQ ID NO: 282726 - DNA, 1599 bp, Artificial Sequence
  derived and/or modified sequence
atgagcaaggagggcgtgttcgtgaacagaagcctggccatggagaagatcaagtgcttcggcttcgacatggactacaccctggccgtgtacaagagccccgagtacgagagcctgggcttcgagctgaccgtggagagactggtgagcatcggctacccccaggagctgctgagcttcgcctacgacagcaccttccccaccagaggcctggtgttcgacaccctgtacggcaacctgctgaaggtggacgcctacggcaacctgctggtgtgcgcccacggcttcaacttcatcagaggccccgagaccagagagcagtaccccaacaagttcatccagagagacgacaccgagagattctacatcctgaacaccctgttcaacctgcccgagacctacctgctggcctgcctggtggacttcttcaccaactgccccagatacaccagctgcgagaccggcttcaaggacggcgacctgttcatgagctacagaagcatgttccaggacgtgagagacgccgtggactgggtgcactacaagggcagcctgaaggagaagaccgtggagaacctggagaagtacgtggtgaaggacggcaagctgcccctgctgctgagcagaatgaaggaggtgggcaaggtgttcctggccaccaacagcgactacaagtacaccgacaagatcatgacctacctgttcgacttcccccacggccccaagcccggcagcagccacagaccctggcagagctacttcgacctgatcctggtggacgccagaaagcccctgttcttcggcgagggcaccgtgctgagacaggtggacaccaagaccggcaagctgaagatcggcacctacaccggccccctgcagcacggcatcgtgtacagcggcggcagcagcgacaccatctgcgacctgctgggcgccaagggcaaggacatcctgtacatcggcgaccacatcttcggcgacatcctgaagagcaagaagagacagggctggagaaccttcctggtgatccccgagctggcccaggagctgcacgtgtggaccgacaagagcagcctgttcgaggagctgcagagcctggacatcttcctggccgagctgtacaagcacctggacagcagcagcaacgagagacccgacatcagcagcatccagagaagaatcaagaaggtgacccacgacatggacatgtgctacggcatgatgggcagcctgttcagaagcggcagcagacagaccctgttcgccagccaggtgatgagatacgccgacctgtacgccgccagcttcatcaacctgctgtactaccccttcagctacctgttcagagccgcccacgtgctgatgccccacgagagcaccgtggagcacacccacgtggacatcaacgagatggagagccccctggccaccagaaacagaaccagcgtggacttcaaggacaccgactacaagagacaccagctgaccagaagcatcagcgagatcaagccccccaacctgttccccctggccccccaggagatcacccactgccacgacgaggacgacgacgaggaggaggaggaggaggaggagtag

SEQ ID NO: 282727 - protein, 2073 aa, Artificial Sequence
  derived and/or modified sequence
MVKLANPLYTEWILEAIQKIKKQKQRPSEERICHAVSTSHGLDKKTVSEQLELSVQDGSVLKVTNKGLASYKDPDNPGRFSSVKPGTFPKSAKGSRGSCNDLRNVDWNKLLRRAIEGLEEPNGSSLKNIEKYLRSQSDLTSTTNNPAFQQRLRLGAKRAVNNGRLLKDGPQYRVNYGSLDGKGAPQYPSAFPSSLPPVSLLPHEKDQPRADPIPICSFCLGTKESNREKKPEELLSCADCGSSGHPSCLKFCPELTTNVKALRWQCIECKTCSACRVQGRNADNMLFCDSCDRGFHMECCDPPLSRMPKGMWICQVCRPKKKGRKLLHEKAAQIKRRYAKPIGRPKNKLKQRLLSVTSDEGSMNAFTGRGSPGRGQKTKVCTTPSSGHAASGKDSSSRLAVTDPTRPGATTKITTTSTYISASTLKVNKKTKGLIDGLTKFFTPSPDGRRSRGEIIDFSKHYRPRKKVSQKQSCTSHVLATGTTQKLKPPPSSLPPPTPISGQSPSSQKSSTATSSPSPQSSSSQCSVPSLSSLTTNSQLKALFDGLSHIYTTQGQSRKKGHPSYAPPKRMRRKTELSSTAKSKAHFFGKRDIRSRFISHSSSSSWGMARGSIFKAIAHFKRTTFLKKHRMLGRLKYKVTPQMGTPSPGKGSLTDGRIKPDQDDDTEIKINIKQESADVNVIGNKDVVTEEDLDVFKQAQELSWEKIECESGVEDCGRYPSVIEFGKYEIQTWYSSPYPQEYARLPKLYLCEFCLKYMKSKNILLRHSKKCGWFHPPANEIYRRKDLSVFEVDGNMSKIYCQNLCLLAKLFLDHKTLYYDVEPFLFYVLTKNDEKGCHLVGYFSKEKLCQQKYNVSCIMIMPQHQRQGFGRFLIDFSYLLSRREGQAGSPEKPLSDLGRLSYLAYWKSVILEYLYHHHERHISIKAISRATGMCPHDIATTLQHLHMIDKRDGRFVIIRREKLILSHMEKLKTCSRANELDPDSLRWTPILISNAAVSEEEREAEKEAERLMEQASCWEKEEQEILSTRANSRQSPAKVQSKNKYLHSPESRPVTGERGQLLELSKESSEEEEEEEDEEEEEEEEEEEEDEEEEEEEEEEEEEENIQSSPPRLTKPQSVAIKRKRPFVLKKKRGRKRRRINSSVTTETISETTEVLNEPFDNSDEERPMPQLEPTCEIEVEEDGRKPVLRKAFQHQPGKKRQTEEEEGKDNHCFKNADPCRNNMNDDSSNLKEGSKDNPEPLKCKQVWPKGTKRGLSKWRQNKERKTGFKLNLYTPPETPMEPDEQVTVEEQKETSEGKTSPSPIRIEEEVKETGEALLPQEENRREETCAPVSPNTSPGEKPEDDLIKPEEEEEEEEEEEEEEEEEEGEEEEGGGNVEKDPDGAKSQEKEEPEISTEKEDSARLDDHEEEEEEDEEPSHNEDHDADDEDDSHMESAEVEKEELPRESFKEVLENQETFLDLNVQPGHSNPEVLMDCGVDLTASCNSEPKELAGDPEAVPESDEEPPPGEQAQKQDQKNSKEVDTEFKEGNPATMEIDSETVQAVQSLTQESSEQDDTFQDCAETQEACRSLQNYTRADQSPQIATTLDDCQQSDHSSPVSSVHSHPGQSVRSVNSPSVPALENSYAQISPDQSAISVPSLQNMETSPMMDVPSVSDHSQQVVDSGFSDLGSIESTTENYENPSSYDSTMGGSICGNGSSQNSCSYSNLTSSSLTQSSCAVTQQMSNISGSCSMLQQTSISSPPTCSVKSPQGCVVERPPSSSQQLAQCSMAANFTPPMQLAEIPETSNANIGLYERMGQSDFGAGHYPQPSATFSLAKLQQLTNTLIDHSLPYSHSAAVTSYANSASLSTPLSNTGLVQLSQSPHSVPGGPQAQATMTPPPNLTPPPMNLPPPLLQRNMAASNIGISHSQRLQTQIASKGHISMRTKSASLSPAAATHQSQIYGRSQTVAMQGPARTLTMQRGMNMSVNLMPAPAYNVNSVNMNMNTLNAMNGYSMSQPMMNSGYHSNHGYMNQTPQYPMQMQMGMMGTQPYAQQPMQTPPHGNMMYTAPGHHGYMNTGMSKQSLNGSYMRR

SEQ ID NO: 282728 - DNA, 8550 bp, Artificial Sequence
  derived and/or modified sequence
caacgacaacaacagggggacacaaaatggcggcggcttagctcctacccctggcggcggcggcagcggtggcggaggcgacggcacctcctccaggcggcagccgcagtttctcaggcagcggcagcgcccccggcaggcgcggtggcggtggcgcgcagccagatttgcctgaagacctggataatctccatttttgtcatggactgttaaaacgtttgaagttccaattctggtcttgatttcccagttaaagatgttcttcacccgaatgcagtctttcctgttggtaaaataagacaaccatcaacattgcctgtttgtctgcttttgaatctcttaaggatggatgtttgtaagatgttgcttaatacagtctggaatactctgtccatttgttgaattgtaaatgactttcaaatgtgcaagttctgttaaatacaaagagaacctctatgggtaacttttgtgttgaagaagtcatttgtcaaccatggtaaaacttgcaaacccactttatacagagtggattcttgaagctatacagaaaataaaaaagcaaaagcaaaggccctctgaagagagaatctgccatgcggtcagtacttcccatgggttggataagaagacagtctctgaacagctggaactcagtgttcaggatggctcagttctcaaagtcaccaacaaaggccttgcctcctataaggacccagacaaccctgggcgcttttcatcagttaaaccaggcacttttcctaagtcagccaaggggtctagaggatcatgtaatgatctccgcaatgtggattggaataaacttttaaggagagcaattgaaggacttgaggagccgaatggctcctccctgaagaacatagagaagtatctcagaagtcaaagtgatctcacaagcaccaccaacaacccagcctttcagcagcggctgcgactgggggccaaacgcgctgtgaataatgggaggttactgaaagacggaccgcagtacagggtcaattatgggagcttagatggcaaaggggcacctcagtatcccagtgcattcccatcctcgctcccacctgtcagccttctaccccatgagaaagaccagccccgtgctgatcccattccaatatgtagcttctgtttggggactaaagaatcaaatcgtgaaaagaaaccagaagaactcctctcttgtgcagattgtggcagtagtggacacccatcctgtttgaaattttgtcctgaattaacaacaaatgtaaaggccttaaggtggcagtgcatcgaatgcaagacatgcagtgcctgtagagtccaaggcagaaatgctgataatatgcttttttgtgattcctgtgatagaggatttcatatggaatgctgtgacccaccactttccagaatgccaaaagggatgtggatttgccaagtctgcagaccaaagaaaaagggaagaaaactacttcatgagaaagctgcacaaataaaacgacgatatgcaaaacccattggacgaccgaaaaataaattaaagcaacgattgttgtctgtaaccagtgatgaaggatccatgaatgcattcacaggaagggggtcacctggtaggggtcaaaagactaaagtctgtaccacaccttcatctggtcatgctgcatctgggaaggactcaagcagcagattggctgttacagaccccactcggcctggtgccaccaccaaaatcaccaccacctccacctacatttctgcctctacacttaaagttaacaagaaaaccaaagggctcattgatggccttactaagttttttacaccatcacctgatggtcgcagatcacgaggtgaaattatagacttttcaaagcactatcgtccaaggaaaaaggtctctcagaaacagtcatgcacttctcatgtgttggctacaggtaccacacaaaagctaaaacctccaccttcttcacttccacccccaacccccatctccggtcagagccccagttcacaaaagtccagcacggccacttcttctccctctccccagagttcttccagccagtgcagtgtgccctccctgagcagccttaccactaacagccagctgaaggcactctttgatgggctttctcatatctataccactcagggacagtctcgcaaaaagggacacccgagttatgcaccacccaaacgtatgcgtcgtaaaactgaattatcttccacggcaaaatctaaagcccacttctttggcaaaagagatattagaagtcggtttatttctcactcctcctcctctagctgggggatggctagaggaagtatttttaaagcaattgctcacttcaagcgaacaactttccttaaaaagcacaggatgctaggcagattaaaatataaagtgacccctcagatggggaccccctcaccagggaaggggagcttgacagacggaaggattaaacctgatcaggatgatgatactgaaataaaaataaacatcaaacaagaaagtgcagatgtaaatgtgattggaaacaaggatgtcgttactgaagaggatttggatgtttttaagcaggcccaggaactttcttgggagaaaatagagtgtgagagtggggtggaagactgtggccggtacccttctgtgattgaatttggtaaatatgaaatccaaacctggtactcctcgccttacccacaggaatatgcaagattaccaaagctttacctgtgtgaattctgtcttaaatatatgaaaagtaaaaatattttgctaagacactccaagaagtgtggatggtttcatcctccagcaaatgaaatttaccgaaggaaagacctttcagtatttgaggttgatgggaatatgagcaaaatttattgccaaaacctttgcttgttagccaagctcttcctggaccacaaaacgttgtattatgatgtcgagccattccttttttatgtccttacaaaaaatgatgaaaagggctgtcatctggttggatacttctctaaggaaaagctttgccagcagaagtataatgtctcctgcataatgatcatgccccagcaccaaaggcaaggatttggacggtttctcattgatttcagctatttgctttctagaagagaaggccaagcagggtctcctgaaaagcctctctccgatctgggccgtctctcctacctggcatattggaagagcgtcatcttggagtatctctaccaccaccatgagaggcacatcagcatcaaggcaattagcagagcgacgggcatgtgcccacatgacattgccaccactctgcagcacctccacatgatcgacaagagagatggcagatttgtcatcattagacgggaaaagttgatattgagccacatggaaaagctgaaaacctgttccagagccaatgaacttgatccagacagtctgaggtggaccccaattttaatttctaatgctgcagtgtctgaagaagagcgagaagctgagaaagaggctgagcggctaatggaacaagctagctgctgggagaaggaggaacaagaaatcctgtcaactagagctaacagtaggcaatcacctgcaaaagtacaatcgaaaaataaatatttgcattccccggagagccggccagtcacaggggagcgagggcagctgctggagctgtctaaagagagcagtgaagaagaagaggaggaggaggacgaggaggaggaagaagaggaggaagaagaggaagaggatgaagaggaggaagaagaggaagaagaagaagaagaagaagaaaatattcaaagctctcccccaagattgacgaaaccacagtcagttgccataaagagaaagaggccttttgtactaaagaagaaaaggggtcgtaaacgcaggaggatcaacagcagtgtaacaacagagaccatttcagagacgacagaagtactgaatgagccctttgacaactcagatgaagagaggccaatgccacagctggagcctacctgtgagattgaagtggaggaagatggcaggaagccagtcctgagaaaagcattccagcatcagcctgggaagaaaagacaaacagaggaagaggaaggaaaagacaatcattgcttcaagaatgctgacccttgtagaaacaatatgaatgatgattcaagtaacttgaaagaaggcagtaaagacaatcccgaacctctaaagtgcaaacaagtgtggccaaaaggaacaaagcgcggtctatctaagtggaggcaaaacaaagagaggaagaccggatttaaactgaatttgtacaccccgccagaaacacccatggagcctgacgagcaggtaacagtggaagaacagaaggagacttcagaaggaaaaaccagccccagtcccatcaggattgaggaggaggtcaaggaaactggggaagccctgttgcctcaagaggaaaacagaagggaagaaacatgtgcccctgtaagtccaaacacatcaccaggtgaaaaaccagaagatgatctcatcaaacctgaggaagaggaagaggaggaggaggaggaagaggaagaagaggaagaagaggaaggggaagaagaagaaggaggaggaaatgtagaaaaagatccagatggtgctaaaagccaagaaaaagaggaaccagaaatctccacggaaaaagaagactctgcacgtttggatgatcacgaagaggaggaggaagaggatgaagagccatcccacaacgaggaccatgatgccgatgacgaggatgacagccacatggagtctgccgaagtggagaaggaagagctgcccagagaaagcttcaaagaagtactggaaaaccaggagacttttttagaccttaatgtgcagcctggtcactcgaacccagaggtcttaatggactgtggcgtcgacctgacagcttcttgtaacagtgagcccaaggagcttgctggggaccctgaagctgtacccgaatctgacgaggagccacccccaggagaacaggcacagaagcaggaccaaaagaacagcaaggaagtcgatacagagttcaaagagggaaacccagcaaccatggaaatcgactctgagactgtccaggccgttcagtctttgacccaggagagcagcgaacaggacgacacctttcaggattgtgccgagactcaagaggcctgtagaagcctacagaactacacccgtgcagaccaaagtccacagattgccaccacgctcgacgattgccaacagtcggaccacagtagcccagtttcatccgtccactcccatcctggccagtccgtacgttctgtcaacagcccaagtgtccctgctctggaaaacagctacgcccaaatcagcccagatcaaagtgccatctcagtgccatctctgcagaacatggaaaccagtcccatgatggatgtcccatcagtttcagatcattcacagcaagtcgtagacagtggatttagtgacctgggcagtatcgagagcacaactgagaactacgaaaacccaagcagctacgattctactatgggaggcagcatctgtggaaacggctcttcacagaacagctgctcctatagcaacctcacctccagcagtctgacacagagcagctgtgctgtcacccagcagatgtccaacatcagcgggagctgcagcatgctgcagcaaaccagcatcagctcccctccgacctgcagcgtcaagtctcctcaaggctgtgtggtggagaggcctccgagcagcagccagcagctggctcagtgcagcatggctgctaacttcaccccacccatgcagctggctgaaatccccgagacgagcaacgccaacattggcttatacgagcgaatgggtcagagtgattttggggctgggcattacccgcagccgtcagccaccttcagccttgccaaactgcagcagttaactaatacacttattgatcattcattgccttacagccattccgctgctgtgacttcctatgcaaacagtgcctctttgtccacaccattaagtaacacagggcttgttcaactttctcagtctccacactccgtccctgggggaccccaagcacaagctaccatgaccccaccccccaacctgactcctcctccaatgaatctgccgccgcctcttttgcaacggaacatggctgcatcaaatattggcatctctcacagccaaagactgcaaacccagattgccagcaagggccacatctccatgagaaccaagtcagcgtctctgtcaccagccgctgccacccatcagtcacaaatctatgggcgctcccagactgtagccatgcagggtcctgcacggactttaacgatgcaaagaggcatgaacatgagtgtgaacctgatgccagcgccagcctacaatgtcaactctgtgaacatgaacatgaacactctcaacgccatgaatgggtacagcatgtcccagccaatgatgaacagtggctaccacagcaatcatggctatatgaatcaaacgccccaataccctatgcagatgcagatgggcatgatgggcacccagccatatgcccagcagccaatgcagaccccaccccacggtaacatgatgtacacggcccccggacatcacggctacatgaacacaggcatgtccaaacagtctctcaatggctcctacatgagaaggtagacaacgtgggcagtccacaaaacctacggggcatcactattggattgatctgcacaaatacctttgaagagtacgatttcaaaaccagcaattggtgtgaatgcaaaaacatttgttggcaccatttatttaaaaaaaaaaaaagctgtatgcagcagaaagccttatacaagttgtttttctttttttcctttttcttttttttggtaccttcatttctgttacttttatataaaattctctgcaaaggaaggcctctctttggactacaatttggaggcagccacttgttgtgcctgcttctgttaaacaatgtggatatcaagcccccccaaattatctgttttaatattgaacctagagctttttttttcccttccctgtccactccatgtaaatgcctttagcatttcagttattgtatattttgtttaaggtgacacttcagcatgccgctaatgtctttgttagtgacagtgcattttgtagtactgtacaagtgttgtgctaacagtaagccatttcttaagttttttgccttgattagggtgccctaatttgagggttttaaaaaaaactatatttttgttaattataaaactgtaaagagctataaaagctattcccatttggttagtcaaaagggttttattgctaaatgtttggtgtaaagttgagacccttttccattttggtgacagatttctttggggaaaaaaggcagctttctgttttataaatgcagacttctgtttattgaatgaagcatatctcagtgtttatctgtcaggttttgaaacatttcatatatgtccaaatacttggcaggatttaaaaaaaaatagtgaatttggtgtaaagttgctattttatggaaatgcctctaactttacattttcattccatctgtagatttttctatctttataaaatattggagttattttttaaggaaaaatagaaaagtagcttgtgaatagctcaaactaagcttacaaatcgcatgtaaaaaagcaaaaaagttatttgtgtctgtttatattgcttccttttttgtagcctttgtacctgtacagggtgacagtaagggccaagcaggagaggcgtaatccttgtataaaataggatccagcgacactcttgtatttatctgttctctttttagtcagtcacttcaaaaaaacaaaaaacaaacaaaaaaaagctgtacattttaacataaaataaattatgatgagccatttttagcctcttgtgtcctgtcatattatgattgatagagaatgaccaatggaactgtatcatgtgtcacgcctcagaacacatacacattttgggaaaataaattatttagtgtaaattggagttatgggattttctgatttgttttgactttgggggaggggttggcaataaataagagtaatatctaataaaaccatcacatataccaaatacctatttaataaattaatttataatggattttaatgcttttcatgaaagtttattttatgcgagtgcataccttctgtatgccaatcattgtctttaaaataaagtgaaattgtttttttcttttggactttgatcttcatttgcaaagagatcccgcacaaatatccagctgcctcactcgcacagtctgtagaaacatccctccaagcctcgcaccagggtagcaaacttcctttttataaagattcataccaaaaaaagcacccaatttgggattgtatgtttgaaaaatcattttctttttaaaaagtgtgaacgttttgctctgttgtgaatgattaattgtatgttttctttagagtctaaagtttagaccc

SEQ ID NO: 282729 - DNA, 42 bp, Artificial Sequence
  derived and/or modified sequence
atggtgaaactcgctaaccccctctacacggagtggatctag

SEQ ID NO: 282730 - DNA, 42 bp, Artificial Sequence
  derived and/or modified sequence
atggtgaagctggccaaccccctgtacacagagtggatctag

SEQ ID NO: 282731 - DNA, 42 bp, Artificial Sequence
  derived and/or modified sequence
atggtgaagctggccaacccactctacacggaatggatttag

SEQ ID NO: 282732 - DNA, 42 bp, Artificial Sequence
  derived and/or modified sequence
atggtgaagctggccaaccccctgtacaccgagtggatctag

SEQ ID NO: 282733 - DNA, 6222 bp, Artificial Sequence
  derived and/or modified sequence
atggtaaaattggccaacccattgtacacagagtggattctagaggccatccagaagatcaaaaagcagaaacagaggccaagcgaggaaagaatctgtcacgcagtgtctacgtcacatggacttgataagaagaccgtgtccgagcagcttgaactgagtgtgcaggatggtagtgtgctgaaagttactaataaagggttggcctcttataaggacccagataatcctggccgattttcttctgtgaagccagggacctttccgaaatcagctaaaggatctcgcgggagctgcaacgacttaagaaacgttgactggaataagttactgagacgggcaatagagggtctggaggagcctaatgggagttcacttaagaacatagagaaatatctccgctcccaaagcgatcttacaagcaccaccaataatccagcattccagcagcggctcaggctgggcgctaagcgggcggtgaataacggccggctgttaaaagatggaccccaatacagagtgaattacggttccctggacggcaagggggcaccccagtacccctctgcattcccctcttcgctcccccctgtcagcctgctgcctcacgaaaaagaccagcctcgggccgaccccatacctatttgttccttctgcttaggaaccaaggagtcaaatcgagagaagaagccagaggaactgctctcgtgcgcagactgcggtagcagcggccaccctagctgccttaagttttgcccagagctgaccaccaacgtaaaggcccttagatggcagtgtatcgaatgtaagacatgcagcgcatgtcgcgtgcagggccggaatgctgacaatatgctgttttgtgactcctgtgatagagggttccacatggaatgctgtgaccccccactgtctcgcatgcctaaggggatgtggatctgccaggtttgtaggcccaagaaaaagggacgaaagctcttgcatgagaaagccgcacagatcaaacggcgctatgcaaaaccaattggacgacctaagaacaagctcaagcaaagacttttatcagtaacaagtgatgaggggtctatgaatgctttcacaggccgcggatctccgggacgcggccagaagactaaggtgtgtactactcccagctcagggcatgctgcctcaggtaaggacagctcttcgcgcctcgcagtcactgaccccaccaggcccggggccacgaccaaaatcaccaccacatccacctatatcagtgcctccacactcaaagtcaataagaaaaccaaggggttaattgacgggctgacaaaattcttcacaccgtcaccagatggtcggaggtccagaggggaaataattgacttttcaaaacactatagacctagaaagaaggtctcgcagaaacagtcctgtacaagccacgttttggcaaccggcactacccaaaaattgaagcccccgccttcttcactgccaccacctacacctatcagcggccagagccccagttcgcagaaatcgagcactgctacatcttccccatcccctcagtcctcctcatctcagtgctccgtgcctagtctgagttccctgaccactaacagccaacttaaagctctgtttgatggtctctcccatatctacaccactcagggacagtcacgtaaaaaaggtcatcccagttatgccccacccaagcgtatgcgccgcaagacggagctcagtagtacagccaagtcaaaggctcatttcttcgggaagcgagacataagatctcgattcatctctcactcttccagcagctcctggggcatggcccgcggcagtattttcaaggcaattgctcacttcaagcgaaccacatttctcaagaagcaccgcatgctgggtcggctcaagtataaagtgactccacagatgggcaccccttcacctggcaagggatcactgaccgacggccggattaaaccagaccaagatgatgataccgagattaagattaatattaagcaggaatcagcagacgtcaatgttatcggcaacaaagatgtggttacggaagaggatttggatgtgtttaagcaagcacaggaactgtcatgggagaagattgagtgtgaatcgggtgttgaagattgtggcagatacccatccgtcatcgagtttggcaaatatgagatccagacatggtattcctcaccctacccccaagaatacgcccgcctgcctaagctgtacctctgcgagttctgcctaaagtatatgaaatctaagaatatactgttgcgtcacagcaaaaaatgcgggtggtttcatccccccgctaacgaaatatatcgacgcaaggacctctctgtcttcgaagtggatggtaacatgtccaagatatactgtcaaaacctttgcctccttgcgaaactgttcctggaccacaagacactttactacgatgtcgagcccttcctcttttacgtgcttactaaaaatgacgaaaaagggtgccacctggtgggctactttagcaaggaaaagctatgtcaacaaaaatataacgttagctgcattatgattatgcctcagcaccagaggcaggggtttggacgatttctaattgacttttcctatctcctgtcccgcagggagggccaggcaggcagtcccgagaaacccctgagtgatctgggtaggctctcatatctggcatattggaagtccgtcatccttgagtatttgtaccaccatcacgagcggcatatatcgatcaaggccatttcccgcgccactgggatgtgcccccacgacattgcaaccactttgcagcaccttcatatgatcgataagcgggatggacgtttcgtgataatccgaagggaaaagcttatcctgagtcacatggagaaactgaagacctgttcacgggccaatgaactcgatcccgactccctccgctggacccccattctaatctcaaatgcggctgtcagcgaggaggaaagggaagccgagaaggaggccgagcggttaatggaacaggcctcatgttgggagaaggaggaacaggagattctgagtactcgcgcaaattcaagacagtccccagcgaaagtgcagtccaagaacaagtacctgcacagtcctgaaagtcggccggtgaccggggaacgcggccaactgctggagttgtccaaggagtctagcgaagaggaggaggaagaggaggacgaagaagaggaggaggaggaagaggaggaggaggaagatgaggaggaagaggaagaagaagaggaggaggaggaagaggagaacatccaatcgtctccacctagactgaccaagccccagtctgtggccattaaaagaaagagaccatttgttttgaagaagaagagagggcgcaagaggaggaggatcaactcctccgtgaccaccgaaactatttcagaaaccactgaggttctcaacgagcctttcgataattccgacgaagagcgtccaatgcctcagctcgagcccacctgtgagattgaggtggaggaagacggcagaaaacccgtcctccggaaagcgttccagcatcagcccgggaagaagaggcagacagaggaggaggaagggaaggataatcactgtttcaagaacgctgacccatgtcgaaataatatgaatgacgactcttctaatctgaaggagggtagcaaggataacccagagccactgaaatgtaaacaggtctggccaaagggcacaaagcgcgggctgagcaagtggcgacaaaataaagaacgtaagacagggtttaaacttaacctctacactccccccgagactcctatggaacccgacgagcaagtcactgtggaggagcagaaggagacttctgagggaaagacatctccttcaccaatccgtatcgaggaagaagtgaaggagacaggggaagcacttttaccacaagaggaaaatcgtcgggaagaaacctgcgccccagtgtctcccaacaccagtcccggcgagaagcctgaggacgaccttattaagcccgaagaggaagaagaggaagaagaagaggaggaagaagaggaagaagaggaagagggcgaggaagaggagggaggcggcaacgtggaaaaagaccctgacggcgccaaaagccaggaaaaagaggagcccgaaatctccactgagaaagaggactccgcccgattggacgatcacgaagaagaagaagaggaagatgaagaacccagtcataacgaagatcacgatgctgatgatgaggacgactcccacatggagtccgctgaagtagagaaagaagagctcccccgggaaagcttcaaagaagtgttagagaaccaggagacatttctggatctcaacgtgcagcctgggcactccaaccctgaagtgttgatggattgcggtgtcgatctaactgccagctgtaacagcgaacctaaagagctcgccggagatccagaggccgtgccagagtccgacgaagagcctcccccgggcgaacaggcacagaagcaagaccagaaaaactcgaaggaggtagacacggagtttaaagagggaaaccctgcaaccatggaaattgatagcgagacagtccaggcagtgcagtccttgacccaggagtcatcggagcaggacgatacgttccaggactgcgcagagacccaggaagcctgccgatcactccagaattatacccgcgccgaccagtctccccaaattgcgacaacactcgacgattgccaacagtctgaccactctagccctgtgagctcagtgcattcccaccccggacaaagcgtacgaagcgttaatagtccgtccgtcccggcactggagaacagctacgcgcaaatttcccccgaccagtccgctatctcagtcccatcactgcaaaatatggaaacaagtcctatgatggatgttccctctgtctccgaccactctcagcaggtggttgacagtgggttcagcgatttaggttctatagaatctactactgagaattatgagaaccctagtagctacgatagtaccatgggggggtccatttgtggcaatggttcctcccagaactcttgtagctattctaatctgactagttcttcacttacccagagttcatgtgccgtgacccagcagatgagtaacataagcggttcttgcagcatgcttcaacagactagtatatcgagtcctcctacatgttccgtcaagagcccacaaggctgtgtcgtggaacgcccaccatcaagcagccaacaactggcccagtgctctatggcagctaacttcacgccccccatgcagctggctgagattcctgagacttccaacgcgaatatcgggttgtacgaaagaatgggacagagtgattttggcgccggccattacccacagccctctgcgaccttcagtctcgctaaactgcaacaactgaccaataccttgatagaccatagcctgccctactcccacagcgctgcagtgacaagctacgcgaattccgcttcactctccacaccactatcgaacactggactcgtgcaattgtcccagtcaccacactcagtgcctggaggcccacaggcccaggctaccatgacaccccctccaaaccttacgccccccccgatgaatctcccacctccactgctgcaacggaatatggccgcgtctaatattggaatttctcacagccaaagattgcagactcaaatagcatctaagggccacatctcaatgcgcacgaagtcagccagcctgtctcccgctgcggctacacaccagtctcaaatctatggacgatcccagactgtcgcaatgcaaggcccggctcgaacgctaaccatgcagcgaggtatgaatatgagtgtgaacctgatgcccgctcccgcatacaacgtgaacagcgtcaatatgaacatgaacacactgaatgccatgaacgggtattcaatgagccagcctatgatgaattctggctatcactcgaatcacggttatatgaaccaaactcctcagtaccctatgcagatgcagatgggcatgatgggcactcagccttacgcacaacagcccatgcagacaccaccgcacggtaacatgatgtatactgcccctgggcatcacggctacatgaacacagggatgagcaaacagagcctgaatggcagctatatgagaaggtag

SEQ ID NO: 282734 - DNA, 8287 bp, Artificial Sequence
  derived and/or modified sequence
gacaacaacagggggacacaaaatggcggcggcttagctcctacccctggcggcggcggcagcggtggcggaggcgacggcacctcctccaggcggcagccgcagtttctcaggcagcggcagcgcccccggcaggcgcggtggcggtggcgcgcagccagatttgcctgaagacctggataatctccatttttgtcatggactgttaaaacgtttgaagttccaattctggtcttgatttcccagttaaagatgttcttcacccgaatgcagtctttcctgttggtaaaataagacaaccatcaacattgcctgtttgtctgcttttgaatctcttaaggatggatgtttgtaagatgttgcttaatacagtctggaatactctgtccatttgttgaattgtaaatgactttcaaatgtgcaagttctgttaaatacaaagagaacctctatgggtaacttttgtgttgaagaagtcatttgtcaaccatggtaaaacttgcaaacccactttatacagagtggattcttgaagctatacagaaaataaaaaagcaaaagcaaaggccctctgaagagagaatctgccatgcggtcagtacttcccatgggttggataagaagacagtctctgaacagctggaactcagtgttcaggatggctcagttctcaaagtcaccaacaaaggccttgcctcctataaggacccagacaaccctgggcgcttttcatcagttaaaccaggcacttttcctaagtcagccaaggggtctagaggatcatgtaatgatctccgcaatgtggattggaataaacttttaaggagagcaattgaaggacttgaggagccgaatggctcctccctgaagaacatagagaagtatctcagaagtcaaagtgatctcacaagcaccaccaacaacccagcctttcagcagcggctgcgactgggggccaaacgcgctgtgaataatgggaggttactgaaagacggaccgcagtacagggtcaattatgggagcttagatggcaaaggggcacctcagtatcccagtgcattcccatcctcgctcccacctgtcagccttctaccccatgagaaagaccagccccgtgctgatcccattccaatatgtagcttctgtttggggactaaagaatcaaatcgtgaaaagaaaccagaagaactcctctcttgtgcagattgtggcagtagtggacacccatcctgtttgaaattttgtcctgaattaacaacaaatgtaaaggccttaaggtggcagtgcatcgaatgcaagacatgcagtgcctgtagagtccaaggcagaaatgctgataatatgcttttttgtgattcctgtgatagaggatttcatatggaatgctgtgacccaccactttccagaatgccaaaagggatgtggatttgccaagtctgcagaccaaagaaaaagggaagaaaactacttcatgagaaagctgcacaaataaaacgacgatatgcaaaacccattggacgaccgaaaaataaattaaagcaacgattgttgtctgtaaccagtgatgaaggatccatgaatgcattcacaggaagggggtcacctggtaggggtcaaaagactaaagtctgtaccacaccttcatctggtcatgctgcatctgggaaggactcaagcagcagattggctgttacagaccccactcggcctggtgccaccaccaaaatcaccaccacctccacctacatttctgcctctacacttaaagttaacaagaaaaccaaagggctcattgatggccttactaagttttttacaccatcacctgatggtcgcagatcacgaggtgaaattatagacttttcaaagcactatcgtccaaggaaaaaggtctctcagaaacagtcatgcacttctcatgtgttggctacaggtaccacacaaaagctaaaacctccaccttcttcacttccacccccaacccccatctccggtcagagccccagttcacaaaagtccagcacggccacttcttctccctctccccagagttcttccagccagtgcagtgtgccctccctgagcagccttaccactaacagccagctgaaggcactctttgatgggctttctcatatctataccactcagggacagtctcgcaaaaagggacacccgagttatgcaccacccaaacgtatgcgtcgtaaaactgaattatcttccacggcaaaatctaaagcccacttctttggcaaaagagatattagaagtcggtttatttctcactcctcctcctctagctgggggatggctagaggaagtatttttaaagcaattgctcacttcaagcgaacaactttccttaaaaagcacaggatgctaggcagattaaaatataaagtgacccctcagatggggaccccctcaccagggaaggggagcttgacagacggaaggattaaacctgatcaggatgatgatactgaaataaaaataaacatcaaacaagaaagtgcagatgtaaatgtgattggaaacaaggatgtcgttactgaagaggatttggatgtttttaagcaggcccaggaactttcttgggagaaaatagagtgtgagagtggggtggaagactgtggccggtacccttctgtgattgaatttggtaaatatgaaatccaaacctggtactcctcgccttacccacaggaatatgcaagattaccaaagctttacctgtgtgaattctgtcttaaatatatgaaaagtaaaaatattttgctaagacactccaagaagtgtggatggtttcatcctccagcaaatgaaatttaccgaaggaaagacctttcagtatttgaggttgatgggaatatgagcaaaatttattgccaaaacctttgcttgttagccaagctcttcctggaccacaaaacgttgtattatgatgtcgagccattccttttttatgtccttacaaaaaatgatgaaaagggctgtcatctggttggatacttctctaaggaaaagctttgccagcagaagtataatgtctcctgcataatgatcatgccccagcaccaaaggcaaggatttggacggtttctcattgatttcagctatttgctttctagaagagaaggccaagcagggtctcctgaaaagcctctctccgatctgggccgtctctcctacctggcatattggaagagcgtcatcttggagtatctctaccaccaccatgagaggcacatcagcatcaaggcaattagcagagcgacgggcatgtgcccacatgacattgccaccactctgcagcacctccacatgatcgacaagagagatggcagatttgtcatcattagacgggaaaagttgatattgagccacatggaaaagctgaaaacctgttccagagccaatgaacttgatccagacagtctgaggtggaccccaattttaatttctaatgctgcagtgtctgaagaagagcgagaagctgagaaagaggctgagcggctaatggaacaagctagctgctgggagaaggaggaacaagaaatcctgtcaactagagctaacagtaggcaatcacctgcaaaagtacaatcgaaaaataaatatttgcattccccggagagccggccagtcacaggggagcgagggcagctgctggagctgtctaaagagagcagtgaagaagaagaggaggaggaggacgaggaggaggaagaagaggaggaagaagaggaagaggatgaagaggaggaagaagaggaagaagaagaagaagaagaagaaaatattcaaagctctcccccaagattgacgaaaccacagtcagttgccataaagagaaagaggccttttgtactaaagaagaaaaggggtcgtaaacgcaggaggatcaacagcagtgtaacaacagagaccatttcagagacgacagaagtactgaatgagccctttgacaactcagatgaagagaggccaatgccacagctggagcctacctgtgagattgaagtggaggaagatggcaggaagccagtcctgagaaaagcattccagcatcagcctgggaagaaaagacaaacagaggaagaggaaggaaaagacaatcattgcttcaagaatgctgacccttgtagaaacaatatgaatgatgattcaagtaacttgaaagaaggcagtaaagacaatcccgaacctctaaagtgcaaacaagtgtggccaaaaggaacaaagcgcggtctatctaagtggaggcaaaacaaagagaggaagaccggatttaaactgaatttgtacaccccgccagaaacacccatggagcctgacgagcaggtaacagtggaagaacagaaggagacttcagaaggaaaaaccagccccagtcccatcaggattgaggaggaggtcaaggaaactggggaagccctgttgcctcaagaggaaaacagaagggaagaaacatgtgcccctgtaagtccaaacacatcaccaggtgaaaaaccagaagatgatctcatcaaacctgaggaagaggaagaggaggaggaggaggaagaggaagaagaggaagaagaggaaggggaagaagaagaaggaggaggaaatgtagaaaaagatccagatggtgctaaaagccaagaaaaagaggaaccagaaatctccacggaaaaagaagactctgcacgtttggatgatcacgaagaggaggaggaagaggatgaagagccatcccacaacgaggaccatgatgccgatgacgaggatgacagccacatggagtctgccgaagtggagaaggaagagctgcccagagaaagcttcaaagaagtactggaaaaccaggagacttttttagaccttaatgtgcagcctggtcactcgaacccagaggtcttaatggactgtggcgtcgacctgacagcttcttgtaacagtgagcccaaggagcttgctggggaccctgaagctgtacccgaatctgacgaggagccacccccaggagaacaggcacagaagcaggaccaaaagaacagcaaggaagtcgatacagagttcaaagagggaaacccagcaaccatggaaatcgactctgagactgtccaggccgttcagtctttgacccaggagagcagcgaacaggacgacacctttcaggattgtgccgagactcaagaggcctgtagaagcctacagaactacacccgtgcagaccaaagtccacagattgccaccacgctcgacgattgccaacagtcggaccacagtagcccagtttcatccgtccactcccatcctggccagtccgtacgttctgtcaacagcccaagtgtccctgctctggaaaacagctacgcccaaatcagcccagatcaaagtgccatctcagtgccatctctgcagaacatggaaaccagtcccatgatggatgtcccatcagtttcagatcattcacagcaagtcgtagacagtggatttagtgacctgggcagtatcgagagcacaactgagaactacgaaaacccaagcagctacgattctactatgggaggcagcatctgtggaaacggctcttcacagaacagctgctcctatagcaacctcacctccagcagtctgacacagagcagctgtgctgtcacccagcagatgtccaacatcagcgggagctgcagcatgctgcagcaaaccagcatcagctcccctccgacctgcagcgtcaagtctcctcaaggctgtgtggtggagaggcctccgagcagcagccagcagctggctcagtgcagcatggctgctaacttcaccccacccatgcagctggctgaaatccccgagacgagcaacgccaacattggcttatacgagcgaatgggtcagagtgattttggggctgggcattacccgcagccgtcagccaccttcagccttgccaaactgcagcagttaactaatacacttattgatcattcattgccttacagccattccgctgctgtgacttcctatgcaaacagtgcctctttgtccacaccattaagtaacacagggcttgttcaactttctcagtctccacactccgtccctgggggaccccaagcacaagctaccatgaccccaccccccaacctgactcctcctccaatgaatctgccgccgcctcttttgcaacggaacatggctgcatcaaatattggcatctctcacagccaaagactgcaaacccagattgccagcaagggccacatctccatgagaaccaagtcagcgtctctgtcaccagccgctgccacccatcagtcacaaatctatgggcgctcccagactgtagccatgcagggtcctgcacggactttaacgatgcaaagaggcatgaacatgagtgtgaacctgatgccagcgccagcctacaatgtcaactctgtgaacatgaacatgaacactctcaacgccatgaatgggtacagcatgtcccagccaatgatgaacagtggctaccacagcaatcatggctatatgaatcaaacgccccaataccctatgcagatgcagatgggcatgatgggcacccagccatatgcccagcagccaatgcagaccccaccccacggtaacatgatgtacacggcccccggacatcacggctacatgaacacaggcatgtccaaacagtctctcaatggctcctacatgagaaggtagacaacgtgggcagtccacaaaacctacggggcatcactattggattgatctgcacaaatacctttgaagagtacgatttcaaaaccagcaattggtgtgaatgcaaaaacatttgttggcaccatttatttaaaaaaaaaaaaagctgtatgcagcagaaagccttatacaagttgtttttctttttttcctttttcttttttttggtaccttcatttctgttacttttatataaaattctctgcaaaggaaggcctctctttggactacaatttggaggcagccacttgttgtgcctgcttctgttaaacaatgtggatatcaagcccccccaaattatctgttttaatattgaacctagagctttttttttcccttccctgtccactccatgtaaatgcctttagcatttcagttattgtatattttgtttaaggtgacacttcagcatgccgctaatgtctttgttagtgacagtgcattttgtagtactgtacaagtgttgtgctaacagtaagccatttcttaagttttttgccttgattagggtgccctaatttgagggttttaaaaaaaactatatttttgttaattataaaactgtaaagagctataaaagctattcccatttggttagtcaaaagggttttattgctaaatgtttggtgtaaagttgagacccttttccattttggtgacagatttctttggggaaaaaaggcagctttctgttttataaatgcagacttctgtttattgaatgaagcatatctcagtgtttatctgtcaggttttgaaacatttcatatatgtccaaatacttggcaggatttaaaaaaaaatagtgaatttggtgtaaagttgctattttatggaaatgcctctaactttacattttcattccatctgtagatttttctatctttataaaatattggagttattttttaaggaaaaatagaaaagtagcttgtgaatagctcaaactaagcttacaaatcgcatgtaaaaaagcaaaaaagttatttgtgtctgtttatattgcttccttttttgtagcctttgtacctgtacagggtgacagtaagggccaagcaggagaggcgtaatccttgtataaaataggatccagcgacactcttgtatttatctgttctctttttagtcagtcacttcaaaaaaacaaaaaacaaacaaaaaaaagctgtacattttaacataaaataaattatgatgagccatttttagcctcttgtgtcctgtcatattatgattgatagagaatgaccaatggaactgtatcatgtgtcacgcctcagaacacatacacattttgggaaaataaattatttagtgtaaattggagttatgggattttctgatttgttttgactttgggggaggggttggcaataaataagagtaatatctaataaaaccatcacatataccaaatacctatttaataaattaatttataatggattttaatgcttttcatgaaagtttattttatgcgagtgcataccttctgtatgccaatcattgtctttaaaataaagtgaaattgtttttt

SEQ ID NO: 282735 - DNA, 6222 bp, Artificial Sequence
  derived and/or modified sequence
atggtgaagctggccaaccccctgtacacagagtggatcctggaggccatccagaagatcaagaagcagaagcagaggcccagcgaggagcgcatctgccacgctgtgtccaccagccacggcctggacaagaagacagtgtctgagcagctggagctgtctgtgcaggacggctctgtgctgaaggtgaccaacaagggcctggccagctacaaggaccctgacaaccctggccgcttcagctctgtgaagccaggcaccttccccaagagcgccaagggcagccggggcagctgcaatgacctgagaaatgtggactggaacaagctgctgcggcgggccatcgagggcctggaggagcccaacggcagcagcctgaagaacatcgagaagtacctgcggagccagagcgacctgaccagcaccaccaacaacccagccttccagcagaggctgcggctgggcgccaagagagctgtgaacaacggccgcctgctgaaggatggcccccagtacagagtgaactacggcagcctggatggcaagggggccccccagtaccccagcgccttccccagcagcctgccccctgtgtccctgctgccccatgagaaggaccagcccagggctgaccccatccccatctgcagcttctgcctgggcaccaaggagagcaaccgggagaagaagccagaggagctgctgagctgtgccgactgtggcagcagcggccaccccagctgcctgaagttctgcccagagctgaccaccaacgtgaaggccctgcgctggcagtgcatcgagtgcaagacctgcagcgcctgccgggtgcagggcagaaatgctgacaacatgctgttctgtgacagctgtgaccggggcttccacatggagtgctgtgacccccccctgagcaggatgcccaagggcatgtggatctgccaggtgtgccggcccaagaagaagggcaggaagctgctgcacgagaaggccgcccagatcaagagaagatatgccaagcccatcggccggcccaagaacaagctgaagcagaggctgctgtctgtgaccagtgatgagggctccatgaatgccttcaccggccggggcagccctggccggggccagaagaccaaggtgtgcaccacccccagcagcggccatgctgccagcggcaaggacagcagcagccggctggccgtgacagaccccaccaggcctggggccaccaccaagatcaccaccaccagcacctacatcagcgccagcaccctgaaggtgaacaagaagaccaagggcctgattgatggcctgaccaagttcttcacccccagcccagatggaagaagaagcagaggagagatcatcgacttcagcaagcactaccggcccaggaagaaggtgtcccagaagcagagctgcaccagccacgtgctggccaccggcaccacccagaagctgaagcccccacccagcagcctgcccccacccacccccatcagcggccagagccccagcagccagaagagcagcacagccaccagcagccccagcccccagagcagcagcagccagtgcagcgtgcccagcctgagcagcctgaccaccaacagccagctgaaggccctgtttgatggcctgagccacatctacaccacccagggccagagcaggaagaagggccaccccagctatgccccacccaagaggatgaggaggaagacagagctgagcagcacagccaagagcaaggcccacttcttcggcaagagggacatccgcagccgcttcatcagccacagcagcagcagctcctggggcatggcccggggcagcatcttcaaggccatcgcccacttcaagaggaccaccttcctgaagaagcacaggatgctgggccgcctgaagtacaaggtgaccccccagatgggcacccccagccctgggaagggcagcctgacagatggccgcatcaagccagaccaggatgatgacacagagatcaagatcaacatcaagcaggagagcgcagatgtgaatgtcatcggcaacaaggatgtggtgacagaggaggacctggatgtgttcaagcaggcccaggagctgtcctgggagaagattgaatgtgagagcggcgtggaggactgtggccgctaccccagcgtgattgaatttgggaagtatgagatccagacctggtacagcagcccctacccccaggagtatgcccggctgcccaagctgtacctgtgtgagttctgcctgaagtacatgaagagcaagaacatcctgctgcggcacagcaagaagtgtggctggttccaccccccagccaatgagatctacagaaggaaggacctgtctgtgtttgaggtggatggcaacatgagcaagatctactgccagaacctgtgcctgctggccaagctgttcctggaccacaagaccctgtactatgatgtggagcccttcctgttctacgtgctgaccaagaatgatgagaagggctgccacctggtgggctacttcagcaaggagaagctgtgccagcagaagtacaacgtgtcctgcatcatgatcatgccccagcaccagaggcagggcttcggccgcttcctgattgacttctcctacctgctgagccggcgggagggccaggccggcagccctgagaagcccctgagtgacctgggccgcctgagctacctggcctactggaagagcgtcatcctggagtacctgtaccaccaccacgagcggcacatcagcatcaaggccatcagccgggccaccggcatgtgcccccatgacatcgccaccaccctgcagcacctgcacatgattgacaagagagatggccgctttgtgatcatcagaagagagaagctgatcctgagccacatggagaagctgaagacctgcagccgggccaatgagctggaccctgacagcctgcgctggacccccatcctgatcagcaatgctgctgtgtctgaggaggagcgggaggccgagaaggaggccgagcggctgatggagcaggccagctgctgggagaaggaggagcaggagatcctgagcacccgggccaacagccggcagagccctgccaaggtgcagagcaagaacaagtacctgcacagccctgagagcaggcctgtgactggagagcggggccagctgctggagctgagcaaggagagcagcgaggaggaggaggaggaggaggatgaggaggaggaggaggaggaggaggaggaggaggaggatgaggaggaggaggaggaggaggaggaggaggaggaggaggagaacatccagagcagccccccccggctgaccaagccccagagcgtggccatcaagaggaagaggccctttgtgctgaagaagaagaggggcaggaagagaagacgcatcaacagctctgtgaccacagagaccatcagcgagaccacagaggtgctgaatgagccctttgacaacagtgatgaggagcggcccatgccccagctggagcccacctgtgaaattgaggtggaggaggatggcaggaagcctgtgctgaggaaggccttccagcaccagcccgggaagaagaggcagacagaggaggaggagggcaaggacaaccactgcttcaagaatgctgacccctgcaggaacaacatgaatgatgacagcagcaacctgaaggagggcagcaaggacaaccctgagcccctgaagtgcaagcaggtgtggcccaagggcaccaagaggggcctgagcaagtggaggcagaacaaggagaggaagacaggcttcaagctgaacctgtacaccccacctgagacccccatggagccagatgagcaggtgacagtggaggagcagaaggagaccagcgagggcaagaccagccccagccccatcagaattgaggaggaggtgaaggagaccggggaggccctgctgccccaggaggagaacagaagagaggagacctgtgcccctgtgagccccaacaccagccctggagagaagccagaagatgacctgatcaagccagaggaggaggaggaggaggaggaggaggaggaggaggaggaggaggaggaggagggggaggaggaggagggcggcggcaatgtggagaaggaccctgatggagccaagagccaggagaaggaggagcctgagatcagcacagagaaggaggacagcgcccggctggatgaccacgaggaggaggaggaggaggatgaggagcccagccacaatgaagatcatgatgctgatgatgaagatgacagccacatggagagcgctgaggtggagaaggaggagctgccccgggagagcttcaaggaggtgctggagaaccaggagaccttcctggacctgaatgtgcagcccggccacagcaaccctgaggtgctgatggactgtggggtggacctgacagccagctgcaacagcgagcccaaggagctggccggggaccctgaggccgtgcctgagagtgatgaggagcccccacctggagagcaggcccagaagcaggaccagaagaacagcaaggaggtggacacagagttcaaggagggcaacccagccaccatggagattgattctgaaacagtgcaggccgtgcagagcctgacccaggagagcagcgagcaggatgacaccttccaggactgtgccgagacccaggaggcctgccgcagcctgcagaactacaccagggctgaccagagcccccagatcgccaccaccctggatgactgccagcagagcgaccacagcagccctgtgtcctctgtgcacagccaccctggccagagcgtgcgctctgtgaacagccccagcgtgcctgccctggagaacagctatgcccagatcagcccagaccagagcgccatctctgtgcccagcctgcagaacatggagaccagccccatgatggatgtgcccagcgtgtctgaccacagccagcaggtggtggacagcggcttcagtgacctgggcagcattgagagcaccacagagaactatgagaaccccagcagctatgacagcaccatgggcggcagcatctgtggaaatggcagcagccagaacagctgcagctacagcaacctgaccagcagcagcctgacccagagcagctgtgctgtgacccagcagatgagcaacatcagcggcagctgcagcatgctgcagcagaccagcatcagcagcccccccacctgcagcgtgaagagcccccagggctgtgtggtggagaggcctcccagcagcagccagcagctggcccagtgcagcatggccgccaacttcaccccacccatgcagctggccgagatccctgagaccagcaatgccaacatcggcctgtatgaaagaatgggccagagcgactttggagctggccactacccccagcccagcgccaccttcagcctggccaagctgcagcagctgaccaacaccctgattgaccacagcctgccctacagccacagcgctgctgtgaccagctatgccaacagcgccagcctgagcacccccctgagcaacacaggcctggtgcagctgagccagagcccccacagcgtgcctgggggcccccaggcccaggccaccatgaccccaccacccaacctgaccccaccacccatgaacctgcccccacccctgctgcagaggaacatggccgccagcaacatcggcatcagccacagccagaggctgcagacccagatcgccagcaagggccacatctccatgaggaccaagagcgccagcctgagccctgctgctgccacccaccagagccagatctacggccgcagccagacagtggccatgcagggccctgcccggaccctgaccatgcagaggggcatgaacatgtctgtgaacctgatgcctgccccagcctacaacgtgaacagcgtgaacatgaacatgaacaccctgaatgccatgaatggctacagcatgagccagcccatgatgaacagcggctaccacagcaaccacggctacatgaaccagaccccccagtaccccatgcagatgcagatgggcatgatgggcacccagccctatgcccagcagcccatgcagaccccacctcatggcaacatgatgtacacagcccctggccaccacggctacatgaacacaggcatgagcaagcagagcctgaatggcagctacatgagaagatag

SEQ ID NO: 282736 - DNA, 6222 bp, Artificial Sequence
  derived and/or modified sequence
atggtgaagctggccaaccccctgtacaccgagtggatcctggaggccatccagaagattaaaaagcagaagcagcggccatctgaggaacggatatgccacgcggtatccacaagccacggcctggataagaaaactgtatccgagcaactcgaacttagtgtgcaagacggttccgtcctgaaggtgacgaataagggcctggcgtcatacaaggacccagacaatcccggacgcttcagctcagtgaagcctggaacattccccaagtctgcaaaggggtcaaggggctcctgcaacgatctgcggaatgtggattggaacaagctcctccggcgagccatcgagggccttgaggaacctaacggtagcagtttgaagaatatcgagaagtacctgagaagccaaagcgatctgacctcaacgacaaacaatccagcctttcagcagcgcctgcggctgggcgccaagcgtgcagttaacaacgggagattgttaaaagacgggccccagtaccgggttaattatggctccctcgatggtaagggcgctcctcagtacccatctgcgtttccttccagcttacctcccgtttccctgcttccccacgagaaagaccagccccgcgcagaccctatacccatttgttccttttgtctgggcacgaaggagtccaatcgagagaagaagcctgaggaactcctcagttgtgccgattgcggctctagtggccacccgagctgcctgaaattttgtcccgagctgaccaccaatgtaaaggccctacgctggcagtgcattgagtgcaaaacatgctcagcttgccgagtgcagggccgaaatgctgacaacatgcttttctgcgactcgtgtgatagggggttccatatggagtgctgtgacccccccctgagcaggatgccgaagggcatgtggatctgccaagtgtgtcggcctaagaagaagggaagaaaacttttacatgaaaaggcagcccagattaagcgccgatacgccaaaccaatcggccgcccgaagaacaagctgaaacaaaggctgctctctgtgacaagcgacgagggtagtatgaatgcattcactggacgaggctcccccgggcgcggacaaaagaccaaggtgtgcacaacaccaagttccggacacgccgcttccggaaaagattcatcctccagacttgcagtgaccgacccaaccaggccaggcgcgacaacgaagatcaccacaactagtacctacatttctgcaagcactctgaaggttaataaaaagaccaagggcctaattgacgggctgactaagttctttaccccctcacctgatggccgccgaagccgcggagagataatcgacttcagcaaacattacagaccccggaagaaggtttctcagaaacagagttgcacctctcacgttctggccacaggaaccacccagaaattgaagcctccacctagtagcctgccccctcccactcctatttctggtcaaagcccgagcagtcagaagtcgtctactgctacatccagcccctcaccacagtcctctagctcccagtgtagtgttccttccttgagcagcctgacgactaactcccagctcaaggccttgtttgatggtctgtcccatatctacacaacgcaaggtcaaagccgcaaaaaaggccatccttcctatgctcccccaaagcgcatgcggaggaagacagaactttccagcactgctaaaagtaaagctcacttcttcggaaagcgtgatatcagatctcggttcatcagccattcctcgtcttcgtcttggggcatggcacggggaagtatttttaaagcgatagctcacttcaaacggacaacatttcttaagaagcacaggatgctgggcaggctgaagtacaaagtgactccacagatgggcactccttcccctggcaagggttctctgacagacggcaggattaagcctgatcaggatgacgacacagagatcaagataaatattaagcaagaatccgccgatgtcaatgtgatcgggaataaagacgtagtgaccgaggaggatctggatgtgttcaaacaggctcaggaactttcctgggagaaaatcgaatgcgaatctggagtagaggattgtggacgttaccctagcgtcatcgagttcggaaaatacgagatccaaacttggtatagtagtccgtatccacaggagtatgccagattgcctaaactgtacttgtgtgagttttgtcttaaatatatgaagagtaagaacattctgttgagacactcgaagaaatgtgggtggttccacccgccagccaacgaaatctacaggagaaaggatctttctgttttcgaggtcgatggaaacatgtcgaagatttattgccagaatctctgcttgttagccaaactctttttggaccacaaaacactttactatgacgtggaacccttcctgttttatgtgctaacgaagaatgacgagaaggggtgccacctggtcggttacttttcaaaggagaagctctgtcagcaaaaatacaacgtgtcctgcataatgattatgcctcagcaccagagacagggatttggacgtttcctgatcgacttctcttacttgttgtcaagacgcgaggggcaggccggctccccagaaaaaccactctctgatttggggcgactctcttatctcgcctattggaaaagcgtgatattggaatacctgtaccaccaccacgaacggcacattagcataaaggccatctcccgagcaaccggaatgtgtccacacgacattgcaaccaccctccagcatctgcacatgattgataaaagggacggacgcttcgtgattatcaggagagagaagttaatactcagccacatggagaagctgaagacttgcagccgtgcgaatgaactcgatcccgattcactcaggtggactcccatcctaatcagtaacgcagccgtctcagaggaagaacgagaggcggagaaggaggcggagcgtctgatggagcaggcctcctgttgggagaaagaagagcaggagatcctcagcaccagggccaacagcaggcaatctcccgcgaaggtccaatccaagaataagtatttacattcacctgagtctagacctgtcacaggtgaaaggggccagcttctggaactttccaaggaatctagcgaagaggaggaggaggaagaggacgaggaggaggaagaggaggaagaagaggaagaggaagacgaagaggaggaagaagaagaagaggaggaggaggaggaggagaatatccagagctcgcccccccggctgaccaagcctcagtcggtggctataaaaagaaagagaccgttcgtgttaaagaagaagaggggcagaaagcgcaggaggataaactcaagcgtgactactgaaacaattagtgaaactactgaggtgttaaacgagccttttgataatagtgatgaagagcgacctatgcctcagctcgagccaacttgcgagatagaagtggaagaagatggccgcaaaccagttctgcgaaaggcttttcagcatcagcccggcaaaaaacgccagaccgaggaggaggaaggcaaagataatcactgtttcaagaatgctgatccttgccggaacaacatgaatgatgacagctccaacctgaaagaaggcagtaaggacaatcccgagcccttaaagtgcaagcaagtatggcctaaaggcacgaagagaggcctgagtaagtggcgccagaacaaggagcgcaaaactggatttaagctcaacttgtacactccccctgaaactcctatggagcctgacgagcaggtcactgtggaagagcagaaggaaacctccgaaggaaaaacatcaccttctccaatccgcatcgaggaggaagtgaaggaaacgggtgaggcactgcttcctcaggaggagaatcgcagggaagaaacctgtgccccggtcagtccaaataccagccccggagagaaacccgaagacgatctgataaagccagaggaggaggaggaggaggaagaggaggaggaagaggaggaggaggaggaagaaggagaagaagaggaaggcggaggcaacgttgagaaagaccctgatggcgccaagtctcaggagaaggaggaaccggagatctccaccgaaaaggaggatagcgcacgccttgacgaccatgaagaagaagaagaggaggacgaggaaccttcacacaacgaggatcatgatgcagacgacgaggatgacagccacatggagtcagcagaggtggaaaaggaggagctcccaagggaatcgtttaaagaagttcttgagaatcaagagacatttctggatctaaacgtccagcccggccactctaatcccgaagtgttgatggattgcggagttgatctgaccgcatcatgtaacagcgagcccaaagaactcgctggcgatcctgaggctgtgcctgaatccgacgaagagccacctcccggggagcaagcacagaaacaggatcagaagaatagtaaggaagtggacactgaatttaaggagggaaatccggctaccatggaaatcgacagcgaaaccgtccaggccgtgcagagtctgacccaggagtcctccgagcaagacgacacttttcaggattgcgccgagacccaagaggcctgtagatctttacaaaattataccagggctgatcaaagtcctcagatcgcaacaacactggatgactgtcaacagtccgaccactcctcccccgtgtcctctgtccactcccacccaggccagagcgttcggtctgtgaacagcccctcagtccccgctttggaaaacagttatgcacagatctccccagatcagagcgccatcagcgtgccatcactgcagaacatggaaacctctcccatgatggatgtgccatccgtgtcggatcacagccagcaggtcgttgattctggattcagtgatttaggcagcattgagagtaccacagaaaactatgagaatcccagtagttacgattccacaatgggcggctcgatttgcgggaacggtagcagccaaaacagctgcagctattctaacctcacttcctcctctttgactcagtcgagctgcgctgttacacaacagatgtctaatatatcaggttcctgctctatgctgcagcagaccagcatcagcagcccgccgacttgctctgtgaaatctcctcagggctgtgtcgtcgaacgccctccctctagctctcaacagctggcccaatgttcaatggccgccaatttcaccccgccgatgcagctggctgagataccagagacaagtaatgcgaacattggactgtacgaacggatggggcagtcagatttcggtgccggtcactacccccagccttccgccactttttcgcttgccaaactgcaacaacttaccaacaccctcatcgaccattccctcccatactctcattcagccgccgtaactagttacgcgaactcagcctctctctccactccgctgagtaacacaggcctggtgcagctttcccaaagcccgcattcagtgccaggtggccctcaggcccaggcgacaatgactccacctccgaacctgacaccccctcccatgaatttaccccctcctctgctccagcgaaacatggccgcatcaaatatcggcatatctcattcccagcgattacaaacccagattgcaagcaaaggtcatatttccatgcggactaagagtgcaagcctgtccccagcagccgctactcatcagagccagatctacggccggtcccagaccgtggctatgcaaggccccgcccggactctcactatgcagagagggatgaatatgagcgtcaatctcatgcccgctccggcctataatgtgaacagcgtcaatatgaatatgaacactctaaatgccatgaacgggtattccatgtcacagcctatgatgaactccggctaccacagcaatcatggatacatgaatcagactcctcaataccctatgcagatgcagatggggatgatgggaacccaaccctacgcccagcaacctatgcagaccccccctcatgggaacatgatgtacaccgcccctggtcaccatgggtatatgaataccggcatgagtaaacagtccctgaacgggtcctatatgaggcgctag

SEQ ID NO: 282737 - DNA, 6222 bp, Artificial Sequence
  derived and/or modified sequence
atggtcaaactggccaacccactctacactgaatggatcctggaagccatccaaaaaattaagaaacagaagcagaggccgtccgaggagagaatttgccacgccgtgagcaccagccacgggttggataagaagactgtatctgagcagttagaactgagcgtgcaagatggttccgtgctgaaagtgacaaataaggggctggcgtcgtacaaggacccagacaacccgggaagattttctagtgttaaacccggtaccttccctaaaagtgccaagggcagtagagggagttgcaacgacctgcgcaacgtggattggaataaacttctgagacgggcaattgaaggactggaggaaccgaatggtagcagcctgaagaacattgaaaagtatttgagatcccaaagcgatcttacaagtactacaaataacccggcattccaacagcggctccgactgggagccaaaagagcagtcaataacggcagactgctgaaggacggtccccagtacagggtcaattacggctccctcgatgggaagggggctccccagtatccttctgctttcccaagtagtttacccccagtgagtctgttgccacatgagaaagaccagccccgagctgaccccatccccatttgtagcttctgcttgggaacaaaggagtccaatcgggaaaagaagcctgaagaactactcagttgcgccgactgcgggagtagtggccaccctagctgcctcaaattttgtcccgagcttaccactaacgtgaaggcactgagatggcagtgcatagagtgcaagacgtgttccgcatgtcgggtgcaaggccgtaatgccgataacatgttattctgcgattcctgcgatcggggttttcatatggagtgctgtgacccacccttgtcacggatgcctaaaggaatgtggatctgtcaagtgtgtcgaccaaagaaaaaaggccgtaaacttctgcacgaaaaggctgctcagataaagcgaagatatgcaaaacccattggaaggcccaagaataagctgaaacagcgtttgctctcggtcacctctgatgaaggttccatgaatgcttttacaggtagaggctcaccagggaggggccagaagacaaaggtctgtaccacgcccagcagtggacatgccgctagtgggaaggacagttcttcccgcttggccgttaccgacccaaccagaccaggggcaaccaccaagatcaccactacctcaacgtacatcagcgccagcacactgaaggtgaataaaaagacaaaggggttgattgacgggttgaccaaattcttcactccctctccagacggtagaagatctcggggagaaattatcgacttctccaaacactacagacccaggaaaaaggtttcccagaagcagagctgtacgtcacatgtactggccactggcactacccagaagctgaagcctccacctagctcactccccccaccgactcctatttcgggccaatctccaagctcacagaaatcgtcaacagccacttccagccccagtccgcaatcttcctcaagccagtgttcagttccgagtctgtcaagtctaaccacaaattctcaactgaaggcactctttgatgggctgtcacacatatacaccacccaaggacagtcgcggaagaagggtcacccttcttatgcacccccaaaaaggatgcggaggaagacggagctgagcagcaccgctaagtccaaggcccactttttcggaaagagagacatccgctcacgatttatatctcactcttcttcctctagttggggaatggcaagaggctctatctttaaagccattgcccactttaagcggactacgtttcttaagaaacatcgcatgcttggcaggcttaagtacaaagtcacaccacagatgggtacgccgtcaccgggaaaaggaagcctgaccgatgggaggattaagccggaccaagacgatgataccgagatcaagataaacattaagcaggagtccgctgatgtcaatgtcatcggcaacaaagacgtcgtaactgaggaggaccttgacgtgtttaagcaggctcaggaactgagctgggagaagatagagtgtgaaagcggtgttgaggactgtggtaggtaccccagcgtgatagaattcggaaaatacgaaattcagacttggtacagctccccctacccacaggagtacgccagactacctaagctttatctctgcgaattctgtctcaaatacatgaaatcaaagaatatattattgcggcacagcaaaaaatgcggttggtttcatccacctgccaacgaaatctatagacgcaaggatctatccgtattcgaagtggatgggaacatgtccaagatatattgtcagaatctgtgcctgctcgctaagctgtttctcgaccataagaccctgtattatgatgtggaacccttcttattttacgtgctcactaagaatgatgaaaagggatgccatttggtcggctactttagcaaagagaagttatgccaacagaaatacaatgtttcatgtatcatgatcatgccccagcatcagagacagggatttggacgcttcctgatcgatttcagctacctgttaagcaggcgagagggacaggccggttcacccgaaaaaccattatctgacctcggaagattgtcttaccttgcgtattggaaaagcgtcattctggagtacctgtaccatcaccacgaacggcacataagcatcaaggctatttcaagggccacaggtatgtgtcctcatgacatcgccaccacacttcaacatctgcatatgattgataagcgtgatggacgctttgtcatcatcagacgtgaaaaactgatcctgtcacacatggagaaactcaagacatgttcccgagctaacgagctggatcctgatagcctgcgctggactcccattttgatcagtaatgcggcagtgtctgaggaggagcgcgaagctgaaaaagaggccgagcgcctcatggagcaggcttcctgctgggagaaggaagagcaggaaatcctttccacaagggcaaactccagacaaagtccggctaaggtgcagtcgaagaataagtatctccattcacctgagagcaggcccgtcacaggtgagcgtggacaattgctcgaattaagcaaagagtcatccgaagaagaggaggaagaggaagacgaagaggaggaagaggaggaagaggaggaagaggaggatgaagaagaagaagaggaggaggaggaagaagaggaagaagagaacatccagtcttcgccccctcggcttacaaagccacagtcagtcgcgattaagcggaaaaggccattcgtgcttaagaaaaagaggggacggaaaaggcggcgaatcaactctagcgtgaccaccgagacaatatcggaaaccaccgaggtgctgaacgaaccctttgataacagcgacgaagaaaggcctatgccacagttagagcctacttgtgaaattgaagtggaggaggacggacggaagccggtgctccgcaaagcattccagcaccagcctggcaaaaaacggcagaccgaggaagaggaagggaaagataatcactgctttaaaaacgccgacccgtgtcgaaacaatatgaatgacgattcgtcaaatctgaaagaggggtccaaggataacccagagcctctgaagtgtaaacaggtgtggcccaaaggcaccaagcggggactttccaaatggcggcagaataaggagcgcaagaccgggttcaaactgaacttgtacacccctcctgaaacacctatggagccggacgagcaggtgactgtcgaggagcagaaagagaccagtgaggggaagacttctccctcccctattcgtatcgaggaggaagtcaaggaaactggtgaggccctgcttccccaggaggaaaaccgaagggaggaaacttgcgcacccgtgagccctaacacgagccccggagaaaagcctgaagatgacctcattaagccggaggaggaagaagaggaggaggaagaggaagaggaggaggaagaggaggaggagggagaggaggaggagggaggcggtaacgttgaaaaagatcctgacggagccaagagccaggagaaagaggaacctgaaatcagtacagaaaaggaggactccgccaggctagatgaccacgaggaggaggaggaggaagatgaggagcccagtcataacgaagaccatgacgctgatgatgaagacgattcgcacatggaatccgctgaggtagaaaaggaagagctccctcgcgaatctttcaaggaggtgctggagaatcaggaaaccttcctggacttaaacgtgcagcccggacactcgaacccagaggtccttatggactgcggagttgacttgactgcatcgtgtaattcggagcccaaggaactagcaggtgatccagaggctgtgcccgaaagcgatgaagaacccccaccaggcgaacaggctcagaagcaggaccagaaaaatagcaaggaggttgataccgaattcaaagagggaaaccctgccacgatggaaattgattccgagactgtgcaggcagtgcagtctctgacgcaggagagctccgagcaagacgatacctttcaggattgcgcagagacccaggaggcatgcaggtcccttcagaactataccagggcagaccagtccccccagattgcgacaactctagacgattgtcagcaatcagaccacagttcccccgtgtcctcagtgcactcccaccccggtcagtccgtacgctccgtgaactctccgagtgtgccagccctggagaacagttacgcacagatcagtcccgatcagagtgccatctcagtcccctccctccagaatatggaaacaagccctatgatggacgtgccatctgtatctgatcacagtcaacaagtcgtggacagcggcttttcagatctgggctctattgaaagcacaacagagaactacgagaaccccagttcttacgattcaaccatggggggtagtatctgcggcaatggaagcagccaaaattcctgttcctattccaatctgacttcttcttccttgactcagtctagctgcgcggtcacgcagcagatgagcaacatctctgggtcttgctcaatgctgcaacagaccagtatttcaagcccccctacttgctccgttaagagcccacagggctgcgtggtagaaagacccccttcctctagccagcagctggcacagtgcagtatggccgctaattttacgccacccatgcagctcgcggaaatcccagaaacctctaatgccaacatcggcctgtacgagcgcatgggacagtccgactttggcgcaggccactacccccagccttccgcaacgtttagtcttgccaagctgcaacagctgactaacactctcatagaccactccctgccatactcccatagcgcggcagtcacatcttatgcaaacagcgcttcgttatcaaccccactcagcaatacagggttggtgcagttatcgcagtctcctcattctgttcctggtgggccacaagcccaggctacaatgacgccacccccaaaccttacacctccccctatgaacctccctccgcctctgctgcagcggaatatggccgcttctaacatagggatctcccactcacagagactccagacgcagatcgcctcaaaaggccacattagcatgcggaccaaaagcgcctctctgtctcccgctgccgcaacccatcagagccagatctacggccgaagtcaaaccgtcgccatgcaaggtccagctcggaccctgaccatgcagcgtggcatgaacatgtctgtcaaccttatgcccgcacctgcctataacgtgaattcagtaaacatgaacatgaacaccctgaacgctatgaacggatactcaatgtctcagccgatgatgaactctggctatcacagtaatcatggctatatgaaccagaccccccagtaccctatgcagatgcagatgggcatgatgggaactcaaccgtatgcacaacagccaatgcaaaccccacctcatggaaatatgatgtacactgcccctggtcaccacggttatatgaatacaggcatgagcaaacaaagcctcaacggcagctatatgagaaggtag

SEQ ID NO: 282738 - DNA, 6222 bp, Artificial Sequence
  derived and/or modified sequence
atggtgaagctggccaaccccctgtacaccgagtggatcctggaggccatccagaagatcaagaagcagaagcagagacccagcgaggagagaatctgccacgccgtgagcaccagccacggcctggacaagaagaccgtgagcgagcagctggagctgagcgtgcaggacggcagcgtgctgaaggtgaccaacaagggcctggccagctacaaggaccccgacaaccccggcagattcagcagcgtgaagcccggcaccttccccaagagcgccaagggcagcagaggcagctgcaacgacctgagaaacgtggactggaacaagctgctgagaagagccatcgagggcctggaggagcccaacggcagcagcctgaagaacatcgagaagtacctgagaagccagagcgacctgaccagcaccaccaacaaccccgccttccagcagagactgagactgggcgccaagagagccgtgaacaacggcagactgctgaaggacggcccccagtacagagtgaactacggcagcctggacggcaagggcgccccccagtaccccagcgccttccccagcagcctgccccccgtgagcctgctgccccacgagaaggaccagcccagagccgaccccatccccatctgcagcttctgcctgggcaccaaggagagcaacagagagaagaagcccgaggagctgctgagctgcgccgactgcggcagcagcggccaccccagctgcctgaagttctgccccgagctgaccaccaacgtgaaggccctgagatggcagtgcatcgagtgcaagacctgcagcgcctgcagagtgcagggcagaaacgccgacaacatgctgttctgcgacagctgcgacagaggcttccacatggagtgctgcgacccccccctgagcagaatgcccaagggcatgtggatctgccaggtgtgcagacccaagaagaagggcagaaagctgctgcacgagaaggccgcccagatcaagagaagatacgccaagcccatcggcagacccaagaacaagctgaagcagagactgctgagcgtgaccagcgacgagggcagcatgaacgccttcaccggcagaggcagccccggcagaggccagaagaccaaggtgtgcaccacccccagcagcggccacgccgccagcggcaaggacagcagcagcagactggccgtgaccgaccccaccagacccggcgccaccaccaagatcaccaccaccagcacctacatcagcgccagcaccctgaaggtgaacaagaagaccaagggcctgatcgacggcctgaccaagttcttcacccccagccccgacggcagaagaagcagaggcgagatcatcgacttcagcaagcactacagacccagaaagaaggtgagccagaagcagagctgcaccagccacgtgctggccaccggcaccacccagaagctgaagcccccccccagcagcctgcccccccccacccccatcagcggccagagccccagcagccagaagagcagcaccgccaccagcagccccagcccccagagcagcagcagccagtgcagcgtgcccagcctgagcagcctgaccaccaacagccagctgaaggccctgttcgacggcctgagccacatctacaccacccagggccagagcagaaagaagggccaccccagctacgccccccccaagagaatgagaagaaagaccgagctgagcagcaccgccaagagcaaggcccacttcttcggcaagagagacatcagaagcagattcatcagccacagcagcagcagcagctggggcatggccagaggcagcatcttcaaggccatcgcccacttcaagagaaccaccttcctgaagaagcacagaatgctgggcagactgaagtacaaggtgaccccccagatgggcacccccagccccggcaagggcagcctgaccgacggcagaatcaagcccgaccaggacgacgacaccgagatcaagatcaacatcaagcaggagagcgccgacgtgaacgtgatcggcaacaaggacgtggtgaccgaggaggacctggacgtgttcaagcaggcccaggagctgagctgggagaagatcgagtgcgagagcggcgtggaggactgcggcagataccccagcgtgatcgagttcggcaagtacgagatccagacctggtacagcagcccctacccccaggagtacgccagactgcccaagctgtacctgtgcgagttctgcctgaagtacatgaagagcaagaacatcctgctgagacacagcaagaagtgcggctggttccacccccccgccaacgagatctacagaagaaaggacctgagcgtgttcgaggtggacggcaacatgagcaagatctactgccagaacctgtgcctgctggccaagctgttcctggaccacaagaccctgtactacgacgtggagcccttcctgttctacgtgctgaccaagaacgacgagaagggctgccacctggtgggctacttcagcaaggagaagctgtgccagcagaagtacaacgtgagctgcatcatgatcatgccccagcaccagagacagggcttcggcagattcctgatcgacttcagctacctgctgagcagaagagagggccaggccggcagccccgagaagcccctgagcgacctgggcagactgagctacctggcctactggaagagcgtgatcctggagtacctgtaccaccaccacgagagacacatcagcatcaaggccatcagcagagccaccggcatgtgcccccacgacatcgccaccaccctgcagcacctgcacatgatcgacaagagagacggcagattcgtgatcatcagaagagagaagctgatcctgagccacatggagaagctgaagacctgcagcagagccaacgagctggaccccgacagcctgagatggacccccatcctgatcagcaacgccgccgtgagcgaggaggagagagaggccgagaaggaggccgagagactgatggagcaggccagctgctgggagaaggaggagcaggagatcctgagcaccagagccaacagcagacagagccccgccaaggtgcagagcaagaacaagtacctgcacagccccgagagcagacccgtgaccggcgagagaggccagctgctggagctgagcaaggagagcagcgaggaggaggaggaggaggaggacgaggaggaggaggaggaggaggaggaggaggaggaggacgaggaggaggaggaggaggaggaggaggaggaggaggaggagaacatccagagcagcccccccagactgaccaagccccagagcgtggccatcaagagaaagagacccttcgtgctgaagaagaagagaggcagaaagagaagaagaatcaacagcagcgtgaccaccgagaccatcagcgagaccaccgaggtgctgaacgagcccttcgacaacagcgacgaggagagacccatgccccagctggagcccacctgcgagatcgaggtggaggaggacggcagaaagcccgtgctgagaaaggccttccagcaccagcccggcaagaagagacagaccgaggaggaggagggcaaggacaaccactgcttcaagaacgccgacccctgcagaaacaacatgaacgacgacagcagcaacctgaaggagggcagcaaggacaaccccgagcccctgaagtgcaagcaggtgtggcccaagggcaccaagagaggcctgagcaagtggagacagaacaaggagagaaagaccggcttcaagctgaacctgtacaccccccccgagacccccatggagcccgacgagcaggtgaccgtggaggagcagaaggagaccagcgagggcaagaccagccccagccccatcagaatcgaggaggaggtgaaggagaccggcgaggccctgctgccccaggaggagaacagaagagaggagacctgcgcccccgtgagccccaacaccagccccggcgagaagcccgaggacgacctgatcaagcccgaggaggaggaggaggaggaggaggaggaggaggaggaggaggaggaggaggagggcgaggaggaggagggcggcggcaacgtggagaaggaccccgacggcgccaagagccaggagaaggaggagcccgagatcagcaccgagaaggaggacagcgccagactggacgaccacgaggaggaggaggaggaggacgaggagcccagccacaacgaggaccacgacgccgacgacgaggacgacagccacatggagagcgccgaggtggagaaggaggagctgcccagagagagcttcaaggaggtgctggagaaccaggagaccttcctggacctgaacgtgcagcccggccacagcaaccccgaggtgctgatggactgcggcgtggacctgaccgccagctgcaacagcgagcccaaggagctggccggcgaccccgaggccgtgcccgagagcgacgaggagcccccccccggcgagcaggcccagaagcaggaccagaagaacagcaaggaggtggacaccgagttcaaggagggcaaccccgccaccatggagatcgacagcgagaccgtgcaggccgtgcagagcctgacccaggagagcagcgagcaggacgacaccttccaggactgcgccgagacccaggaggcctgcagaagcctgcagaactacaccagagccgaccagagcccccagatcgccaccaccctggacgactgccagcagagcgaccacagcagccccgtgagcagcgtgcacagccaccccggccagagcgtgagaagcgtgaacagccccagcgtgcccgccctggagaacagctacgcccagatcagccccgaccagagcgccatcagcgtgcccagcctgcagaacatggagaccagccccatgatggacgtgcccagcgtgagcgaccacagccagcaggtggtggacagcggcttcagcgacctgggcagcatcgagagcaccaccgagaactacgagaaccccagcagctacgacagcaccatgggcggcagcatctgcggcaacggcagcagccagaacagctgcagctacagcaacctgaccagcagcagcctgacccagagcagctgcgccgtgacccagcagatgagcaacatcagcggcagctgcagcatgctgcagcagaccagcatcagcagcccccccacctgcagcgtgaagagcccccagggctgcgtggtggagagaccccccagcagcagccagcagctggcccagtgcagcatggccgccaacttcaccccccccatgcagctggccgagatccccgagaccagcaacgccaacatcggcctgtacgagagaatgggccagagcgacttcggcgccggccactacccccagcccagcgccaccttcagcctggccaagctgcagcagctgaccaacaccctgatcgaccacagcctgccctacagccacagcgccgccgtgaccagctacgccaacagcgccagcctgagcacccccctgagcaacaccggcctggtgcagctgagccagagcccccacagcgtgcccggcggcccccaggcccaggccaccatgacccccccccccaacctgacccccccccccatgaacctgcccccccccctgctgcagagaaacatggccgccagcaacatcggcatcagccacagccagagactgcagacccagatcgccagcaagggccacatcagcatgagaaccaagagcgccagcctgagccccgccgccgccacccaccagagccagatctacggcagaagccagaccgtggccatgcagggccccgccagaaccctgaccatgcagagaggcatgaacatgagcgtgaacctgatgcccgcccccgcctacaacgtgaacagcgtgaacatgaacatgaacaccctgaacgccatgaacggctacagcatgagccagcccatgatgaacagcggctaccacagcaaccacggctacatgaaccagaccccccagtaccccatgcagatgcagatgggcatgatgggcacccagccctacgcccagcagcccatgcagacccccccccacggcaacatgatgtacaccgcccccggccaccacggctacatgaacaccggcatgagcaagcagagcctgaacggcagctacatgagaagatag

SEQ ID NO: 282739 - protein, 429 aa, Artificial Sequence
  derived and/or modified sequence
MDSNGIRQFCVHVNNSNLNYFQKLQKVNATNFQALAAEFGGESFTSTFQTQSPPSFYRAGDPILTYFPKWSVISLLRQPAGVGAGGLCAESNPAGFLESKSTTCTRFFKNLASSCTLDSALNAASYYNFTVLKVPRSMTDPQNMEVTYEIETNGTFGIQKVSVSLGQTNLTVEPGASLQQHFILRFRAFQQSTAASLTSPRSGNPGYIVGKPLLALTDDISYSMTLLQSQGNGSCSVKRHEVQFGVNAISGCKLRLKKADCSHLQQEIYQTLHGRPRPEYVAIFGNADPAQKGGWTRILNRHCSISAINCTSCCLIPVSLEIQVLWAYVGLLSNPQAHVSGVRFLYQCQSIQDSQQVTEVSLTTLVNFVDITQKPQPPRGQPKMDWKWPFDFFPFKVAFSRGVFSQKCSVSPILILCLLLLGVLNLETM

SEQ ID NO: 282740 - DNA, 1290 bp, Artificial Sequence
  derived and/or modified sequence
atggacagcaacggcatcagacagttctgcgtgcacgtgaacaacagcaacctgaactacttccagaagctgcagaaggtgaacgccaccaacttccaggccctggccgccgagttcggcggcgagagcttcaccagcaccttccagacccagagcccccccagcttctacagagccggcgaccccatcctgacctacttccccaagtggagcgtgatcagcctgctgagacagcccgccggcgtgggcgccggcggcctgtgcgccgagagcaaccccgccggcttcctggagagcaagagcaccacctgcaccagattcttcaagaacctggccagcagctgcaccctggacagcgccctgaacgccgccagctactacaacttcaccgtgctgaaggtgcccagaagcatgaccgacccccagaacatggaggtgacctacgagatcgagaccaacggcaccttcggcatccagaaggtgagcgtgagcctgggccagaccaacctgaccgtggagcccggcgccagcctgcagcagcacttcatcctgagattcagagccttccagcagagcaccgccgccagcctgaccagccccagaagcggcaaccccggctacatcgtgggcaagcccctgctggccctgaccgacgacatcagctacagcatgaccctgctgcagagccagggcaacggcagctgcagcgtgaagagacacgaggtgcagttcggcgtgaacgccatcagcggctgcaagctgagactgaagaaggccgactgcagccacctgcagcaggagatctaccagaccctgcacggcagacccagacccgagtacgtggccatcttcggcaacgccgaccccgcccagaagggcggctggaccagaatcctgaacagacactgcagcatcagcgccatcaactgcaccagctgctgcctgatccccgtgagcctggagatccaggtgctgtgggcctacgtgggcctgctgagcaacccccaggcccacgtgagcggcgtgagattcctgtaccagtgccagagcatccaggacagccagcaggtgaccgaggtgagcctgaccaccctggtgaacttcgtggacatcacccagaagccccagccccccagaggccagcccaagatggactggaagtggcccttcgacttcttccccttcaaggtggccttcagcagaggcgtgttcagccagaagtgcagcgtgagccccatcctgatcctgtgcctgctgctgctgggcgtgctgaacctggagaccatgtag

SEQ ID NO: 282741 - DNA, 1290 bp, Artificial Sequence
  derived and/or modified sequence
atggattctaacggtattcggcagttttgcgttcacgtgaataactccaacttgaactactttcaaaagctgcagaaggtgaacgcgacaaactttcaggctctcgctgccgaatttgggggtgaatccttcacaagtacgttccagacccagtcacccccttcattctaccgcgccggcgatcccattctaacatacttccccaagtggtcagttataagtctgctgaggcagcctgcgggcgtcggcgcgggaggactgtgcgcagaatccaacccagccggatttctggagtcaaagtctaccacttgcactcgctttttcaagaacttggcgtcctcctgcaccctcgactccgccctcaatgcggccagctactacaattttaccgtgctgaaggtcccaaggagcatgaccgatccccaaaatatggaggtgacctatgaaatcgaaacaaatggcacattcgggatacagaaggttagcgtatcattgggtcaaactaatctaactgtggagccaggggcctcgcttcagcaacacttcatcctgcggttcagggcattccagcagagtacagcagcatctctcacatccccccgtagtggtaaccctgggtatatcgtgggcaaacctcttttagccttaacagatgatatttcatactcgatgacgctgctgcagtctcagggaaacggcagttgctctgtcaaacgccatgaggtgcagtttggagtcaacgccattagtgggtgcaaattaagactcaaaaaagccgattgcagccatcttcagcaggaaatatatcaaacactgcacggcagacctcgccccgagtacgtggccatattcgggaacgccgatcccgcacagaagggaggctggacccggatccttaaccgccactgcagcattagtgctatcaactgtacatcgtgttgcctgatcccagtatctctggagattcaagtgctgtgggcgtatgtgggattactgtcaaacccccaggcccatgtgtctggtgtgagatttctctaccagtgccagtctatccaagacagtcaacaggtcacagaggtgagcctgactactctcgttaattttgtcgatatcacacagaaaccccagccgccacgcggtcagccgaagatggactggaaatggccattcgatttcttcccattcaaggtcgcctttagtcgcggagtcttctcgcaaaagtgttctgtgtctcctatcttaatcttgtgtctcttgctcctgggagtcctcaaccttgagacaatgtag

SEQ ID NO: 282742 - DNA, 1290 bp, Artificial Sequence
  derived and/or modified sequence
atggacagcaatggcatccggcagttctgtgtgcacgtgaacaacagcaacctgaactacttccagaagctgcagaaggtgaatgccaccaacttccaggccctggccgctgagtttggaggagagagcttcaccagcaccttccagacccagagccccccatccttctacagagctggggaccccatcctgacctacttccccaagtggagcgtcatcagcctgctgcggcagcctgctggggtgggcgctgggggcctgtgtgccgagagcaacccagctggcttcctggagagcaagagcaccacctgcacccgcttcttcaagaacctggccagcagctgcaccctggacagcgccctgaatgctgccagctactacaacttcaccgtgctgaaggtgcccaggtccatgacagacccccagaacatggaggtgacctatgaaattgagaccaacggcaccttcggcatccagaaggtgtctgtgtccctgggccagaccaacctgactgtggagcccggggccagcctgcagcagcacttcatcctgcgcttccgggccttccagcagagcacagctgccagcctgaccagccccaggagcggcaaccctggctacatcgtgggcaagcccctgctggccctgacagatgacatctcctacagcatgaccctgctgcagagccagggcaatggcagctgcagcgtgaagagacatgaggtgcagtttggagtgaatgccatcagcggctgcaagctgcggctgaagaaggctgactgcagccacctgcagcaggagatctaccagaccctgcacggccggcccaggccagaatatgtggccatctttggaaatgctgaccctgcccagaagggcggctggacccgcatcctgaacagacactgcagcatcagcgccatcaactgcaccagctgctgcctgatccctgtgtccctggagatccaggtgctgtgggcctacgtgggcctgctgagcaacccccaggcccacgtgtctggagtgcgcttcctgtaccagtgccagagcatccaggacagccagcaggtgacagaggtgtccctgaccaccctggtgaactttgtggacatcacccagaagccccagcccccccggggccagcccaagatggactggaagtggccctttgacttcttccccttcaaggtggccttcagccggggcgtcttcagccagaagtgcagcgtgagccccatcctgatcctgtgcctgctgctgctgggcgtgctgaacctggagaccatgtag

SEQ ID NO: 282743 - DNA, 1290 bp, Artificial Sequence
  derived and/or modified sequence
atggacagcaacggcatccggcagttctgcgtgcacgtgaacaactcgaatctgaattattttcaaaaactacaaaaggttaacgccacaaattttcaggccttggccgccgagttcgggggagaaagcttcacaagtaccttccagacacagagcccacccagcttttatagagcaggggatcccattctgacttacttccccaagtggagtgtgatcagtttactccgccagcccgcaggtgttggcgctggcgggctttgcgcagaatccaaccctgccgggtttttagagagcaaatcaaccacgtgtactcgattttttaaaaatctggcaagttcttgcacgcttgacagtgccttgaatgccgccagctactataattttacagtgctgaaggtgccgagatctatgacggaccctcagaatatggaggttacgtacgaaatagagactaatggtacatttgggattcagaaggtttccgtttcactcggccagaccaacttaaccgtggagcccggagcgtctttgcaacagcatttcatacttagatttcgcgcgtttcagcaatcaaccgccgcctcgctgacctcaccccggagcggcaaccccggctatattgtaggtaagccgctgctggctttgacagacgatatctcttattctatgacgctgttgcagtcccagggtaacggaagctgtagtgtgaaaaggcacgaggtgcaattcggagtgaatgcaatttccggctgtaaactgagactgaagaaagctgattgtagtcacctacagcaggaaatttaccagaccctccacgggcgccctaggcctgagtatgttgccattttcggtaatgcggaccccgctcagaagggaggatggacgcgaattttgaacaggcactgttctatctctgctataaactgtactagctgttgtttaatcccagtgtcactggaaattcaggtcctgtgggcttacgtaggactgctctcaaatcctcaggcgcacgtgagtggcgtccgttttttgtaccaatgccagtccatccaagattcacagcaggttacagaagtgtcgcttaccaccctggttaattttgtcgatatcacacaaaaaccacaacctcctagaggacaaccaaaaatggactggaagtggccttttgacttcttccctttcaaagtcgctttcagcagaggcgtgttcagtcagaaatgcagtgtgtcacccatcctcatcctgtgtttattgctcctgggggtgctgaacctcgagactatgtag

SEQ ID NO: 282744 - DNA, 1290 bp, Artificial Sequence
  derived and/or modified sequence
atggacagcaacggaattcggcagttttgcgttcatgtgaacaattctaacctcaactacttccaaaaactgcagaaggtgaacgcgaccaattttcaagccctggccgcagagttcggaggcgagtctttcacttctacatttcaaactcagtcaccacctagtttctacagggcgggtgatcctattttgacatactttcctaaatggagcgtcatatcgctcctcagacaacctgctggtgtaggggcaggcggactgtgcgctgagagcaacccggcaggtttccttgagtcaaagagcactacctgtacacgcttttttaaaaatttagcctcctcttgtaccctagactccgccctgaatgctgcttcatactacaattttacagtacttaaagtcccacgttcaatgaccgacccacagaacatggaggtcacttacgaaatagagacaaacgggacttttggaattcaaaaggtcagcgtgagcctgggccagaccaacctcactgtggaacctggagcaagcctgcagcaacacttcattctaaggtttagggcgttccaacagtctactgccgcaagcctcacgagccctcgaagcggaaacccaggctacattgtagggaagccccttcttgctctcaccgatgatattagctactctatgacgctcctccagtctcagggcaacggctcatgctcagtcaagcggcatgaggtccaatttggcgtcaatgcaatttccggctgtaaacttaggctcaaaaaagctgattgcagccatttacagcaggaaatttatcagaccttacatggcagacctcgtccagaatatgttgccatcttcggcaatgctgatccagcacaaaaaggcggatggacccggatcctgaatcggcattgctccatctctgcgattaactgcacatcttgttgtcttattcccgtgagtctcgagatccaggtattgtgggcatatgttggtctgctgtcgaatccccaagctcatgtgtccggagtaagattcttgtatcagtgtcagtcaattcaggactctcaacaggtgaccgaggtctccctgacaacacttgtgaatttcgtcgacataacacaaaagccccagccgcctaggggacagccgaaaatggattggaagtggcccttcgatttttttccttttaaggtggccttttcgcgaggggttttcagccagaagtgctctgtcagccccattttaatcctttgtctccttctactgggtgtgctcaatctggagaccatgtag

SEQ ID NO: 282745 - DNA, 2436 bp, Artificial Sequence
  derived and/or modified sequence
acgtcggacccggaggccctgaatgccccatgcgcaccccacagctcgcgctcctgcaagtgttctttctggtgttccccgatggcgtccggcctcagccctcttcctccccatcaggggcagtgcccacgtctttggagctgcagcgagggacggatggcggaaccctccagtccccttcagaggcgactgcaactcgcccggccgtgcctggactccctacagtggtccctactctcgtgactccctcggcccctgggaataggactgtggacctcttcccagtcttaccgatctgtgtctgtgacttgactcctggagcctgcgatataaattgctgctgcgacagggactgctatcttctccatccgaggacagttttctccttctgccttccaggcagcgtaaggtcttcaagctgggtttgtgtagacaactctgttatcttcaggagtaattccccgtttccttcaagagttttcatggattctaatggaatcaggcagttttgtgtccatgtgaacaactcaaacttaaactatttccagaagcttcaaaaggtcaatgcaaccaacttccaggccctggctgcagagtttggaggcgaatcattcacttcaacattccaaactcaatcaccaccatctttttacagggctggggaccccattcttacttacttccccaagtggtctgtaataagcttgctgagacaacctgcaggagttggagctgggggactctgtgctgaaagcaatcctgcaggtttcctagagagtaaaagtacaacttgcactcgttttttcaagaacctggctagtagctgtaccttggattcagccctcaatgctgcctcttactataacttcacagtcttaaaggttccaagaagcatgactgatccacagaatatggaggtcacctatgagatagagaccaatgggacttttggaatccagaaagtttctgtcagtttgggacaaaccaacctgactgttgagccaggcgcttccttacagcaacacttcatccttcgcttcagggcttttcaacagagcacagctgcttctctcaccagtcctagaagtgggaatcctggctatatagttgggaagccactcttggctctgactgatgatataagttactcaatgaccctcttacagagccagggtaatggaagttgctctgttaaaagacatgaagtgcagtttggagtgaatgcaatatctggatgcaagctcaggttgaagaaggcagactgcagccacttgcagcaggagatttatcagactcttcatggaaggcccagaccagagtatgttgccatctttggtaatgctgacccagcccagaaaggagggtggaccaggatcctcaacaggcactgcagcatttcagctataaactgtacttcctgctgtctcataccagtttccctggagatccaggtattgtgggcatatgtaggtctcctgtccaacccgcaagctcatgtatcaggagttcgattcctataccagtgccagtctatacaggattctcagcaagttacagaagtatctttgacaactcttgtgaactttgtggacattacccagaagccacagcctccaaggggccaacccaaaatggactggaaatggccattcgacttctttcccttcaaagtggcattcagcagaggagtattctctcaaaaatgctcagtctctcccatccttatcctgtgcctcttactacttggagttctcaacctagagactatgtgaagaaaagaaaataatcagatttcagttttccctatgagaaactctgaggcagccacttatcttggctaaatagaacctcacctgctcatgaccagagagcatttaggataatagaggacctaactgaaggaatccttgtatatgaaaggagttattttagaaaagcaataaaaatattttattcatcatagctctctgctttgggctctgcaggccaccagatacacatgaggcccctacttctcaagctgggaaggccaagagccttccttcagcctttctggttatgttacacctagctgaatgtttacaaggtctggatccatcagccctcaggcacagttgggccaagcagaaagagagaaacacttctgctgtcaccttgaatgaactcaggaatagcttccctctggactgtagaggagctaactgtttggaacagaaaactgctggctgttgattttgtctggttcctttgccaacatctgggcacaccctttgcccagacacgagtggggaaagcagttctttctcctcagtttccaaagtaaatggggaatcccagctttcttttctactagcaaatgaccctaccatttatttctgcctttttcttccgttcattgtgaggaaaaataaaactggttgagagctttgttgtact

SEQ ID NO: 282746 - protein, 830 aa, Artificial Sequence
  derived and/or modified sequence
MAAAAAAAAAVGVRLRDCCSRGAVLLLFFSLSPRPPAAAAWLLGLRPEDTAGGRVSLEGGTLRAAEGTSFLLRVYFQPGPPRCREQSDWASDVEVLGPLRPGGVAGSALVQLFSLCAWDGRAWHHHGAAGGFLLRVRPRLYGPGGDLLPPAWLRALGALLLLALSALFSGLRLSLLSLDPVELRVLRNSGSAAEQEQARRVQAVRGRGTHLLCTLLLGQAGANAALAGWLYTSLPPGFGGTGEDYSEEGIHFPWLPALVCTGAVFLGAEICPYSVCSRHGLAIASHSVCLTRLLMAAAFPVCYPLGRLLDWALRQEISTFYTREKLLETLRAADPYSDLVKEELNIIQGALELRTKVVEEVLTPLGDCFMLRSDAVLDFATVSEILRSGYTRIPVYEGDQRHNIVDILFVKDLAFVDPDDCTPLLTVTRFYNRPLHCVFNDTRLDTVLEEFKKGKSHLAIVQRVNNEGEGDPFYEVMGIVTLEDIIEEIIKSEILDETDLYTDNRKKQRVPQRERKRHDFSLFKLSDTEMRVKISPQLLLATHRFMATEVEPFKSLYLSEKILLRLLKHPNVIQELKFDEKNKKAPEHYLYQRNRPVDYFVLLLQGKVEVEVGKEGLRFENGAFTYYGVPAIMTTACSDNDVRKVGSLAGSSVFLNRSPSRCSGLNRSESPNRERSDFGGSNTQLYSSSNNLYMPDYSVHILSDVQFVKITRQQYQNALTACHMDSSPQSPDMEAFTDGDSTKAPTTRGTPQTPKDDPAITLLNNRNSLPSSDSECCNINLDTETSPCSSDFEENVGKKLLRTLSGQKRKRSPEGERTSEDNSNLTPLIT

SEQ ID NO: 282747 - DNA, 2493 bp, Artificial Sequence
  derived and/or modified sequence
atggctgctgccgcagccgccgcggccgcggtaggagttaggttgcgggattgttgcagtcgcggagccgtgctgctgttatttttttcactgtcacctcgccccccggccgcggcagcgtggttactcggcttgaggccagaagacacagcaggcgggcgagttagtctcgaaggcgggacgttacgcgccgccgaggggactagttttcttttacgtgtttatttccagccaggtccaccgagatgtagagaacagagcgactgggcatccgacgtggaggtgcttggcccgctcaggcctgggggagtggctggatccgctctagtgcagctgtttagtctatgtgcctgggatggtagagcttggcatcatcatggagcagctggagggttcttgctaagggtgagacccaggctctacgggccagggggagacttgctacctccggcctggctgagggcccttggagccctccttctcctggctctgtctgccctctttagtggccttcgtctgagcctgctcagtctggatcccgtggaactccgtgtgctccgcaattctggcagcgcagccgagcaggagcaggcccggcgagtacaggcagtcagagggcgcggtacacacctcctgtgcaccctcctgctgggccaagctggagctaatgccgccctcgcggggtggttatatacatctttgccacctggtttcggcggtaccggggaggattactcagaagaaggcatacattttccatggctccctgccctcgtgtgtacaggcgccgtgtttctgggagcagaaatatgcccttactccgtttgtagccgacacggtcttgccatcgcctctcactccgtgtgtctcacaaggcttcttatggctgcagccttccccgtttgctaccctctcgggagattattggattgggccctgcgccaggagatttcaacattttatacaagagagaaactgctcgagacactcagggcggccgacccatattctgatttggtgaaggaagagttgaatatcattcaaggcgccctggagctgcgcacaaaggtggtggaggaagtactgactccactgggcgattgcttcatgctgagaagcgatgctgtgttggattttgccacggtgtcagagattctccgctccggctacactcggattcccgtttacgagggcgatcagcggcacaacatcgttgacatcttatttgttaaggaccttgccttcgtggacccggacgattgcacaccattgttgactgtcactaggttctataaccgcccactgcactgcgtatttaatgacacccgcctggataccgtcctagaggaattcaaaaagggtaaaagtcacctggcaatcgtccaacgggtgaacaatgagggcgaaggcgatcctttctacgaggtaatgggaatcgtgactctggaagatataatcgaagagattatcaaaagcgagatcctcgacgagaccgacctgtacaccgataatcgtaagaaacaacgtgttccgcaacgcgagagaaaacgccacgacttctcgctgttcaaactgtccgacaccgaaatgcgcgtgaaaatcagccctcagctgctacttgcaacacataggttcatggccaccgaagtggaacctttcaaaagcctttacctgtcagagaaaattttgctacgcctactgaagcacccaaacgtgatccaggagctcaaatttgacgaaaagaataaaaaggccccagaacactatctgtaccaaaggaataggcccgtggactacttcgtgttgctcctccagggaaaggtggaggtggaagtgggtaaagagggactccggttcgaaaacggagcctttacttactacggggtgcccgctattatgacaacggcttgctctgataacgatgttcggaaggtaggatccctcgcgggctcctccgtcttcctgaacaggtcgccttcacgctgcagtggcctgaacagatccgagtcgccaaatagggaacgtagcgactttgggggaagtaacactcagctttattcatcaagcaacaacctgtatatgccagactactctgtgcacatcctcagtgatgtgcaattcgtgaagatcaccagacagcagtaccagaatgccctcacggcatgccacatggattcatctcctcagtcccccgacatggaggccttcacagacggggactcgaccaaggctccaacaactcgagggactccgcagacgccgaaggatgatccagccattacccttttgaacaataggaatagcctgccatcctcggattctgaatgttgtaatataaatctggataccgagactagcccttgttcttcagacttcgaagaaaacgttggtaagaagctgttaagaaccctgtctggtcaaaagcggaagagatctccagagggcgaacgcacaagtgaggacaactcaaatctgaccccactaatcacctag

SEQ ID NO: 282748 - DNA, 2493 bp, Artificial Sequence
  derived and/or modified sequence
atggctgctgctgctgctgctgctgctgctgtgggcgtgcggctgcgggactgctgcagcagaggagctgtgctgctgctcttcttcagcctgagccccaggcctcctgctgctgctgcctggctgctgggcctgcggcctgaggacacagctgggggccgggtgtccctggagggcggcaccctgcgggctgctgagggcaccagcttcctgctgcgggtgtacttccagcccggccccccacgctgccgggagcagagcgactgggccagtgatgtggaggtgctgggccccctgcggcctggaggagtggccggcagcgccctggtgcagctgttcagcctgtgtgcctgggatggccgggcctggcaccaccacggggctgctgggggcttcctgctgcgggtgcggccccggctgtatggccctggaggagacctgctgcccccagcctggctgcgggccctgggcgccctgctgctgctggccctgagcgccctcttcagcggcctgcggctgagcctgctgagcctggaccctgtggagctgcgggtgctgagaaattctggcagcgctgctgagcaggagcaggccaggagagtgcaggccgtgcggggccggggcacccacctgctgtgcaccctgctgctgggccaggccggggccaatgctgccctggccggctggctgtacaccagcctgcccccaggctttggaggcactggagaggactacagcgaggagggcatccacttcccctggctgcctgccctggtgtgcacaggagctgtgttcctgggcgctgagatctgcccctacagcgtgtgcagcagacatggcctggccatcgccagccacagcgtgtgcctgacccggctgctgatggctgctgccttccctgtgtgctaccccctgggccgcctgctggactgggccctgcggcaggagatcagcaccttctacacccgggagaagctgctggagaccctgcgggctgctgacccctacagcgacctggtgaaggaggagctgaacatcatccagggcgccctggagctgcggaccaaggtggtggaggaggtgctgacccccctgggggactgcttcatgctgcggagtgatgctgtgctggactttgccaccgtgtctgagatcctgcggagcggctacacccgcatccctgtgtatgaaggagaccagaggcacaacatcgtggacatcctgtttgtgaaggacctggcctttgtggaccctgatgactgcacccccctgctgactgtgacccgcttctacaaccggcccctgcactgtgtgttcaatgacacccggctggacacagtgctggaggagttcaagaagggcaagagccacctggccatcgtgcagagggtgaacaatgaaggagagggggaccccttctatgaggtgatgggcatcgtgaccctggaggacatcatcgaggagatcatcaagtctgagatcctggatgaaacagacctgtacacagacaacaggaagaagcagagggtgccccagcgggagaggaagagacatgacttcagcctcttcaagctgagtgacacagagatgagggtgaagatcagcccccagctgctgctggccacccaccgcttcatggccacagaggtggagcccttcaagagcctgtacctgtctgagaagatcctgctgcggctgctgaagcaccccaacgtcatccaggagctgaagtttgatgagaagaacaagaaggcccctgagcactacctgtaccagaggaacagacctgtggactactttgtgctgctgctgcagggcaaggtggaggtggaggtgggcaaggagggcctgcgctttgaaaatggagccttcacctactatggagtgcctgccatcatgaccacagcctgcagcgacaatgatgtgaggaaggtgggcagcctggccggcagcagcgtcttcctgaacagaagccccagccgctgcagcggcctgaacagaagtgagagccccaaccgggagaggagtgactttggaggcagcaacacccagctgtacagcagcagcaacaacctgtacatgccagactacagcgtgcacatcctgagtgatgtgcagtttgtgaagatcacccggcagcagtaccagaatgccctgacagcctgccacatggacagcagcccccagagcccagacatggaggccttcacagatggagacagcaccaaggcccccaccacccggggcaccccccagacccccaaggatgatcctgccatcaccctgctgaacaacagaaacagcctgcccagcagtgacagcgagtgctgcaacatcaacctggacacagagaccagcccctgcagcagtgactttgaggagaatgtgggcaagaagctgctgcggaccctgagcggccagaagaggaagaggagccctgagggggagaggaccagcgaggacaacagcaacctgacccccctcatcacctag

SEQ ID NO: 282749 - DNA, 2493 bp, Artificial Sequence
  derived and/or modified sequence
atggccgccgccgccgccgccgccgccgccgtgggcgtgcggctgcgagattgctgttctcggggagccgtgcttctgctcttttttagtctgtccccgcgtcctcccgcagccgccgcctggttactaggcttacgccccgaagacacagccgggggccgcgtctcactcgagggaggaacacttcgagccgccgagggaactagtttcttactgagagtctactttcagcccggaccaccgagatgtagagaacagagcgattgggcctcagacgtagaggtattgggaccacttcgccccgggggagttgcaggttcagcactcgtgcagctgttctctctctgcgcatgggatggcagagcctggcaccaccatggggccgctggcggttttcttctgcgcgtgaggccacgattgtacggtccggggggcgaccttctgccacccgcttggctccgggctttgggagcactcctgcttctcgccctgtctgccttgtttagcggtttaaggctgtctctgctgagcctagatcccgtagagctccgcgttctgcgaaattccggaagcgcggctgagcaggagcaggctagaagagtccaggctgtcagggggcgaggcacgcacttactctgcacacttctcctgggccaggctggggccaatgctgcactagcaggctggctgtacacaagccttcctccagggttcggcggcacgggtgaagattactcagaggaaggcattcactttccttggttgcccgcattggtgtgtaccggcgctgtcttcctgggcgctgagatatgcccttactccgtgtgttcgagacacggcttggccatcgccagccactcggtgtgcctcacccgcctcttaatggctgcggcctttcccgtgtgttatcctttggggcggctgttagattgggcactccggcaggagataagcaccttctacactagggaaaaattactagagaccctgcgcgcagcagacccatattccgatctggttaaagaggaactgaatatcattcagggcgcactggagctgcgcaccaaggtagtcgaggaagtgttgaccccacttggggactgctttatgttgcggtcagatgccgtactggacttcgcaacagtgtcggaaatcctgcgctccgggtatacaaggattcctgtctacgaaggcgatcagagacataatatcgtggacattctcttcgtaaaagatctggccttcgtagaccctgatgactgcacgccactactcacggtcacccggttctataaccggccactgcattgcgtgtttaacgatactaggttagacaccgtgcttgaagagttcaaaaaaggaaagagccacctggcgatcgtccagcgagtcaacaacgagggcgagggcgatcccttctacgaagttatggggattgtcactctggaggatatcatcgaagaaatcattaaaagcgagatattggatgaaacggacctctataccgacaacaggaaaaagcagcgggtgcctcagagggagagaaaaaggcatgatttttccctttttaaactgagcgacaccgagatgcgtgtaaagatctctcctcagctgttgttagcaacccatcgcttcatggctactgaagtagagccctttaaatcactgtacctctcagagaagatcttgctaagactcttgaagcatccgaatgtcatacaggagttgaaatttgatgagaagaataagaaggcccccgagcattacctgtatcagagaaacagacctgtggactactttgtgctcctgctccaggggaaggtggaagttgaggtgggtaaagaggggttgagattcgaaaacggtgccttcacgtattacggagtgccggccatcatgactaccgcctgttctgacaatgatgtgagaaaggtaggttcactcgccggctccagtgtgttcctgaataggtcccctagccgctgttctggactgaatcggagtgaaagccctaatagagaaaggtccgatttcggggggagcaatacacaattatacagtagttctaataacctctacatgcctgactactccgtccacattctttccgacgtacagttcgtaaagatcaccaggcagcagtatcaaaatgcactgacagcatgccacatggatagcagcccccagtctccagacatggaggcattcaccgacggagattctaccaaagcccccacgacccgggggaccccccaaacacccaaggacgaccctgccatcacactgctcaacaatcggaacagcttgccctccagcgactccgaatgctgcaatattaacctcgatacggaaacttccccctgtagcagcgatttcgaagagaacgtaggtaagaaactgctgcgaaccctaagcggtcagaagcgcaagcgcagcccggagggagaacgcacatcagaggataatagtaaccttacaccattgatcacttag

SEQ ID NO: 282750 - DNA, 2493 bp, Artificial Sequence
  derived and/or modified sequence
atggctgccgcagccgcagccgcagctgcagtaggcgtacggctgagagactgctgtagcaggggggcagtcctcctgttgtttttttccctgtccccaagaccccctgccgcagctgcctggctgctcggtctgagaccagaagacaccgccggaggaagagtctccttagaaggcggtacactgagagccgctgagggtacctcttttcttcttagggtctactttcagcctgggcctccaagatgtcgggagcagtccgactgggccagcgatgtggaagttctgggacctctgaggcctggaggcgttgccggtagcgccctggttcagctgttttcactgtgcgcatgggacggaagggcatggcaccatcatggcgctgcgggaggtttccttcttcgcgtgagacctcggctgtatggcccagggggtgacctattgccccctgcatggttaagggctttgggagccttgctgttactggctctgagcgccctgttcagtgggcttcggctttccctgctctccctcgaccctgttgagttaagggtgttgcgcaactctgggagtgctgcagagcaggagcaggcaaggcgcgtgcaagctgttcgtggtagaggtacgcatctcctttgcaccctcttgctaggccaggccggagccaacgccgctctggccggatggttgtatacttctctgccccctggatttggcggtactggagaggactactccgaggaaggaatccatttcccatggctccctgccctggtgtgtactggcgcagtctttctgggagccgaaatttgtccgtactccgtctgtagtcggcacgggctggcaatcgcatcgcactcagtatgtctgaccaggttgctcatggccgcagcattccctgtgtgttatccacttggtaggttgctcgactgggctctgcgccaggagatctccacattctatacgcgagagaagctgttagaaaccctgcgcgcagctgacccttactctgacctcgtgaaggaggagctgaacattattcagggagctctggagctgcgtactaaagttgtcgaggaagtgctgactcccctgggagactgcttcatgttgcggtcagacgccgtgctggattttgcgaccgtttccgagattctgagaagtgggtataccaggatccccgtgtatgaaggcgaccaaagacataacattgtggacatactgttcgtcaaggatctagccttcgttgatccggatgattgtacaccgctgcttacagtcactaggttctacaataggcccttacattgcgtgttcaacgacacaagactggacactgtgctggaggaatttaagaagggcaaatcccacttggcaatagttcagcgcgtgaacaacgagggagaaggagacccattttacgaggtgatgggcatcgtgaccctggaagatattattgaggagatcataaagtccgagattctcgacgagaccgacctatataccgataacaggaaaaagcagagagtgcctcaacgtgagaggaagagacatgacttcagcctctttaaactatctgatacagagatgagggtgaagatttcgccacagctcctgctggcgacccataggttcatggccacagaggtcgagcctttcaagtctctatacctgtcagagaagattcttctgagattgctcaagcacccaaatgtgattcaggaactgaagttcgatgagaaaaataagaaagcaccagagcactatctttaccagagaaatcgccctgttgattacttcgtgctgttgttgcaggggaaggtcgaggtggaggtggggaaagaaggacttcggtttgagaatggagctttcacctattatggcgtacccgctattatgacgactgcttgcagtgataatgacgtgcgaaaggttgggtccctggcaggcagtagcgtgttcttgaatcgcagtccctctcgctgcagcggcctcaacaggagcgagtcccctaacagagagagatcagactttggcggatcaaatacacaactgtattctagttctaacaacttgtacatgcctgattatagcgtccacattcttagcgacgtgcagtttgtgaaaataacaaggcagcaataccagaacgccctgacggcttgccatatggattcttcaccacaatctccagacatggaggcttttaccgatggcgattcgacaaaggcaccaaccacgcgtgggacgccacagacccccaaagatgaccctgccatcactctgcttaataaccggaactctttgcccagctccgacagcgagtgctgtaatataaatttagacacggagactagcccctgtagctccgactttgaggagaatgtgggaaagaaactactaaggaccctctcaggtcagaaacggaaacgaagccccgagggtgaacggacctcagaggataactcaaatttgactccactcatcacctag

SEQ ID NO: 282751 - DNA, 5305 bp, Artificial Sequence
  derived and/or modified sequence
atggcggcggccgcggcggcggcagcagcggtgggtgtcaggctccgggactgctgcagccgaggcgctgtgctcctgctcttcttttccctgtctcctcggcccccggccgccgccgcctggctgctgggcctgcggcccgaggacactgctggaggccgcgtgtccctggaggggggcaccctgcgcgccgccgaaggcaccagcttcctcctgcgtgtctatttccagccaggaccgccgcgctgcagggagcagagcgactgggcatcggacgtggaagtcctggggcccttgcgtcccgggggcgtggcaggctcggccctggtccagctcttttcactctgcgcctgggatgggcgcgcgtggcaccaccacggcgccgccggcggcttcctgctgcgcgttcgcccgcggttgtacggcccaggcggggacctgctgccccctgcgtggctgcgggcgctcggggcgctcctgctgctagccttgtcggccctgttcagcggcctgcgcctgagcctgctgtcgctggacccggtggagttacgggtgctgcggaacagcggctcggccgccgagcaggagcaggcgcgccgcgtgcaggccgttcgcggcagggggacccatctgctctgcaccctactcctgggccaagccggagccaacgcggccctggctggctggctgtacacctcgctgccgccgggcttcgggggcaccggggaagactacagcgaagaggggatccacttcccgtggctgccggcgctcgtgtgcaccggcgcggtattcctgggcgccgaaatctgcccctactcagtgtgttcgcggcacgggctggccatcgcctcgcacagcgtgtgcctgacccggcttctgatggcagccgccttccccgtgtgctacccgctgggccgcctgctggactgggcgctgcgccaggagataagcaccttctacacgcgggagaagttgctggagacgttgcgggccgcagacccctacagtgacctggtgaaggaggagctcaacatcatacagggtgccctggagctgcgcaccaaagttgtggaggaggtgctgacccccctgggagactgcttcatgctgcgctcagacgcggtgctcgacttcgccactgtctccgagatcctgcgcagcggctacactcgcatcccagtgtacgagggtgaccagcggcacaacattgtggacattttatttgtcaaggacttggccttcgtggaccccgacgactgcaccccgctcctcactgtcacccgcttctacaaccggcccctgcattgtgttttcaatgacacccgactggacacggttctggaggagtttaagaagggaaaatctcacctggccattgtccagcgggtgaataatgagggagaaggggaccctttctatgaggtgatgggcattgtcacgctggaggatatcatagaggagattatcaagtcggagatcctggatgaaactgatctctacactgacaatcggaaaaagcagagggtcccgcaacgggagcggaagcggcatgacttctccttgtttaagctttcggacacggagatgcgggtgaagatctcaccacagcttctgctagccacacaccgcttcatggccacagaagtggagccctttaagtctctgtacctttcggagaagatcctgctccggctcctgaaacatcccaacgtgatccaggagctgaagtttgatgagaagaacaagaaggccccggaacactacctctaccagcgcaaccgccctgtggactactttgtgctgcttctacagggtaaagtggaggtggaggttggtaaggaaggccttcgctttgaaaatggagcctttacttactatggcgtcccagccatcatgaccactgcttgctcagataatgacgtgcggaaggttggaagtctggctggatcttctgtctttctaaaccggtccccttctcgctgcagtgggttgaatcgctctgagtctccaaaccgagagcgcagtgactttgggggcagcaacacccagctgtacagcagcagcaacaacctctacatgcctgactactcagtccacatcctcagcgatgtgcagtttgtgaagatcacacggcagcaatatcagaacgcactcactgcctgccacatggacagctcacctcagtcccctgacatggaggccttcacagacggggactccactaaggcccccacaacccggggcacaccccagacccctaaggatgaccccgccatcacgctcctcaacaacaggaacagcctgccgtcatcagatagtgaatgttgtaacatcaacctggatacagagaccagcccctgcagtagcgattttgaggaaaacgtgggcaagaagctgctgagaaccttgagtggccaaaaaaggaagaggtcaccagaaggagagagaacctctgaggacaactccaatttaacacctctgatcacatgacagggcaaagccagcattcactgggtgtgtgaaattccagagctttgggggagaatccaccctcccatcatctgcttcccccaaggcctcccacaggtgacagaatgttctgccttcccttccatctcttcacccctagctgtcagtttggcagattttccctcgttacctccagttcgactcagaaccttgacatggccataacagaaggaggtgcctctgatagaacatgctagaaatggtcttttccacagcatagtctgggactggaaaagagatgtctgactgcaagctgacaatgccactctgggacccctgatgctcttctttgttctttgggtcccctgatgccataggagacctatcgtcttggaacttgccattctttcctccagaacaaaatgttaactttctaacacatttcatgcatagcttggctcagaaggtgccattggcagacaggcacatgggaggctggagtaggaggtctgaagattagttcaggggatggaccaagaatttcccccagagctttaaagaagtgggactcagccatgttggcgcgtgattgacattacagcacagaaaactgttagtgactggtttcctgttagataagggttccagcagcctggggcagtatgtctcagctggaatggaaagaatgtgagatggaacctcaagtcactgtttttaccagggacacatctgttttggctcccaatcagcagtcttcaatcgatcaataattctgctctggaagagaaggaacagggagcagagagacccaactgggagccagagatggaacttcaggtcttaagtgcaaatcaaagcaaaaaacaaacaaaacttacatggaaaaactgtaagtgctgaaagcaagtttagccatgacaaaccaaagagtgcccaggtcagccaagaaagatacataatctcatgggacttcagtgggagttacacaggaatgttgaagaatcattcttctttttcatgcatttgtccttctcccacccccttactacaccctagcagatcagctgagtgtactttattccaagaacttactggatctctggtttttctcctgaagttggggcaggtgcaattccaagcataaccaccagatggcagagtgaccgcgcatacctgcttccaagaataaaacagttctgaaaagcaaccgcaaagccgggcgcggtggctcacacctgtaatcccaacagtttggaagaccgaggcgggtggatcacttgaagtcaggagtttgagaccagcctggccaacatggtgaaaccccatctctcctgggcatgtagtcccagctactcgggaggctgaggcaggagaatcgcttgaacctgggaggcagaggttgcagtgagctgagatcacaccactgcacttcatcctaggcaacagagcgagactctgtctccccccgcaaaaaaaaaaaagaaagaaagaaagagaaaagaaaagaaaagcaaccacagccagccttagggaaaacttggaagtaagtgaaatttgtcttcagaataactatctccctttctgatctgtctcctactctttagatgttctcagtcaagtactcactgaactcattgatcgagtgctgtctgctaaatctccaaaccattcccaaacctttccccgtagtataccatccagcttccctccccttcctccaaaaccctccctcccacctccccacacccattgagtcattcacaggcaggagggagactgatcattcctctgggttatctgcatctcaaaagaaaatgcttacccacaggaactgttaactcaggggttcttaacttggggtccatcaccccagggggtccatagttggacttcagagggtctatgaaacccctaaaactgtcagtatttaatgtatttattcttgtatgttttttccagagcattaaagctttcataaggttctcaaaggtctcagacctacaaagagttaaaacaaacagacaaacaaaaaaaaacactactattttaaatagtggaactttcagcccagcgtttctgcaatgcagagtgaagtggatactgggcagttcgagacaggtttttaatcataagtggtcttttcaaatgtccatcaattgatggggaaggctggcacccaccaagaagtggaagtcctcagaaattctcggcacaccctagagtattgtacaaccaacacccccacataactttgtcccctcttccccaacaacccagagcaggtgttgcagacaggagggccacagcgtgtggaagtaaagactttggagctagagaagccttttccagcaatgattattgacttcaccacaccccttgcctggcctggcctgaggctcagcagtgcatgacttctcgtagataacttcacagtcatccagtcccaacacctgctcttgcctggtaggaacaggcgaagtgtcagccctcaatgttgggtacttagacccaaaccaataaatggtgagttttgaacaagaactaccatcatgcaggcttcttgcccagctgaccactggccccggggtgcctgcctggctggtcttcatcacctgaggccaccaggctcaagccactgctgttgcattacacccatccctttgcaaaatccctatggagcctgtcaccactcccctccctatatacccccaccccacaaagattttcttcaggttaaaaaaaaagtttaaaaaaaagattttaaaataaagcatttatgaaggcttaataaattgtaaataatttttaaataaaatgaaaatgcctttcctgg

SEQ ID NO: 282752 - DNA, 2493 bp, Artificial Sequence
  derived and/or modified sequence
atggccgccgccgccgccgccgccgccgccgtgggcgtgagactgagagactgctgcagcagaggcgccgtgctgctgctgttcttcagcctgagccccagaccccccgccgccgccgcctggctgctgggcctgagacccgaggacaccgccggcggcagagtgagcctggagggcggcaccctgagagccgccgagggcaccagcttcctgctgagagtgtacttccagcccggcccccccagatgcagagagcagagcgactgggccagcgacgtggaggtgctgggccccctgagacccggcggcgtggccggcagcgccctggtgcagctgttcagcctgtgcgcctgggacggcagagcctggcaccaccacggcgccgccggcggcttcctgctgagagtgagacccagactgtacggccccggcggcgacctgctgccccccgcctggctgagagccctgggcgccctgctgctgctggccctgagcgccctgttcagcggcctgagactgagcctgctgagcctggaccccgtggagctgagagtgctgagaaacagcggcagcgccgccgagcaggagcaggccagaagagtgcaggccgtgagaggcagaggcacccacctgctgtgcaccctgctgctgggccaggccggcgccaacgccgccctggccggctggctgtacaccagcctgccccccggcttcggcggcaccggcgaggactacagcgaggagggcatccacttcccctggctgcccgccctggtgtgcaccggcgccgtgttcctgggcgccgagatctgcccctacagcgtgtgcagcagacacggcctggccatcgccagccacagcgtgtgcctgaccagactgctgatggccgccgccttccccgtgtgctaccccctgggcagactgctggactgggccctgagacaggagatcagcaccttctacaccagagagaagctgctggagaccctgagagccgccgacccctacagcgacctggtgaaggaggagctgaacatcatccagggcgccctggagctgagaaccaaggtggtggaggaggtgctgacccccctgggcgactgcttcatgctgagaagcgacgccgtgctggacttcgccaccgtgagcgagatcctgagaagcggctacaccagaatccccgtgtacgagggcgaccagagacacaacatcgtggacatcctgttcgtgaaggacctggccttcgtggaccccgacgactgcacccccctgctgaccgtgaccagattctacaacagacccctgcactgcgtgttcaacgacaccagactggacaccgtgctggaggagttcaagaagggcaagagccacctggccatcgtgcagagagtgaacaacgagggcgagggcgaccccttctacgaggtgatgggcatcgtgaccctggaggacatcatcgaggagatcatcaagagcgagatcctggacgagaccgacctgtacaccgacaacagaaagaagcagagagtgccccagagagagagaaagagacacgacttcagcctgttcaagctgagcgacaccgagatgagagtgaagatcagcccccagctgctgctggccacccacagattcatggccaccgaggtggagcccttcaagagcctgtacctgagcgagaagatcctgctgagactgctgaagcaccccaacgtgatccaggagctgaagttcgacgagaagaacaagaaggcccccgagcactacctgtaccagagaaacagacccgtggactacttcgtgctgctgctgcagggcaaggtggaggtggaggtgggcaaggagggcctgagattcgagaacggcgccttcacctactacggcgtgcccgccatcatgaccaccgcctgcagcgacaacgacgtgagaaaggtgggcagcctggccggcagcagcgtgttcctgaacagaagccccagcagatgcagcggcctgaacagaagcgagagccccaacagagagagaagcgacttcggcggcagcaacacccagctgtacagcagcagcaacaacctgtacatgcccgactacagcgtgcacatcctgagcgacgtgcagttcgtgaagatcaccagacagcagtaccagaacgccctgaccgcctgccacatggacagcagcccccagagccccgacatggaggccttcaccgacggcgacagcaccaaggcccccaccaccagaggcaccccccagacccccaaggacgaccccgccatcaccctgctgaacaacagaaacagcctgcccagcagcgacagcgagtgctgcaacatcaacctggacaccgagaccagcccctgcagcagcgacttcgaggagaacgtgggcaagaagctgctgagaaccctgagcggccagaagagaaagagaagccccgagggcgagagaaccagcgaggacaacagcaacctgacccccctgatcacctag

SEQ ID NO: 282753 - protein, 160 aa, Artificial Sequence
  derived and/or modified sequence
MLRVIVESASNIPKTKFGKPDPIVSVIFKDEKKKTKKVDNELNPVWNEILEFDLRGIPLDFSSSLGIIVKDFETIGQNKLIGTATVALKDLTGDQSRSLPYKLISLLNEKGQDTGATIDLVIGYDPPSAPHPNDLSGPSVPGMGGKLTLLKAQPPPGGGC

SEQ ID NO: 282754 - protein, 2051 aa, Artificial Sequence
  derived and/or modified sequence
MLRVIVESASNIPKTKFGKPDPIVSVIFKDEKKKTKKVDNELNPVWNEILEFDLRGIPLDFSSSLGIIVKDFETIGQNKLIGTATVALKDLTGDQSRSLPYKLISLLNEKGQDTGATIDLVIGYDPPSAPHPNDLSGPSVPGMGGDGEEDEGDEDRLDNAVRGPGPKGPVGTVSEAQLARRLTKVKNSRRMLSNKPQDFQIRVRVIEGRQLSGNNIRPVVKVHVCGQTHRTRIKRGNNPFFDELFFYNVNMTPSELMDEIISIRVYNSHSLRADCLMGEFKIDVGFVYDEPGHAVMRKWLLLNDPEDTSSGSKGYMKVSMFVLGTGDEPPPERRDRDNDSDDVESNLLLPAGIALRWVTFLLKIYRAEDIPQMDDAFSQTVKEIFGGNADKKNLVDPFVEVSFAGKKVCTNIIEKNANPEWNQVVNLQIKFPSVCEKIKLTIYDWDRLTKNDVVGTTYLHLSKIAASGGEVEDFSSSGTGAASYTVNTGETEVGFVPTFGPCYLNLYGSPREYTGFPDPYDELNTGKGEGVAYRGRILVELATFLEKTPPDKKLEPISNDDLLVVEKYQRRRKYSLSAVFHSATMLQDVGEAIQFEVSIGNYGNKFDTTCKPLASTTQYSRAVFDGNYYYYLPWAHTKPVVTLTSYWEDISHRLDAVNTLLAMAERLQTNIEALKSGIQGKIPANQLAELWLKLIDEVIEDTRYTLPLTEGKANVTVLDTQIRKLRSRSLSQIHEAAVRMRSEATDVKSTLAEIEDWLDKLMQLTEEPQNSMPDIIIWMIRGEKRLAYARIPAHQVLYSTSGENASGKYCGKTQTIFLKYPQEKNNGPKVPVELRVNIWLGLSAVEKKFNSFAEGTFTVFAEMYENQALMFGKWGTSGLVGRHKFSDVTGKIKLKREFFLPPKGWEWEGEWIVDPERSLLTEADAGHTEFTDEVYQNESRYPGGDWKPAEDTYTDANGDKAASPSELTCPPGWEWEDDAWSYDINRAVDEKGWEYGITIPPDHKPKSWVAAEKMYHTHRRRRLVRKRKKDLTQTASSTARAMEELQDQEGWEYASLIGWKFHWKQRSSDTFRRRRWRRKMAPSETHGAAAIFKLEGALGADTTEDGDEKSLEKQKHSATTVFGANTPIVSCNFDRVYIYHLRCYVYQARNLLALDKDSFSDPYAHICFLHRSKTTEIIHSTLNPTWDQTIIFDEVEIYGEPQTVLQNPPKVIMELFDNDQVGKDEFLGRSIFSPVVKLNSEMDITPKLLWHPVMNGDKACGDVLVTAELILRGKDGSNLPILPPQRAPNLYMVPQGIRPVVQLTAIEILAWGLRNMKNFQMASITSPSLVVECGGERVESVVIKNLKKTPNFPSSVLFMKVFLPKEELYMPPLVIKVIDHRQFGRKPVVGQCTIERLDRFRCDPYAGKEDIVPQLKASLLSAPPCRDIVIEMEDTKPLLASKCLSSMSTALSKMASPATVHVLDEEEEIVDWWSKFYASSGEHEKCGQYIQKGYSKLKIYNCELENVAEFEGLTDFSDTFKLYRGKSDENEDPSVVGEFKGSFRIYPLPDDPSVPAPPRQFRELPDSVPQECTVRIYIVRGLELQPQDNNGLCDPYIKITLGKKVIEDRDHYIPNTLNPVFGRMYELSCYLPQEKDLKISVYDYDTFTRDEKVGETIIDLENRFLSRFGSHCGIPEEYCVSGVNTWRDQLRPTQLLQNVARFKGFPQPILSEDGSRIRYGGRDYSLDEFEANKILHQHLGAPEERLALHILRTQGLVPEHVETRTLHSTFQPNISQRYYLRVIIWNTKDVILDEKSITGEEMSDIYVKGWIPGNEENKQKTDVHYRSLDGEGNFNWRFVFPFDYLPAEQLCIVAKKEHFWSIDQTEFRIPPRLIIQIWDNDKFSLDDYLGFLELDLRHTIIPAKSPEKCRLDMIPDLKAMNPLKAKTASLFEQKSMKGWWPCYAEKDGARVMAGKVEMTLEILNEKEADERPAGKGRDEPNMNPKLDLPNRPETSFLWFTNPCKTMKFIVWRRFKWVIIGLLFLLILLLFVAVLLYSLPNYLSMKIVKPNV

SEQ ID NO: 282755 - DNA, 483 bp, Artificial Sequence
  derived and/or modified sequence
atgctgagagtgatcgtggagagcgccagcaacatccccaagaccaagttcggcaagcccgaccccatcgtgagcgtgatcttcaaggacgagaagaagaagaccaagaaggtggacaacgagctgaaccccgtgtggaacgagatcctggagttcgacctgagaggcatccccctggacttcagcagcagcctgggcatcatcgtgaaggacttcgagaccatcggccagaacaagctgatcggcaccgccaccgtggccctgaaggacctgaccggcgaccagagcagaagcctgccctacaagctgatcagcctgctgaacgagaagggccaggacaccggcgccaccatcgacctggtgatcggctacgacccccccagcgccccccaccccaacgacctgagcggccccagcgtgcccggcatgggcggcaagctgaccctgctgaaggcccagcccccccccggcggcggctgctag

SEQ ID NO: 282756 - DNA, 6156 bp, Artificial Sequence
  derived and/or modified sequence
atgctgagagtgatcgtggagagcgccagcaacatccccaagaccaagttcggcaagcccgaccccatcgtgagcgtgatcttcaaggacgagaagaagaagaccaagaaggtggacaacgagctgaaccccgtgtggaacgagatcctggagttcgacctgagaggcatccccctggacttcagcagcagcctgggcatcatcgtgaaggacttcgagaccatcggccagaacaagctgatcggcaccgccaccgtggccctgaaggacctgaccggcgaccagagcagaagcctgccctacaagctgatcagcctgctgaacgagaagggccaggacaccggcgccaccatcgacctggtgatcggctacgacccccccagcgccccccaccccaacgacctgagcggccccagcgtgcccggcatgggcggcgacggcgaggaggacgagggcgacgaggacagactggacaacgccgtgagaggccccggccccaagggccccgtgggcaccgtgagcgaggcccagctggccagaagactgaccaaggtgaagaacagcagaagaatgctgagcaacaagccccaggacttccagatcagagtgagagtgatcgagggcagacagctgagcggcaacaacatcagacccgtggtgaaggtgcacgtgtgcggccagacccacagaaccagaatcaagagaggcaacaaccccttcttcgacgagctgttcttctacaacgtgaacatgacccccagcgagctgatggacgagatcatcagcatcagagtgtacaacagccacagcctgagagccgactgcctgatgggcgagttcaagatcgacgtgggcttcgtgtacgacgagcccggccacgccgtgatgagaaagtggctgctgctgaacgaccccgaggacaccagcagcggcagcaagggctacatgaaggtgagcatgttcgtgctgggcaccggcgacgagcccccccccgagagaagagacagagacaacgacagcgacgacgtggagagcaacctgctgctgcccgccggcatcgccctgagatgggtgaccttcctgctgaagatctacagagccgaggacatcccccagatggacgacgccttcagccagaccgtgaaggagatcttcggcggcaacgccgacaagaagaacctggtggaccccttcgtggaggtgagcttcgccggcaagaaggtgtgcaccaacatcatcgagaagaacgccaaccccgagtggaaccaggtggtgaacctgcagatcaagttccccagcgtgtgcgagaagatcaagctgaccatctacgactgggacagactgaccaagaacgacgtggtgggcaccacctacctgcacctgagcaagatcgccgccagcggcggcgaggtggaggacttcagcagcagcggcaccggcgccgccagctacaccgtgaacaccggcgagaccgaggtgggcttcgtgcccaccttcggcccctgctacctgaacctgtacggcagccccagagagtacaccggcttccccgacccctacgacgagctgaacaccggcaagggcgagggcgtggcctacagaggcagaatcctggtggagctggccaccttcctggagaagaccccccccgacaagaagctggagcccatcagcaacgacgacctgctggtggtggagaagtaccagagaagaagaaagtacagcctgagcgccgtgttccacagcgccaccatgctgcaggacgtgggcgaggccatccagttcgaggtgagcatcggcaactacggcaacaagttcgacaccacctgcaagcccctggccagcaccacccagtacagcagagccgtgttcgacggcaactactactactacctgccctgggcccacaccaagcccgtggtgaccctgaccagctactgggaggacatcagccacagactggacgccgtgaacaccctgctggccatggccgagagactgcagaccaacatcgaggccctgaagagcggcatccagggcaagatccccgccaaccagctggccgagctgtggctgaagctgatcgacgaggtgatcgaggacaccagatacaccctgcccctgaccgagggcaaggccaacgtgaccgtgctggacacccagatcagaaagctgagaagcagaagcctgagccagatccacgaggccgccgtgagaatgagaagcgaggccaccgacgtgaagagcaccctggccgagatcgaggactggctggacaagctgatgcagctgaccgaggagccccagaacagcatgcccgacatcatcatctggatgatcagaggcgagaagagactggcctacgccagaatccccgcccaccaggtgctgtacagcaccagcggcgagaacgccagcggcaagtactgcggcaagacccagaccatcttcctgaagtacccccaggagaagaacaacggccccaaggtgcccgtggagctgagagtgaacatctggctgggcctgagcgccgtggagaagaagttcaacagcttcgccgagggcaccttcaccgtgttcgccgagatgtacgagaaccaggccctgatgttcggcaagtggggcaccagcggcctggtgggcagacacaagttcagcgacgtgaccggcaagatcaagctgaagagagagttcttcctgccccccaagggctgggagtgggagggcgagtggatcgtggaccccgagagaagcctgctgaccgaggccgacgccggccacaccgagttcaccgacgaggtgtaccagaacgagagcagataccccggcggcgactggaagcccgccgaggacacctacaccgacgccaacggcgacaaggccgccagccccagcgagctgacctgcccccccggctgggagtgggaggacgacgcctggagctacgacatcaacagagccgtggacgagaagggctgggagtacggcatcaccatcccccccgaccacaagcccaagagctgggtggccgccgagaagatgtaccacacccacagaagaagaagactggtgagaaagagaaagaaggacctgacccagaccgccagcagcaccgccagagccatggaggagctgcaggaccaggagggctgggagtacgccagcctgatcggctggaagttccactggaagcagagaagcagcgacaccttcagaagaagaagatggagaagaaagatggcccccagcgagacccacggcgccgccgccatcttcaagctggagggcgccctgggcgccgacaccaccgaggacggcgacgagaagagcctggagaagcagaagcacagcgccaccaccgtgttcggcgccaacacccccatcgtgagctgcaacttcgacagagtgtacatctaccacctgagatgctacgtgtaccaggccagaaacctgctggccctggacaaggacagcttcagcgacccctacgcccacatctgcttcctgcacagaagcaagaccaccgagatcatccacagcaccctgaaccccacctgggaccagaccatcatcttcgacgaggtggagatctacggcgagccccagaccgtgctgcagaacccccccaaggtgatcatggagctgttcgacaacgaccaggtgggcaaggacgagttcctgggcagaagcatcttcagccccgtggtgaagctgaacagcgagatggacatcacccccaagctgctgtggcaccccgtgatgaacggcgacaaggcctgcggcgacgtgctggtgaccgccgagctgatcctgagaggcaaggacggcagcaacctgcccatcctgcccccccagagagcccccaacctgtacatggtgccccagggcatcagacccgtggtgcagctgaccgccatcgagatcctggcctggggcctgagaaacatgaagaacttccagatggccagcatcaccagccccagcctggtggtggagtgcggcggcgagagagtggagagcgtggtgatcaagaacctgaagaagacccccaacttccccagcagcgtgctgttcatgaaggtgttcctgcccaaggaggagctgtacatgccccccctggtgatcaaggtgatcgaccacagacagttcggcagaaagcccgtggtgggccagtgcaccatcgagagactggacagattcagatgcgacccctacgccggcaaggaggacatcgtgccccagctgaaggccagcctgctgagcgcccccccctgcagagacatcgtgatcgagatggaggacaccaagcccctgctggccagcaagtgcctgagcagcatgagcaccgccctgagcaagatggccagccccgccaccgtgcacgtgctggacgaggaggaggagatcgtggactggtggagcaagttctacgccagcagcggcgagcacgagaagtgcggccagtacatccagaagggctacagcaagctgaagatctacaactgcgagctggagaacgtggccgagttcgagggcctgaccgacttcagcgacaccttcaagctgtacagaggcaagagcgacgagaacgaggaccccagcgtggtgggcgagttcaagggcagcttcagaatctaccccctgcccgacgaccccagcgtgcccgccccccccagacagttcagagagctgcccgacagcgtgccccaggagtgcaccgtgagaatctacatcgtgagaggcctggagctgcagccccaggacaacaacggcctgtgcgacccctacatcaagatcaccctgggcaagaaggtgatcgaggacagagaccactacatccccaacaccctgaaccccgtgttcggcagaatgtacgagctgagctgctacctgccccaggagaaggacctgaagatcagcgtgtacgactacgacaccttcaccagagacgagaaggtgggcgagaccatcatcgacctggagaacagattcctgagcagattcggcagccactgcggcatccccgaggagtactgcgtgagcggcgtgaacacctggagagaccagctgagacccacccagctgctgcagaacgtggccagattcaagggcttcccccagcccatcctgagcgaggacggcagcagaatcagatacggcggcagagactacagcctggacgagttcgaggccaacaagatcctgcaccagcacctgggcgcccccgaggagagactggccctgcacatcctgagaacccagggcctggtgcccgagcacgtggagaccagaaccctgcacagcaccttccagcccaacatcagccagagatactacctgagagtgatcatctggaacaccaaggacgtgatcctggacgagaagagcatcaccggcgaggagatgagcgacatctacgtgaagggctggatccccggcaacgaggagaacaagcagaagaccgacgtgcactacagaagcctggacggcgagggcaacttcaactggagattcgtgttccccttcgactacctgcccgccgagcagctgtgcatcgtggccaagaaggagcacttctggagcatcgaccagaccgagttcagaatcccccccagactgatcatccagatctgggacaacgacaagttcagcctggacgactacctgggcttcctggagctggacctgagacacaccatcatccccgccaagagccccgagaagtgcagactggacatgatccccgacctgaaggccatgaaccccctgaaggccaagaccgccagcctgttcgagcagaagagcatgaagggctggtggccctgctacgccgagaaggacggcgccagagtgatggccggcaaggtggagatgaccctggagatcctgaacgagaaggaggccgacgagagacccgccggcaagggcagagacgagcccaacatgaaccccaagctggacctgcccaacagacccgagaccagcttcctgtggttcaccaacccctgcaagaccatgaagttcatcgtgtggagaagattcaagtgggtgatcatcggcctgctgttcctgctgatcctgctgctgttcgtggccgtgctgctgtacagcctgcccaactacctgagcatgaagatcgtgaagcccaacgtgtag

SEQ ID NO: 282757 - DNA, 483 bp, Artificial Sequence
  derived and/or modified sequence
atgctgagggtaatcgtggaaagtgccagcaatatccccaaaaccaagttcggaaagcctgacccaattgtatcagtaatcttcaaggatgagaagaaaaaaacaaaaaaggtggataatgaattgaatcccgtgtggaacgagattctggagtttgacctcagaggtatcccactggatttcagttcctccttgggcattatcgtcaaggactttgagaccattggacagaataaactgattggaacagcaaccgtggcacttaaggacctgacgggagatcagtctcgcagtttgccgtataagctcatttccctgctgaatgagaagggccaggataccggcgccacgatcgacctggtaattggctacgatcctccatccgccccacatccaaacgatctgagtggaccaagtgtgcccggaatggggggtaagctgacccttctcaaggcacagcccccaccaggaggggggtgctag

SEQ ID NO: 282758 - DNA, 6156 bp, Artificial Sequence
  derived and/or modified sequence
atgctccgagtgatcgtggaatcagcctctaacattcccaaaactaagttcggaaaaccagatccaattgtgagtgtcatattcaaagacgaaaagaagaaaactaagaaggtggataacgaactgaatcccgtatggaacgagattctcgagtttgacctacgaggtatcccactcgacttctctagctccctgggcatcattgttaaagactttgagacaataggacagaacaaactgatcgggacggccaccgtggcactgaaggacctgaccggtgaccagtcccgatcactgccttataaacttatcagtctcctgaatgaaaaagggcaggatacaggcgctactattgatctggttatcgggtatgaccctccatccgctccacatcccaacgatctgtccggtccatccgtcccagggatgggtggcgatggggaagaggatgagggggacgaagacagacttgacaacgccgtgcgagggcctggcccaaaaggacccgtgggtaccgtttcagaggctcaattagctcgccgcctgaccaaagtgaagaattctcgccgaatgctctcaaataaacctcaagatttccaaatcagggtgcgggtaattgagggccgacagttgagtggcaataacatccggcccgttgtcaaggtgcacgtgtgtgggcagacccataggacacgcatcaaacggggaaataatcctttctttgatgaactgttcttctacaacgtgaatatgactccaagcgaattaatggacgaaatcatttccattagagtgtacaacagccacagcctgcgcgccgattgcctgatgggcgaatttaagatcgatgttggctttgtgtacgacgagcctggacacgcagtgatgaggaagtggttgctgctcaacgaccctgaggatacaagcagcggctccaaaggttacatgaaagttagtatgttcgttctcggtactggagacgaaccccccccagagaggcgtgatcgtgacaacgatagcgacgacgtagaatctaatcttcttctgcctgcgggcattgcgctcagatgggttacattccttcttaaaatctacagagctgaagacatcccacagatggatgatgcttttagccagactgtaaaggagatctttggtggcaacgccgataagaaaaacctagtggatccttttgtcgaagtaagctttgccggaaaaaaggtctgtaccaacatcattgagaagaatgcaaacccggagtggaaccaagtcgtcaatctgcagatcaagttcccaagcgtctgtgagaagataaaactgaccatatacgactgggaccgcttaaccaagaatgatgttgtcggtacaacataccttcacctgtccaaaatcgccgcaagtggaggcgaagtggaagatttctctagttcgggcactggcgccgcatcatacacagtaaatactggggagacagaggtaggattcgtgccaaccttcggaccatgttacctcaacctttacggtagccccagggaatatacgggattccccgacccatacgatgagctgaacaccggtaaaggggaaggggtcgcctatcggggcaggatcctagttgaattggctacctttctggagaagactccacccgacaaaaaattagaaccaatctctaacgatgatctcctcgttgtcgaaaagtatcaacgtcggagaaagtattctctctctgcagtcttccactccgccactatgcttcaagacgtcggagaagccatccagtttgaagtgtctatcggcaattatgggaataaattcgacacgacctgcaaacctttggcttccactactcagtatagtcgcgcggtgtttgatggaaactattactattacctcccgtgggcgcacaccaagcctgtagtgaccctgactagctattgggaggatatttcccatcgattggacgcagttaacaccctgctggccatggccgagcgtttacagacaaacattgaagcattgaagagcggcattcaaggaaagatccccgcaaaccagctggccgagctgtggctgaaacttatagacgaggtaatcgaggatacccgatatacactgcctttaactgagggaaaagccaatgtgaccgtcttggatacccaaatccggaagcttaggagtaggtccttgagccaaattcatgaagccgctgtgcgcatgagatcagaggcgaccgatgtgaagtccacattggccgagatcgaagattggctcgataagctgatgcagctgaccgaagagccccagaactccatgccagacatcatcatctggatgatacgcggtgagaagcgcttggcctatgcacggattcctgctcaccaagtcctttattctacctcaggagagaacgcttcggggaaatattgtggcaaaacgcaaacaatttttctcaagtatccccaggagaaaaataacggcccaaaagttcctgtggagctaagagttaacatttggctcgggcttagcgcggttgagaagaagtttaattcttttgccgaagggacctttactgtttttgccgagatgtatgagaaccaagccttgatgttcggaaagtggggcactagtggcctggtcggccggcacaaattttcagacgttacaggcaaaatcaagctcaaaagagagttcttcctacctccaaaggggtgggaatgggagggtgagtggatcgtggatccggagcggtctctactgacagaggccgacgccggccatacagagttcaccgacgaagtgtaccaaaatgaatcgcgctacccaggtggcgactggaaaccggcggaagatacttataccgacgctaacggggataaagcagcttcgccgtccgaactcacctgcccaccagggtgggagtgggaggacgatgcttggtcatacgatattaacagagctgttgacgaaaaaggttgggagtatgggatcactatcccccccgatcacaagcccaagtcctgggttgcagcagaaaaaatgtaccatactcatagacggcggagactggttaggaagcggaagaaggatctgacacagactgcatccagtactgcgcgcgccatggaagagctccaggaccaggagggatgggagtatgcgtctctgattggctggaagtttcactggaagcaacgcagttcggataccttccgtagacggaggtggaggcggaagatggccccgagcgagacgcacggcgcagccgcgatctttaagctggaaggcgcgttgggcgccgatactacagaagacggcgatgagaagagtctagaaaagcagaagcattcggccacaacagtgttcggggcaaataccccaatagtctcatgtaactttgatcgggtttatatctaccatctgcgttgttacgtctatcaagcaaggaatctgcttgcattagataaggactccttttctgatccctatgcgcacatctgctttctgcacaggtccaagacgactgaaatcattcactctaccctaaatccaacttgggaccagaccatcatcttcgacgaggtcgagatttacggggagccccagactgtgctccagaacccccccaaagtgattatggagctgtttgataatgaccaggtcggcaaggacgagttcttaggacgcagtatattctcccctgtagtgaagctaaattcggagatggatatcactcctaagctgctgtggcatcccgttatgaacggtgataaggcctgcggcgatgtccttgtgactgccgaactgattttgcgcggaaaagatgggtccaaccttccaattctaccgccccagagggcccctaacttatacatggtaccacaggggatccggcccgtggttcaactgaccgccatagagatcctggcttgggggctcagaaacatgaagaatttccagatggcaagcataacatcaccatctttggtggttgagtgtggaggggagcgggtggagtcagttgtgataaagaatctcaaaaaaacacccaactttccaagctctgttctgtttatgaaagtgtttctgccaaaagaagagctgtatatgccccccttggtcatcaaggtgatcgatcatcgacagttcgggagaaagcccgtggtcggccagtgcaccattgagcggctagaccgatttcgttgcgacccatatgcgggaaaggaggacattgttcctcagttgaaagcgagcctgttgagtgcacctccttgtagggacatagtgatcgaaatggaagacacgaagcccctgctagcaagtaagtgcctttcatcaatgtccacggcgctgtctaagatggcctctcccgctacagtacacgtgctggacgaggaagaggagatcgtggattggtggagcaagttctacgccagttccggggaacatgaaaaatgtggccagtacatccagaaagggtactccaagttgaagatctacaattgcgagctggaaaacgttgctgaatttgagggactgaccgattttagtgacacctttaagctgtacaggggaaagagtgacgagaatgaggatccctccgtggtaggggaatttaaagggagcttccgcatttatcccctccccgatgatccttccgtgcctgctccaccccgccagtttcgcgagctgccggactctgtaccacaggaatgcactgtacggatttatatcgtgcgcggcctcgagctgcagccacaggacaataatgggctctgcgatccttatattaaaatcacccttggaaagaaagtcatcgaggatagggatcattatattcccaatacgcttaatccagttttcggccgcatgtacgagcttagctgttacctgcctcaggagaaagacttgaagatctccgtgtatgactatgacacctttacacgggacgagaaagtcggcgaaactattattgatttggaaaacaggtttctctcacggttcggtagtcactgtggaattcccgaagagtactgcgtgagcggagtgaacacctggcgggaccagctgagacccacccaactgttacaaaacgtggcaagattcaagggcttcccgcaacctatcttgagtgaggatggatcccggatccggtatggcggtcgggactactccttggacgagtttgaggctaataagatcctgcaccagcacttaggcgctcccgaggaacgtctggctctgcatatcctgagaactcagggcctggttcctgaacacgtggagacccgaacccttcacagtacatttcaacccaacatctcccagcgttattacctccgcgtaattatctggaataccaaagatgtgatcctcgatgagaagtcgattaccggagaggagatgtctgacatctacgtgaagggctggatacctggaaacgaagaaaacaaacagaagactgatgtacactatcgttctctagatggtgaaggcaattttaactggagatttgtattcccttttgattaccttcccgccgaacagctgtgtatagttgccaaaaaggagcatttctggtccatcgaccagacagagttcagaataccaccacggctaatcatccaaatatgggacaatgacaagttctccctcgacgactatcttggattcttagaactggatttaagacatacgatcatccctgcgaagtccccggaaaagtgcagactggacatgatccctgacctgaaggccatgaatcccctaaaagcaaaaaccgcgagcctgtttgaacagaagtccatgaaggggtggtggccttgctatgcggagaaagatggagcgcgcgtgatggccggcaaagtggaaatgaccctggaaattttgaatgagaaggaagcagatgagcgaccggccggcaaaggacgggacgagccaaacatgaatccgaaactggacctgcccaatagaccagagacttctttcctctggttcaccaatccatgtaagaccatgaagttcattgtgtggcgtcgtttcaagtgggtgataataggacttctgtttctcctgattttgttgctgttcgtcgctgtgctcctgtacagcctgccaaactaccttagtatgaaaattgtgaagcctaacgtttag

SEQ ID NO: 282759 - DNA, 483 bp, Artificial Sequence
  derived and/or modified sequence
atgctgcgggtgattgtggagagcgccagcaacatccccaagaccaagtttgggaagccagaccccatcgtgtctgtcatcttcaaggatgagaagaagaagaccaagaaggtggacaatgagctgaaccctgtgtggaatgagatcctggagtttgacctgcggggcatccccctggacttcagcagcagcctgggcatcatcgtgaaggactttgagaccatcggccagaacaagctgattggaacagccaccgtggccctgaaggacctgaccggggaccagagccgcagcctgccctacaagctgatcagcctgctgaatgagaagggccaggacaccggggccaccatcgacctggtgattggctatgacccccccagcgccccccaccccaatgacctgagcggccccagcgtgcccggcatgggcggcaagctgaccctgctgaaggcccagcccccacctgggggcggctgctag

SEQ ID NO: 282760 - DNA, 6156 bp, Artificial Sequence
  derived and/or modified sequence
atgctgcgggtgattgtggagagcgccagcaacatccccaagaccaagtttgggaagccagaccccatcgtgtctgtcatcttcaaggatgagaagaagaagaccaagaaggtggacaatgagctgaaccctgtgtggaatgagatcctggagtttgacctgcggggcatccccctggacttcagcagcagcctgggcatcatcgtgaaggactttgagaccatcggccagaacaagctgattggaacagccaccgtggccctgaaggacctgaccggggaccagagccgcagcctgccctacaagctgatcagcctgctgaatgagaagggccaggacaccggggccaccatcgacctggtgattggctatgacccccccagcgccccccaccccaatgacctgagcggccccagcgtgcccggcatgggaggagatggagaagaagatgaaggagatgaggaccggctggacaatgctgtgcggggccctggccccaagggccctgtgggcaccgtgtctgaggcccagctggcccggcggctgaccaaggtgaagaacagcaggaggatgctgagcaacaagccccaggacttccagatccgggtgcgggtcatcgagggccggcagctgagcggcaacaacatccggcctgtggtgaaggtgcacgtgtgtggccagacccacaggacccgcatcaagaggggcaacaaccccttctttgatgagctgttcttctacaacgtgaacatgacccccagcgagctgatggatgagatcatcagcatccgggtgtacaacagccacagcctgcgggctgactgcctgatgggagagttcaagattgatgtgggctttgtgtatgatgagcccggccatgctgtgatgaggaagtggctgctgctgaatgaccctgaggacaccagcagcggcagcaagggctacatgaaggtgtccatgtttgtgctgggcactggagatgagcccccacctgagcggcgggaccgggacaatgacagtgatgatgtggagagcaacctgctgctgcctgctggcatcgccctgcgctgggtgaccttcctgctgaagatctacagagctgaggacatcccccagatggatgatgccttcagccagacagtgaaggagatctttggaggaaatgctgacaagaagaacctggtggacccctttgtggaggtgtcctttgctgggaagaaggtgtgcaccaacatcatcgagaagaatgccaaccctgagtggaaccaggtggtgaacctgcagatcaagttccccagcgtgtgtgagaagatcaagctgaccatctatgactgggaccggctgaccaagaatgatgtggtgggcaccacctacctgcacctgagcaagattgctgccagcggcggggaggtggaggacttcagcagcagcggcactggagctgccagctacacagtgaacacaggagaaacagaggtgggctttgtgcccaccttcggcccctgctacctgaacctgtatggcagcccccgggagtacacaggcttcccagacccctatgatgagctgaacacaggaaaaggagagggcgtggcctaccggggccgcatcctggtggagctggccaccttcctggagaagaccccaccagacaagaagctggagcccatcagcaatgatgacctgctggtggtggagaagtaccagaggaggaggaagtacagcctgtctgctgtgttccacagcgccaccatgctgcaggatgtgggggaggccatccagtttgaggtgtccatcggcaactacggcaacaagtttgacaccacctgcaagcccctggccagcaccacccagtacagcagagctgtgtttgatggcaactactactactacctgccctgggcccacaccaagcctgtggtgaccctgaccagctactgggaggacatcagccaccggctggatgctgtgaacaccctgctggccatggccgagcggctgcagaccaacatcgaggccctgaagagcggcatccagggcaagatcccagccaaccagctggccgagctgtggctgaagctgattgatgaggtgattgaggacacccgctacaccctgcccctgacagagggcaaggccaacgtgacagtgctggacacccagatcaggaagctgcggagccgcagcctgagccagatccacgaggccgctgtgaggatgaggtctgaggccacagatgtgaagagcaccctggccgagattgaggactggctggacaagctgatgcagctgacagaggagccccagaacagcatgccagacatcatcatctggatgatccggggggagaagaggctggcctatgcccgcatcccagcccaccaggtgctgtacagcaccagcggagaaaatgccagcggcaagtactgtgggaagacccagaccatcttcctgaagtacccccaggagaagaacaacggccccaaggtgcctgtggagctgcgggtgaacatctggctgggcctgtctgctgtggagaagaagttcaacagctttgctgagggcaccttcaccgtgtttgctgagatgtatgagaaccaggccctgatgtttgggaagtggggcaccagcggcctggtgggccgccacaagttcagtgatgtgacaggcaagatcaagctgaagcgggagttcttcctgccccccaagggctgggagtgggagggggagtggatcgtggaccctgagaggagcctgctgacagaagcagatgctggccacacagagttcacagatgaggtgtaccagaatgaaagccgctacccaggaggagactggaagccagctgaggacacctacacagatgccaatggagacaaggccgccagccccagcgagctgacctgccccccaggctgggagtgggaggatgatgcctggagctatgacatcaacagagctgtggatgagaagggctgggagtatggcatcaccatccccccagaccacaagcccaagtcctgggtggccgctgagaagatgtaccacacccacagaagaagaaggctggtgaggaagaggaagaaggacctgacccagacagccagcagcacagcccgggccatggaggagctgcaggaccaggagggctgggagtatgccagcctgattggctggaagttccactggaagcagaggagcagtgacaccttcagaagaagacgctggaggaggaagatggcccccagcgagacccacggggctgctgccatcttcaagctggagggcgccctgggcgctgacaccacagaagatggagatgagaagagcctggagaagcagaagcacagcgccaccaccgtgtttggagccaacacccccatcgtgtcctgcaactttgacagagtgtacatctaccacctgcgctgctacgtgtaccaggccaggaacctgctggccctggacaaggacagcttcagtgacccctatgcccacatctgcttcctgcacaggagcaagaccacagagatcatccacagcaccctgaaccccacctgggaccagaccatcatctttgatgaggtggagatctacggggagccccagacagtgctgcagaacccccccaaggtgatcatggagctgtttgacaatgaccaggtgggcaaggatgagttcctgggccgcagcatcttcagccctgtggtgaagctgaacagcgagatggacatcacccccaagctgctgtggcaccctgtgatgaatggagacaaggcctgtggagatgtgctggtgacagctgagctgatcctgcggggcaaggatggcagcaacctgcccatcctgcccccccagagggcccccaacctgtacatggtgccccagggcatccggcctgtggtgcagctgacagccatcgagatcctggcctggggcctgaggaacatgaagaacttccagatggccagcatcaccagccccagcctggtggtggagtgtggcggggagcgggtggagagcgtggtgatcaagaacctgaagaagacccccaacttccccagctctgtgctcttcatgaaggtgttcctgcccaaggaggagctgtacatgccacccctggtgatcaaggtgattgaccaccggcagtttggaaggaagcctgtggtgggccagtgcaccatcgagcggctggaccgcttccgctgtgacccctatgctgggaaggaggacatcgtgccccagctgaaggccagcctgctgagcgccccaccctgccgggacatcgtcatcgagatggaggacaccaagcccctgctggccagcaagtgcctgagctccatgagcacagccctgagcaagatggccagccctgccaccgtgcacgtgctggatgaggaggaggagatcgtggactggtggagcaagttctacgccagcagcggggagcacgagaagtgtggccagtacatccagaagggctacagcaagctgaagatctacaactgtgagctggagaatgtggccgagtttgagggcctgacagacttcagtgacaccttcaagctgtaccggggcaagagtgatgaaaatgaagaccccagcgtggtgggggagttcaagggcagcttccgcatctaccccctgcctgatgaccccagcgtgcctgccccaccccggcagttccgggagctgcctgattctgtgccccaggagtgcaccgtgcgcatctacatcgtgcggggcctggagctgcagccccaggacaacaacggcctgtgtgacccctacatcaagatcaccctgggcaagaaggtgattgaagatcgggaccactacatccccaacaccctgaaccctgtgtttggaaggatgtatgagctgagctgctacctgccccaggagaaggacctgaagatctctgtgtatgactatgacaccttcaccagagatgagaaggtgggggagaccatcatcgacctggagaaccgcttcctgagccgcttcggcagccactgcggcatccctgaggagtactgtgtgtctggagtgaacacctggagggaccagctgcggcccacccagctgctgcagaatgtggcccgcttcaagggcttcccccagcccatcctgtctgaagatggcagccgcatccgctatggaggccgggactacagcctggatgaatttgaggccaacaagatcctgcaccagcacctgggcgcccctgaggagcggctggccctgcacatcctgcggacccagggcctggtgcctgagcacgtggagaccaggaccctgcacagcaccttccagcccaacatcagccagcgctactacctgcgggtcatcatctggaacaccaaggatgtgatcctggatgagaagagcatcaccggggaggagatgtctgacatctacgtgaagggctggatccctggaaatgaggagaacaagcagaagacagatgtgcactaccgcagcctggatggagagggcaacttcaactggaggtttgtgttcccctttgactacctgcctgctgagcagctgtgcatcgtggccaagaaggagcacttctggagcattgaccagacagagttccgcatcccccccaggctcatcatccagatctgggacaatgacaagttcagcctggatgactacctgggcttcctggagctggacctgcggcacaccatcatcccagccaagagccctgagaagtgccgcctggacatgatcccagacctgaaggccatgaaccccctgaaggccaagacagccagcctgtttgagcagaagtccatgaagggctggtggccctgctacgccgagaaggatggagcccgggtgatggccggcaaggtggagatgaccctggagatcctgaatgagaaggaggctgatgagaggcctgctgggaagggcagagatgagcccaacatgaaccccaagctggacctgcccaacagacctgagaccagcttcctgtggttcaccaacccctgcaagaccatgaagttcatcgtgtggaggcgcttcaagtgggtgatcatcggcctgctcttcctgctgatcctgctgctgtttgtggccgtgctgctgtacagcctgcccaactacctgtccatgaagatcgtgaagcccaacgtgtag

SEQ ID NO: 282761 - DNA, 763 bp, Artificial Sequence
  derived and/or modified sequence
atgctgcgagtgattgtggaatctgccagcaatatccctaaaacgaaatttggcaagccggatcctattgtttctgtcatttttaaggatgagaaaaagaaaacaaagaaagttgataatgaattgaaccctgtctggaatgagattttggagtttgacttgaggggtataccactggacttttcatcttcccttgggattattgtgaaagattttgagacaattggacaaaataaattaattggcacggcgactgtagccctgaaggacctgactggtgaccagagcagatccctgccgtacaagctgatctccctgctaaatgaaaaagggcaagatactggggccaccattgacttggtgatcggctatgatccgccttctgctccacatccaaatgacctgagcgggcccagcgtgccaggcatgggaggtaagctgacccttctgaaggcccagccacccccagggggaggctgctaaagacacacaggagagtgtctggagaaaccctgccattgatcacaagcctgtagctccctgcccacccagacaggggccccgagaggcaggtggggctgcctgaattgggacattgcaattgtttatgaaatgcccttcaaggtagaggggaagggtgaaccaaccctttactgaacaacctcacggtgagcacaaaaagcacatgccggctccagcagaatgtcccagggctttgcttcaggtttgtggcttccaccccatacagtgtctccaggctgtt

SEQ ID NO: 282762 - DNA, 6812 bp, Artificial Sequence
  derived and/or modified sequence
gccctgggagaaatcctcccttcactgggagagaacttctctcccagggcggtgcgacccggagctccagcgccctagtctccacttcgtttgctgaaacttgctttctaccagctaagaaccatgctgcgagtgattgtggaatctgccagcaatatccctaaaacgaaatttggcaagccggatcctattgtttctgtcatttttaaggatgagaaaaagaaaacaaagaaagttgataatgaattgaaccctgtctggaatgagattttggagtttgacttgaggggtataccactggacttttcatcttcccttgggattattgtgaaagattttgagacaattggacaaaataaattaattggcacggcgactgtagccctgaaggacctgactggtgaccagagcagatccctgccgtacaagctgatctccctgctaaatgaaaaagggcaagatactggggccaccattgacttggtgatcggctatgatccgccttctgctccacatccaaatgacctgagcgggcccagcgtgccaggcatgggaggagatggggaagaagatgaaggtgatgaagacaggttggacaatgcagtcaggggccctgggcccaaggggccagttgggacggtgtcggaagctcagcttgctcggaggctcaccaaagtaaagaacagccggcggatgctgtcaaataagccacaggacttccagatccgcgtccgagtgattgagggccgacagttaagtggtaacaacataaggcctgtggtcaaagttcacgtctgtggccagacacaccgaacaagaatcaagagaggaaacaaccctttttttgatgagttgtttttctacaatgtcaacatgaccccttctgaattgatggatgagatcatcagcatccgggtttataattctcactctctgcgggcagattgtctgatgggggaatttaagattgatgttggatttgtttatgatgaacctggccatgctgtcatgagaaagtggcttcttctcaatgacccggaagataccagttcaggttctaaaggttatatgaaagtcagcatgtttgtcctgggaaccggagatgagcctcctcctgagagacgagatcgtgataatgacagtgatgatgtggagagtaatttgttactccctgctggcattgccctccggtgggtgaccttcttgctgaaaatctaccgagctgaggacatcccccagatggatgatgccttctcacagacagtaaaggaaatatttggaggcaatgcagataagaaaaatctcgtggatccttttgtagaagtttcctttgctggaaaaaaggtttgtacaaacataattgagaaaaatgcaaacccagagtggaatcaggtcgtcaatcttcagatcaagtttccttcagtgtgtgaaaaaataaaactaacaatatatgactgggaccgtcttactaaaaatgatgtagttggaacaacatatctacacctctctaaaattgctgcctctggtggggaagtggaagatttctcatcttcgggaactggggctgcatcatatacagtaaacacaggagaaacagaggtaggctttgttccaacgtttggaccttgttacctgaatctttatggaagccccagagagtacacgggattcccagacccctatgatgagctgaatactggaaagggggaaggagttgcctacagaggcaggatcttggttgaattagccacttttcttgagaagacaccaccagataaaaagcttgagcccatttcaaatgatgacctgctggttgttgagaaataccagcgaaggcggaagtacagcctgtctgccgtgtttcattcagccaccatgttgcaagatgttggtgaggccattcagtttgaagtcagcattgggaactatggcaacaagtttgacaccacctgtaagcctttggcatcaacaactcagtacagccgtgctgtatttgatggcaactactattattacttgccttgggcccacaccaagccagttgttaccctgacttcatactgggaggatattagtcatcgcctggatgcggtgaacactctcctagctatggcagaacggctgcaaacaaatatagaagctctaaaatcagggatacaaggtaaaattcctgcaaaccagctggctgaattgtggctgaagctgatagatgaagttatagaagacacgagatacacgttgcctctcacagaaggaaaagccaacgtcacagttctcgatactcagatccgaaagctgcggtccaggtctctctcccaaatacatgaggcggctgtgaggatgaggtcggaagccacagatgtgaagtccacactggcagaaattgaggactggcttgataaattaatgcagctgactgaagagccacagaacagcatgcctgacatcatcatctggatgatccggggagagaagagactggcctatgcacgaattcccgcacatcaggtcttgtactccaccagtggtgagaatgcatctggaaaatactgtgggaaaacccaaaccatctttctgaagtatccacaggagaaaaacaacgggccaaaggtgcctgtggagttgcgagtgaacatctggctaggcttaagtgctgtggagaagaagtttaacagcttcgcagaaggaactttcaccgtctttgctgaaatgtatgaaaatcaagctctcatgtttggaaaatggggtacttctggattagtaggacgtcataagttttctgatgtcacaggaaaaataaaactcaagagggaattttttctgcctccaaaaggctgggaatgggaaggagagtggatagttgatcctgaaagaagcttgctgactgaggcagatgcaggtcacacggagttcactgatgaagtctatcagaacgagagccgctaccccgggggcgactggaagccggccgaggacacctacacggatgcgaacggcgataaagcagcatcacccagcgagttgacttgtcctccaggttgggaatgggaagatgatgcatggtcttatgacataaatcgagcggtggatgagaaaggctgggaatatggaatcaccattcctcctgatcataagcccaaatcctgggttgcagcagagaaaatgtaccacactcatagacggcgaaggctggtccgaaaacgcaagaaagatttaacacagactgcttcaagcaccgcaagggccatggaggaattgcaagaccaagagggctgggaatatgcttctctaattggctggaaatttcactggaaacaacgtagttcagataccttccgccgcagacgctggaggagaaaaatggctccttcagaaacacatggtgcagctgccatctttaaacttgaaggtgcccttggggcagacactaccgaagatggggatgagaagagcctggagaaacagaagcacagtgccaccactgtgttcggagcaaacacccccattgtttcctgcaattttgacagagtctacatctaccatctgcgctgctatgtctatcaagccagaaacctcttggctttagataaggatagcttttcagatccatatgctcatatctgtttcctccatcggagcaaaaccactgagatcatccattcaaccctgaatcccacgtgggaccaaacaattatattcgatgaagttgaaatctatggggaaccccaaacagttctacagaatccacccaaagttatcatggaactttttgacaatgaccaagtgggcaaagatgaatttttaggacgaagcattttctctcctgtggtgaaactgaactcagaaatggacatcacacccaaacttctctggcacccagtaatgaatggagacaaagcctgcggggatgttcttgtaactgcagagctgattctgaggggcaaggatggctccaaccttcccattcttccccctcaaagggcgccaaatctatacatggtcccccaggggatcaggcctgtggtccagctcactgccattgagattctagcttggggcttaagaaatatgaaaaacttccagatggcttctatcacatcccccagtcttgttgtggagtgtggaggagaaagggtggaatcggtggtgatcaaaaaccttaagaagacacccaactttccaagttctgttctcttcatgaaagtgttcttgcccaaggaggaattgtacatgcccccactggtgatcaaggtcatcgaccacaggcagtttgggcggaagcctgtcgtcggccagtgcaccatcgagcgcctggaccgctttcgctgtgacccttatgcagggaaagaggacatcgtcccacagctcaaagcctcccttctgtctgccccaccatgccgggacatcgttatcgaaatggaagacaccaaaccattactggcttctaagtgcttaagcagtatgtcaacagcactcagcaaaatggcttctccagcgacagtgcatgtattggatgaagaggaagaaatcgtggactggtggagtaaattttatgcttcctcaggggaacatgaaaaatgcggacagtatattcagaaaggctattccaagctcaagatatataattgtgaactagaaaatgtagcagaatttgagggcctgacagacttctcagatacgttcaagttgtaccgaggcaagtcggatgaaaatgaagatccttctgtggttggagagtttaagggctcctttcggatctaccctctgccggatgaccccagcgtgccagcccctcccagacagtttcgggaattacctgacagcgtcccacaggaatgcacggttaggatttacattgttcgaggcttagagctccagccccaggacaacaatggcctgtgtgacccttacataaaaataacactgggcaaaaaagtcattgaagaccgagatcactacattcccaacactctcaacccagtctttggcaggatgtacgaactgagctgctacttacctcaagaaaaagacctgaaaatttctgtctatgattatgacacctttacccgggatgaaaaagtaggagaaacaattattgatctggaaaaccgattcctttcccgctttgggtcccactgcggcataccagaggagtactgtgtttctggagtcaatacctggcgagatcaactgagaccaacacagctgcttcaaaatgtcgccagattcaaaggcttcccacaacccatcctttccgaagatgggagtagaatcagatatggaggacgagactacagcttggatgaatttgaagccaacaaaatcctgcaccagcacctcggggcccctgaagagcggcttgctcttcacatcctcaggactcaggggctggtccctgagcacgtggaaacaaggactttgcacagcaccttccagcccaacatttcccagagatactacctgcgtgtgatcatctggaacaccaaggacgttatcttggacgagaaaagcatcacaggagaggaaatgagtgacatctacgtcaaaggctggattcctggcaatgaagaaaacaaacagaaaacagatgtccattacagatctttggatggtgaagggaattttaactggcgatttgttttcccgtttgactaccttccagccgaacaactctgtatcgttgcgaaaaaagagcatttctggagtattgaccaaacggaatttcgaatcccacccaggctgatcattcagatatgggacaatgacaagttttctctggatgactacttgggtttcctagaacttgacttgcgtcacacgatcattcctgcaaaatcaccagagaaatgcagattggacatgattccggacctcaaagccatgaacccccttaaagccaagacagcctccctctttgagcagaagtccatgaaaggatggtggccatgctacgcagagaaagatggcgcccgcgtaatggctgggaaagtggagatgacattggaaatcctcaacgagaaggaggccgacgagaggccagccgggaaggggcgggacgaacccaacatgaaccccaagctggacttaccaaatcgaccagaaacctccttcctctggttcaccaacccatgcaagaccatgaagttcatcgtgtggcgccgctttaagtgggtcatcatcggcttgctgttcctgcttatcctgctgctcttcgtggccgtgctcctctactctttgccgaactatttgtcaatgaagattgtaaagccaaatgtgtaacaaaggcaaaggcttcatttcaagagtcatccagcaatgagagaatcctgcctctgtagaccaacatccagtgtgattttgtgtctgagaccacaccccagtagcaggttacgccatgtcaccgagccccattgattcccagagggtcttagtcctggaaagtcaggccaacaagcaacgtttgcatcatgttatctcttaagtattaaaagttttattttctaaagtttaaatcatgtttttcaaaatatttttcaaggtggctggttccatttaaaaatcatctttttatatgtgtcttcggttctagacttcagcttttggaaattgctaaatagaattcaaaaatctctgcatcctgaggtgatatacttcatatttgtaatcaactgaaagagctgtgcattataaaatcagttagaatagttagaacaattcttatttatgcccacaaccattgctatattttgtatggatgtcataaaagtctatttaacctctgtaatgaaactaaataaaaatgtttcaccttt

SEQ ID NO: 282763 - DNA, 483 bp, Artificial Sequence
  derived and/or modified sequence
atgctgcgggtgatcgtggagagcgccagcaacatccccaagaccaaattcgggaagcccgatcctattgtttctgtgatctttaaggacgaaaagaaaaaaactaaaaaagttgacaatgagttgaatcccgtttggaacgaaattctcgaattcgacttaagaggtattccactagacttctccagctctttgggcatcatcgtgaaagacttcgagacaataggtcaaaacaagctgattggaaccgcaacagtggcccttaaggatctgaccggggaccagtccagaagtctcccctataagctgatttcactgctcaacgaaaagggccaggacacaggcgccaccatcgacctggtaatcggctatgatccgccctccgccccgcaccctaacgacttgtctggcccaagcgtccccggcatgggcggtaagttgactctgttaaaagcgcagcccccgccgggagggggttgctag

SEQ ID NO: 282764 - DNA, 6156 bp, Artificial Sequence
  derived and/or modified sequence
atgctgcgggtgatcgtggagagcgccagcaacatccccaagaccaagtttgggaagcccgaccctatagtctctgtgattttcaaggacgagaaaaagaaaacaaagaaagtggataacgaactgaatcctgtatggaatgagatcctcgagttcgacctccgagggatcccactcgacttttctagctcattgggtattatagtcaaggatttcgagacaatcggccagaataagttgatcggcaccgctacggtggcactcaaagacctgacaggagatcagtccaggtcacttccttacaagttgatctccctgttgaacgaaaagggtcaggacactggcgctaccattgatttagtgattggctacgatccgcctagtgctccgcaccccaacgatttaagtgggccctcggtgccaggaatgggtggagatggcgaagaggatgagggagacgaagaccgtttagacaacgccgtacgtggtcctggccctaagggccctgtggggaccgtgtcagaagcacagctcgctcggagactcactaaagtgaaaaatagccgtaggatgctgagcaacaaaccccaggacttccaaatcagagttcgcgtcatcgagggtcggcagctgtccggtaataacatacgacccgtggtaaaagtccatgtgtgtggccaaacccacaggaccaggatcaaaagaggcaataaccccttctttgacgaactcttcttctataacgtaaacatgaccccaagtgaactgatggacgaaataatttctattcgcgtatataacagccattccctacgggctgattgcctgatgggcgaattcaaaatcgacgtcggttttgtgtatgatgagcccgggcacgccgtgatgagaaaatggctgctgctaaacgacccggaagacacttcttccggttccaaaggctacatgaaagtctctatgttcgtccttgggacaggagacgagccccccccggagagaagggatagggataatgattctgacgacgtggagtctaacttgctcctacccgcaggcattgcattgaggtgggtgaccttccttctgaagatctatcgcgctgaagacatcccacagatggacgatgccttctctcaaactgtgaaggagatctttgggggaaatgctgacaagaaaaacctggtcgatccctttgtggaggtttcatttgcaggcaagaaggtctgtaccaacattattgagaaaaacgcaaaccccgagtggaatcaggtggttaatctgcaaattaaattcccctctgtgtgtgaaaagatcaagttgaccatttacgattgggatcgcctgaccaaaaatgacgtggtgggaactacctaccttcacctttctaagatcgccgctagtgggggggaggtagaagatttttcatcttctggaaccggagctgcatcttataccgttaacacaggagaaactgaagtaggcttcgtgccgaccttcggtccttgttatctgaacctgtatggcagtcctagagagtacacaggttttcccgacccttacgatgagctgaacacggggaaaggcgagggtgtcgcttacagggggcgcatcctcgtcgaactggcgaccttcctggaaaagacccccccagacaagaagctagaaccgatttcaaacgatgacctgcttgtggtcgagaagtatcaacggcggaggaaatactctctgtccgctgtgttccatagtgctacaatgttgcaggacgtcggagaagctattcagttcgaagtgtctatcgggaattacggaaataaattcgatactacttgtaagccactcgcttcaacaactcagtattctcgggctgttttcgacggtaactactactactatctgccttgggcccatacgaaaccagtggtgactttaaccagttactgggaagatatcagtcatcgactagacgcggtgaacaccctgctggcaatggcggagcgcctgcagaccaatattgaagctcttaaatccggaatacagggaaagatacctgccaatcagctggcagaactgtggctgaagctgattgatgaggtgatcgaggacacacggtatactcttccactcacagagggcaaggcaaacgtgaccgtccttgacactcagataagaaaactgcgttcaaggagtctgagtcaaattcacgaagctgccgtccgtatgcggtccgaagcaacggacgtgaaatcgacacttgcggagatcgaggactggctggataagctgatgcagctgaccgaggagccacaaaacagcatgccggatatcatcatttggatgattcgtggggaaaagcgtttggcctacgctcgaatccctgcccaccaggttctgtatagcacttccggcgagaatgcttcgggtaagtactgtggcaagacacagactatttttcttaaatatccccaggaaaaaaataatggtcctaaggtcccggtggaactgcgcgtgaatatttggctggggctttctgctgtagaaaagaagtttaactctttcgctgagggcacttttacagtgtttgcagagatgtacgaaaatcaagcccttatgtttggcaagtggggaacttccggtttggttggccgacataaattctccgacgtcaccgggaagatcaagttgaagcgcgagttcttcctcccccctaaagggtgggaatgggaaggcgaatggatcgttgacccagaacggtctctcctgactgaagctgatgccggtcatacagaattcacagatgaagtttaccagaatgagtctcgatacccaggaggcgactggaaacccgcagaggatacttacactgatgccaacggtgacaaagcagctagtccaagcgaacttacttgcccacccggttgggagtgggaggatgacgcttggagctacgacattaaccgggctgtcgacgagaaaggctgggaatatggcatcaccattccacccgatcataagccgaaatcctgggttgccgctgagaaaatgtaccacactcatcgcagacgtagactcgttaggaaaagaaagaaagaccttacacagactgcttcctcaaccgcccgcgccatggaagaactgcaggaccaagagggctgggagtacgcctccctgatcgggtggaaatttcactggaaacagcggtcctccgatacgtttaggcgcaggcggtggagacggaagatggccccatctgagacacacggagcagccgccatttttaaactagagggggccctcggggccgatactactgaagacggagatgagaagtcattggaaaaacagaagcacagcgccacgacagtgttcggagctaacaccccaatcgtttcttgtaacttcgaccgcgtatacatttatcatctgcggtgttacgtgtaccaggcaaggaacctgctggcactggataaagatagctttagcgacccgtacgcccatatctgtttcctgcatagatcaaagactacagagatcattcactctacactgaatccgacatgggaccaaaccattatttttgacgaagtggaaatctacggtgaacctcagacagtactacagaacccccctaaggttataatggagctgttcgacaacgaccaagtgggaaaagatgaatttctgggacgctccatctttagtcctgtggtcaagctgaatagcgaaatggatatcacccccaagctgctgtggcatccggtcatgaacggtgacaaggcgtgtggggatgtcctggtgaccgcggagctcatcctgcggggtaaagacgggtcaaacctgcctattctcccaccccagagggcacccaatctgtacatggtgccccaaggtatcagaccagtcgtccagctgacggccattgagatcctagcctgggggctgcgaaatatgaagaactttcagatggctagcattaccagcccgtctcttgtggtggagtgcggaggagagagggttgagtcggttgtgattaaaaatctgaagaaaacccctaacttcccttcctctgtgctttttatgaaggtcttcctccctaaagaagagttgtatatgcctcccctcgtcattaaggtaatcgaccatagacagttcggcaggaagccagtcgtaggccagtgtacaattgaaaggttggaccgcttcagatgtgacccctacgcgggcaaagaggatattgtgccccagttgaaggctagtttgctgtctgcgcctccctgcagagatatcgtgattgagatggaagacaccaagcccttgttggcatcaaaatgcctctcatctatgtctacggccctcagcaaaatggccagtccggccactgtgcacgttttggatgaggaagaggagatagttgattggtggtctaagttctacgctagtagcggcgagcatgagaagtgtggacagtacattcagaaaggctattcaaagctaaagatctataactgcgagttagagaacgtggcagagttcgaaggccttacagacttcagcgacacgtttaagttatataggggcaagagtgatgagaacgaagatccgtctgtggtcggcgaatttaagggcagttttagaatctaccctctgcccgacgacccaagtgtaccagcacccccacggcaattccgtgagttgcccgattcagttcctcaggaatgtactgtcagaatttatatcgtgcgcggcctggagctgcaaccccaagacaacaatgggctgtgcgacccatatattaagatcactctgggaaaaaaggtgatcgaggacagggatcactatatccctaatacactgaaccctgtctttggacggatgtatgagctgtcatgctaccttccccaggagaaggacctgaagatcagcgtttacgactacgacactttcacaagggacgagaaagttggcgagacaataattgatctggagaatcgcttcctttctaggttcggaagtcattgtggcattccagaagaatactgtgtgtccggtgtaaatacttggagggaccaactgcgacccacccaattgctgcagaatgttgccagattcaaaggattcccacagcccatcttgtcagaggacggatctaggattaggtacggtggaagggactattccctagatgaattcgaggccaacaaaatcttacaccagcatctgggcgcccccgaagaaagactggccctacacattttgaggacgcaggggctggttccggagcacgtcgagacgcgcaccctacatagcacattccagcccaatatttctcagaggtattatcttagggtgataatctggaataccaaggacgtgattctcgacgagaaatcaattaccggggaagaaatgtccgatatttacgttaagggatggattcctggcaatgaagaaaacaaacagaagactgatgtgcattacaggtccttggacggggaggggaatttcaactggagattcgtcttcccgttcgactatctgcccgcggagcaactgtgcatcgtcgctaagaaggagcatttttggtcaatcgaccaaactgaatttaggatcccgccacgcttaatcattcagatttgggataatgacaagttctccctggatgattacttgggatttctagaactcgatctgaggcacaccattattccagccaaatccccagagaagtgcagactcgatatgatccccgacctgaaggcaatgaatccactcaaagccaaaactgcaagtttgtttgagcaaaagagtatgaagggttggtggccatgttatgccgagaaagacggcgcacgagtaatggcaggcaaggtggaaatgacactggagatacttaacgaaaaggaggccgacgaaaggccagcaggcaaaggaagagacgagccaaatatgaatccaaaactggacctcccgaatcgaccggaaacatccttcctttggttcaccaatccttgtaagacaatgaagtttatagtgtggaggagattcaagtgggtgataattgggctcctgttcctgctcattcttctgcttttcgttgctgtcctcctctactctcttccaaattacctctcgatgaagatcgtgaaaccaaacgtgtag

SEQ ID NO: 282765 - DNA, 483 bp, Artificial Sequence
  derived and/or modified sequence
atgctgcgagtcattgtggagagcgcgtctaatatccctaaaactaagttcggcaaaccagatcccatcgtttcagtgatctttaaagatgagaagaagaaaaccaaaaaggtggataacgagctgaaccccgtgtggaacgaaatcctggagtttgatctgagggggattcccctggacttcagttcgtccctggggatcattgtgaaagattttgaaacgataggccagaacaagttaattggcacagccactgtcgccttaaaggaccttaccggggaccagagccggtcactcccttacaagttgatctcccttttaaatgaaaagggccaggatacgggggcaacaatagacctggtcataggatacgatccacctagcgctcctcatccgaatgatctctccggtccttccgtccccggtatggggggaaagctgacgctgctcaaggcccagcctccccctggcggaggttgttag

SEQ ID NO: 282766 - DNA, 6156 bp, Artificial Sequence
  derived and/or modified sequence
atgctgcgtgtgatcgtggagtctgcctccaacatccctaaaacaaagttcggcaagccagaccctatcgtgagcgttatcttcaaggacgaaaagaagaaaaccaagaaggtggacaatgagttgaatcctgtgtggaatgaaattctcgagttcgatctgagagggatccctcttgatttttctagtagtcttggcatcattgtgaaggacttcgaaacaatcggtcaaaacaagctgattggtaccgcaacagtggcactcaaagacctcaccggggaccagtcccgcagcttaccatataagcttatcagtctgctgaacgagaaagggcaggatactggggctaccatcgacctggtgatcggctacgacccgccatccgcccctcatcctaatgacttgagcggcccttccgttcccggaatggggggagatggggaggaggacgaaggcgatgaggatcgccttgacaatgcagtgcggggacctggtcccaagggtcctgtcggaactgtgagcgaagctcagctagcaagacgtctgacgaaggtcaagaactcacggagaatgttatccaataaacctcaagactttcaaattcgcgtgcgagtgattgagggcaggcaactctcgggcaataacatccgaccagtggtgaaggtgcacgtgtgtgggcaaacacatcgaacccggatcaagagggggaacaaccctttctttgatgagttgttcttctacaacgtgaacatgactccaagtgaactgatggacgagataattagtatccgtgtttacaatagccactccttgcgggcagactgtctcatgggagaattcaagatagacgtgggttttgtgtatgacgaacctggtcacgctgtgatgagaaaatggctcttactgaacgatcctgaggatacgtccagcgggagtaaaggatatatgaaagttagcatgtttgtcctgggaacgggggacgagccaccccctgagcggcgagaccgggacaatgatagtgacgatgttgaatccaatctactacttcccgctggcatagctctgcgatgggttacgtttcttcttaagatttatagggctgaggatatcccacagatggacgatgcattctctcagacagtaaaggaaatctttggaggcaacgctgacaaaaaaaacctggttgatccattcgttgaggtgagttttgccggaaaaaaagtgtgtactaacatcattgaaaagaatgctaatcctgagtggaaccaggtcgttaatctgcaaataaagtttccctctgtctgcgagaagatcaaactgaccatttatgactgggatagactgactaaaaatgatgtcgtcggaaccacttatctacacttgtcaaaaatcgcagcctcggggggagaggtggaagacttcagctcttcaggcaccggcgctgcttcttatacagtgaacactggtgagacggaagtgggattcgtgcccacatttggcccatgctacctgaacctctacggatccccgagggaatatactggtttccccgatccttatgacgagttaaacaccgggaagggggaaggagttgcctaccggggacggattctggtggaactagcaactttcctcgagaaaaccccccctgacaagaaactagagccaattagtaacgacgacctcctcgtggtggaaaagtaccagcggcgacgcaaatactcactttcagcagtgtttcatagcgccacgatgctgcaggatgtgggggaagccatacagttcgaagtgagcattggtaactatggaaataaatttgacaccacttgtaagcctttagcatcaactacgcagtactcaagagccgtgttcgatggtaactattactactacctgccttgggcgcacactaagcctgttgtgactctcactagctactgggaggatatttctcacagactcgatgctgtgaacactctgctcgcgatggctgagcgcctgcagaccaatatcgaggcactcaaaagcggaatccagggcaaaatacctgccaaccagctggcagagctgtggctgaaattaatcgatgaagtgattgaggacacccggtacacgcttccactgacggaagggaaggctaacgtgaccgtgttggacactcaaattagaaagctgcgatctaggtctctctctcagatccacgaagccgcagttcgaatgcgcagtgaagctacagacgtgaagtccacactggctgagatagaggactggctcgataagctgatgcaattgacagaagagccccagaattcaatgcccgatataatcatatggatgatcaggggcgaaaaaaggctggcgtatgccagaatcccagcacatcaagtactctacagtaccagtggcgagaacgcatctggaaagtactgtggtaagacccagactatatttctcaagtatccgcaggagaagaacaacggtccaaaggtgccagtggaattacgggtgaatatttggctgggtctgtccgcagtggagaagaagttcaactcctttgctgagggcaccttcaccgttttcgctgaaatgtacgagaaccaggctctcatgttcggcaagtggggaacttccggacttgttggccgtcataagttttctgacgttaccggtaagataaagctgaagcgggagttttttctgcccccaaagggctgggagtgggagggagagtggatcgtggaccctgaaagaagcttgcttaccgaggccgacgctgggcacactgagtttaccgacgaggtgtaccagaatgagagcagatacccaggcggtgattggaagccagccgaagatacatatacagacgcaaatggcgacaaagcggctagccccagcgaattgacttgccctcctggctgggaatgggaggacgatgcctggagctacgacatcaacagagccgttgatgagaagggatgggaatacggtatcaccatccctcccgaccacaagccaaaatcttgggtggcagcggagaagatgtaccacacccacaggcgcagacgtcttgtacgcaagaggaagaaagacctgacacagactgcctccagcacggcccgtgcaatggaagagcttcaggatcaggagggctgggagtatgcctcacttattggttggaagttccactggaagcagcggtcaagcgacacatttagacggaggagatggaggaggaagatggcaccctcagagacccatggcgcagctgcaatcttcaagctcgagggtgctctgggagcggatacaaccgaagacggggacgagaagtctcttgaaaaacagaagcactcagcgacgacagtcttcggtgccaacacccccatagtgagctgtaacttcgacagggtctatatctatcatttgcgttgttacgtctaccaggcacggaacctgctagccttggacaaagatagcttttcagacccctatgctcatatttgttttctgcatagatccaaaacaaccgagattatacatagcactctcaaccccacatgggaccagacgatcattttcgatgaggtggagatatatggggagcctcagactgtgctccagaatccacccaaggtgatcatggagttatttgataacgaccaggtgggcaaagatgagttcctgggcagaagcatctttagcccagttgtgaagctcaattccgagatggacatcacccccaagcttttatggcaccccgtcatgaatggcgacaaggcatgtggtgatgtcctcgtcactgctgagctcatcctgagaggtaaagacggctcgaatctgccgattctgccaccgcaaagagcccctaacttgtacatggtcccccagggcattagacctgtcgtgcaactgacagcgatcgagatactggcctgggggctgaggaatatgaaaaacttccagatggcatcgatcacctccccatccctcgtggtggaatgtggcggagagcgggtggaatccgtggtgattaagaacttgaagaagacgccaaattttccgtcctcagtgctctttatgaaggtgttcctaccgaaggaagaactgtacatgccaccccttgtcatcaaagtgattgatcataggcaatttggtcgcaagcccgttgtcgggcagtgtacaattgagcgactggatagatttaggtgcgatccctatgccggtaaagaggatatagttccccagttaaaagcctccttactgtcagctccaccttgccgggatattgttattgagatggaagatacaaagccgctccttgcaagcaaatgtttatcctctatgagcactgcccttagcaaaatggcctcccctgccaccgtccatgtcttggatgaggaggaagaaatcgtcgactggtggagtaaattttatgcaagttcgggagaacacgagaaatgtggccagtatatccagaagggctactcgaagctgaaaatatataactgtgaactggaaaacgtggcagaatttgagggcttaaccgatttctccgatacctttaaactataccgagggaaaagcgatgaaaacgaagatcccagcgtggtaggtgagttcaaaggatcatttcgaatttatccgctgcccgatgacccctctgtaccggcacctcctcggcagtttcgagagctgccagatagtgtccctcaggagtgcacggtcaggatttatatcgtgcggggtctggagctgcaacctcaagacaacaacggactttgtgacccgtatataaaaatcacactgggcaaaaaggtgattgaggacagggatcattatatccctaatacccttaatcccgttttcggaagaatgtacgagctgagctgttacctgccccaagaaaaggacctgaagataagcgtgtacgattacgatactttcacacgcgacgaaaaggtcggggaaacaatcattgatctagaaaatagatttctgagtcggtttggctcacattgcgggattcccgaagagtattgtgtttccggcgtaaatacctggagggatcaactgcggccaactcaactccttcagaacgttgcgcgatttaagggattcccacaacctattttgtcggaggacggctctaggataagatatggaggtcgagattacagtctcgatgaattcgaagcaaataaaatcctgcatcagcacctaggtgctccagaagaacgcctggctttacacatactccggacacaaggcctggtccctgagcatgtggaaactcggacccttcattcaacattccagccaaacatttcccagcggtactatctccgggtcataatctggaacacaaaggatgtgatccttgacgagaaatccataaccggagaagaaatgtccgatatttacgtgaaaggttggattccaggcaacgaagaaaataaacagaaaacagatgtccactacaggtccctggacggagaaggcaattttaactggcggtttgtgttccctttcgattatcttccggctgaacagctctgcattgtggcaaaaaaagaacacttttggagtatagatcagaccgaatttcgcatacctccccgactcattattcagatctgggacaacgacaagttctctctggacgactacctcggattcctcgagctggacttaaggcatacgatcatacccgctaaatccccagagaaatgcaggttggatatgattcccgacctcaaggccatgaacccattgaaggctaagacggcaagtctgttcgagcagaaatcaatgaaaggttggtggccatgctacgctgagaaggacggagctcgcgttatggctggtaaggtggagatgactcttgaaatcctcaacgaaaaagaggctgatgagcgccctgcaggtaagggcagggacgaacccaatatgaaccctaagctggacctgcccaaccgccctgagacgtccttcctctggttcacgaacccctgtaaaacaatgaaatttattgtgtggagacgcttcaagtgggtcattatcggattactcttcttattgatattattgctctttgtcgcagtacttctgtactctctgccgaattacctctcaatgaagatagtgaagcccaacgtctac

SEQ ID NO: 282767 - protein, 75 aa, Artificial Sequence
  derived and/or modified sequence
MELENIVANTVLLKAREGGGGKRKGKSKKWKEILKFPHISQCEDLRRTIGELSGSLISWSSSTKEHGRPTEIKMR

SEQ ID NO: 282768 - DNA, 1031 bp, Artificial Sequence
  derived and/or modified sequence
aaagcatccgagggagccggaggggaggagaatggagtgacagagacacgcggagggtggggggtgggggggagcgtgttgagggaggggggaggggggacacagagggaggaagaagcggcggcggcggcggcggcggcggcggctcctctttgcagagggggaaactcttgggctgagagcaggaataatgcggtaggcaaggcgggctgctggctcccccggctccggcagcagcggcggcagcccgagcagcggcagcagcagcggcagcaccccaggcgctgacagccccgccggccggctccgttgctgaccgccgactgtcaatggagctggaaaacatcgtggccaacacggtcttgctgaaagccagggaagggggcggaggaaagcgcaaagggaaaagcaagaagtggaaagaaatcctgaagttccctcacattagccagtgtgaagacctccgaaggaccataggggagctgagcggatcgctgatctcctggagctcatccaccaaggagcatgggagaccaactgaaattaagatgagatgacaaatcaagaaagttccacagggtatggagcaggttgctgagctgcagaaccaaggcaaagatctatccccacttccctggaggaagtggcgtccctcctggcttaaaggatctctctgcgagctccctgagggcctggaccacaggctctccatctgggcgtctccattgctgtagcagcatgagtgggtggatggatgttgccttctcttcaacctggaagccaggactgtgagtggcagccatgagcactgagacagattcctaggccaggtgcagcggtgcaggcctgagcattgagacagattcctaggccagctgcagcggcgcaagcctggaaccccagtgctttgaggggcggaggcaggaggattgctcaaacccaggagtccgaggatacagtgagctatgaatgtgctgctgcaccgctccagcctaggtgacagagcgagaccctctaaaaaaaagaaaaag

SEQ ID NO: 282769 - DNA, 1949 bp, Artificial Sequence
  derived and/or modified sequence
agactattgctggaaaccatccgctgggatgtttcttagggaaatcccgtcgtgtggaaggaagccttttaaaggcaaagtcagatgttgaggaattagccttttcatagaattatcaaaggatggctgtacagaccacctagaaaataattcagtatttcaggtttttcttttctgggagtgtgataactgaaattgttagattttggctcagttaagaaaagaaagggggcggaggaaagcgcaaagggaaaagcaagaagtggaaagaaatcctgaagttccctcacattagccagtgtgaagacctccgaaggaccatagacagagattactgcagtttatgtgacaagcagccaatcgggaggctgcttttccggcagttttgtgaaaccaggcctgggctggagtgttacattcagttcctggactccgtggcagaatatgaagttactccagatgaaaaactgggagagaaagggaaggaaattatgaccaagtacctcaccccaaagtcccctgttttcatagcccaagttggccaagacctggtctcccagacggaggagaagctcctacagaagccgtgcaaagaactcttttctgcctgtgcacagtctgtccacgagtacctgaggggagaaccattccacgaatatctggacagcatgttttttgaccgctttctccagtggaagtggttggaaaggcaaccggtgaccaaaaacactttcaggcagtatcgagtgctaggaaaagggggcttcggggaggtctgtgcctgccaggttcgggccacgggtaaaatgtatgcctgcaagcgcttggagaagaagaggatcaaaaagaggaaaggggagtccatggccctcaatgagaagcagatcctcgagaaggtcaacagtcagtttgtggtcaacctggcctatgcctacgagaccaaggatgcactgtgcttggtcctgaccatcatgaatgggggtgacctgaagttccacatctacaacatgggcaaccctggcttcgaggagggggctgcagaggtcaagagacaccccttcttcaggaacatgaacttcaagcgcttagaagccgggatgttggaccctcccttcgttccagacccccgcgctgtgtactgtaaggacgtgctggacatcgagcagttctccactgtgaagggcgtcaatctggaccacacagacgacgacttctactccaagttctccacgggctctgtgtccatcccatggcaaaacgagatgatagaaacagaatgctttaaggagctgaacgtgtttggacctaatggtaccctcccgccagatctgaacagaaaccaccctccggaaccgcccaagaaagggctgctccagagactcttcaagcggcagcatcagaacaattccaagagttcgcccagctccaagtccacagtggaaccagcccagacccttctccttagaagtggaagtagtggagcccctgctctggtggggctgccaggggagaccccgggagccggggaaggaggccgtccatcccgtcgacgtagaacctcgaggtttctcaaagaaatttccactcaggtctgttttccgaggcggccccggccggggtggattggatttgtctttggtgaacattgcaatagaaatccaattggatacgacaacttgcacgtattttaatagcgtcataactagaactgaattttgtctttatgatttttaaagaaaagttttgtaaatttctctactgtctcagtttacattttgtatatttgtatttaaatgaaagtgagactttgagggtgtatattttctgtgcagccactgttaagccatgtgttccaaggcattttagcggggagggggttatcaaaaaaaaaaaaatgtgactcaagacttccagagcctcaaatgagaaaatgtctttattaaatgtag

SEQ ID NO: 282770 - DNA, 228 bp, Artificial Sequence
  derived and/or modified sequence
atggagttggaaaacattgtggcaaacacagtcctcctgaaagccagagagggaggcgggggtaaaagaaagggaaaaagcaaaaaatggaaagagatactgaaatttccacacatatctcagtgtgaagatctgcgtcgcactatcggggaactttccggaagcctcattagctggagtagctcaacaaaggagcacgggaggcccactgaaataaagatgaggtag

SEQ ID NO: 282771 - DNA, 228 bp, Artificial Sequence
  derived and/or modified sequence
atggagctggagaacatcgtggccaacacagtgctgctgaaggcccgggagggcggcggcggcaagaggaagggcaagagcaagaagtggaaggagatcctgaagttcccccacatcagccagtgtgaggacctgcggaggaccatcggggagctgagcggcagcctcatctcctggagcagcagcaccaaggagcacggccggcccacagagatcaagatgaggtag

SEQ ID NO: 282772 - DNA, 228 bp, Artificial Sequence
  derived and/or modified sequence
atggagctggagaacatcgtggccaacaccgtgctgctgaaggccagggagggaggagggggtaaaagaaagggaaagtctaaaaaatggaaagagatattgaagttcccccacatatcacagtgcgaagacctccgtcgcacgatcggtgaactctcgggatcactcatctcttggtcaagtagcacaaaagaacatggacggccgacagagattaaaatgcgctag

SEQ ID NO: 282773 - DNA, 228 bp, Artificial Sequence
  derived and/or modified sequence
atggaactcgaaaacattgtcgctaataccgtgctgttaaaagcacgagaaggtggaggaggaaaaaggaaaggtaagtccaagaagtggaaggaaattctaaaatttccgcacatctctcagtgtgaggatctgaggaggacaattggagagctttcaggaagcttgatctcttggtcctcgtcaaccaaggaacacgggaggccgactgaaataaagatgagatag

SEQ ID NO: 282774 - DNA, 228 bp, Artificial Sequence
  derived and/or modified sequence
atggagctggagaacatcgtggccaacaccgtgctgctgaaggccagagagggcggcggcggcaagagaaagggcaagagcaagaagtggaaggagatcctgaagttcccccacatcagccagtgcgaggacctgagaagaaccatcggcgagctgagcggcagcctgatcagctggagcagcagcaccaaggagcacggcagacccaccgagatcaagatgagatag

SEQ ID NO: 282775 - protein, 485 aa, Artificial Sequence [sequence omitted]

SEQ ID NO: 282776 - DNA, 1748 bp, Artificial Sequence
  derived and/or modified sequence
gttttagagtgccttcttcaacatacgctacttagaccgggcgaattcctcccaaaaaaaccttgccctcagacagagattactgcagtttatgtgacaagcagccaatcgggaggctgcttttccggcagttttgtgaaaccaggcctgggctggagtgttacattcagttcctggactccgtggcagaatatgaagttactccagatgaaaaactgggagagaaagggaaggaaattatgaccaagtacctcaccccaaagtcccctgttttcatagcccaagttggccaagacctggtctcccagacggaggagaagctcctacagaagccgtgcaaagaactcttttctgcctgtgcacagtctgtccacgagtacctgaggggagaaccattccacgaatatctggacagcatgttttttgaccgctttctccagtggaagtggttggaaaggcaaccggtgaccaaaaacactttcaggcagtatcgagtgctaggaaaagggggcttcggggaggtctgtgcctgccaggttcgggccacgggtaaaatgtatgcctgcaagcgcttggagaagaagaggatcaaaaagaggaaaggggagtccatggccctcaatgagaagcagatcctcgagaaggtcaacagtcagtttgtggtcaacctggcctatgcctacgagaccaaggatgcactgtgcttggtcctgaccatcatgaatgggggtgacctgaagttccacatctacaacatgggcaaccctggcttcgaggaggagcgggccttgttttatgcggcagagatcctctgcggcttagaagacctccaccgtgagaacaccgtctaccgagatctgaaacctgaaaacatcctgttagatgattatggccacattaggatctcagacctgggcttggctgtgaagatccccgagggagacctgatccgcggccgggtgggcactgttggctacatggctccagaggtcctgaacaaccagaggtacggcctgagccccgactactggggccttggctgcctcatctatgagatgatcgagggccagtcgccgttccgcggccgcaaggagaaggtgaagcgggaggaggtggaccgccgggtcctggagacggaggaggtgtactcccacaagttctccgaggaggccaagtccatctgcaagatgctgctcacgaaagatgcgaagcagaggctgggctgccaggaggagggggctgcagaggtcaagagacaccccttcttcaggaacatgaacttcaagcgcttagaagccgggatgttggaccctcccttcgttccagacccccgcgctgtgtactgtaaggacgtgctggacatcgagcagttctccactgtgaagggcgtcaatctggaccacacagacgacgacttctactccaagttctccacgggctctgtgtccatcccatggcaaaacgagatgatagaaacagaatgctttaaggagctgaacgtgtttggacctaatggtaccctcccgccagatctgaacagaaaccaccctccggaaccgcccaagaaagggctgctccagagactcttcaagcggcagcatcagaacaattccaagagttcgcccagctccaagaccagttttaaccaccacataaactcaaaccatgtcagctcgaactccaccggaagcagctagtttcggctctggcctccaagtccacagtggaaccagcccagacccttctcc

SEQ ID NO: 282777 - DNA, 1458 bp, Artificial Sequence
  derived and/or modified sequence
atgactaaatacctgacaccaaagagtcccgtcttcatcgcccaggtgggacaagatctcgtcagtcagaccgaagagaaactcctacagaagccgtgtaaggaattgttctctgcttgcgcacaaagcgtccacgaatacctgaggggagaaccttttcatgagtatctcgacagcatgtttttcgatcggttcttgcagtggaaatggttagaacggcaacccgtgacaaaaaacaccttccgtcagtacagggtactcggcaagggaggtttcggcgaggtctgtgcttgtcaagtccgagccaccgggaaaatgtatgcttgcaagcgcctcgagaaaaagcggataaaaaaaagaaaaggtgagagcatggcacttaatgagaagcagatactggaaaaagtcaactcacagttcgtggttaatctggcttacgcttacgagaccaaagatgctttatgcctggtgctcacaatcatgaacggcggggatctcaagttccatatttacaacatggggaaccccggctttgaggaggaacgcgccctcttctacgccgcagaaattttatgcgggctggaggacttgcatcgggaaaacacagtatatcgagatctgaagcctgagaacatactgctagacgactacggacatattcgaattagcgacctcggtcttgcggtgaaaatacccgagggcgaccttattcgaggccgggttggaaccgttggttacatggcccccgaggtccttaacaaccagagatacggattgtctcccgattattgggggcttggatgtctgatttacgagatgatagagggccaatcacccttccgcgggcggaaggagaaagtgaagagggaggaagtggatcggcgcgtgctggagaccgaagaggtttactctcataagttctcagaggaggcgaaatctatatgtaaaatgcttctcactaaagacgccaagcaacgactgggatgccaggaggaaggtgctgcagaggtcaagaggcaccccttttttcgaaacatgaactttaagcggttagaagccggaatgctggaccctccatttgtcccggacccacgggccgtgtactgcaaggatgtcttggacatcgagcagttttccactgtgaaaggggtgaacttggaccacacagacgacgacttttactctaagttttcgactggctctgtctcgattccctggcagaatgagatgatagaaactgagtgctttaaggagctgaacgtgttcggcccaaatggcaccttaccaccggacttgaatagaaatcaccctcccgagccgccaaagaaaggtttactgcaacgcctgtttaaaaggcagcatcagaataattcaaagtcctccccttcctcaaagacctccttcaaccatcacataaactccaaccacgtttcctccaactcaacaggatccagctag

SEQ ID NO: 282778 - DNA, 1200 bp, Artificial Sequence
  derived and/or modified sequence
atgacaaagtacttaaccccgaaatcacccgtgttcattgctcaagttggccaggatcttgtgagccagactgaggagaaactgctgcaaaagccctgcaaagaactgttctctgcttgcgctcagtccgtacacgaatatcttcggggcgagcccttccacgaatacctggactcaatgttcttcgaccgctttctgcagtggaaatggttggaaagacagcccgtgacgaagaacacgtttagacagtaccgggtgttgggcaagggaggattcggagaagtatgtgcctgccaagtgcgcgcaaccggtaagatgtatgcatgcaagaggctggagaagaagagaataaaaaaaagaaaaggcgagtcaatggcccttaacgaaaagcaaatcctagaaaaagttaattctcagtttgttgtcaacctggcctatgcctacgagactaaggatgcgctatgtctagtcctgaccatcatgaatggaggggatttaaagtttcacatctataacatgggcaatccaggcttcgaagagggtgctgctgaagtgaagagacacccgttcttccgcaacatgaatttcaaacggctggaagctggtatgctggatcccccatttgtccctgatccgagggccgtctactgcaaagatgttctggacattgagcagttctcaaccgtgaagggcgtaaacttagaccataccgacgacgacttctatagcaaattctctaccgggtcggtgtccattccatggcaaaacgaaatgatcgaaacagagtgtttcaaggagttgaatgttttcggcccaaatggcacactacccccagacctaaatcgtaaccatccacccgagccccccaaaaaaggtctgctccagcgcctatttaagagacagcaccagaacaactccaaatcgtccccaagtagtaagtccacagtggagccagcacaaacactgcttttgcggtccggctcatccggggcacctgctctcgttgggctgcccggggagacccccggagccggcgagggcggtaggcctagtcgccgccggagaacatcgcgctttctcaaggaaatttctactcaagtttgcttcccaaggcgacctagacccggttggattggctttgtgttcggcgagcactgcaatagaaaccccataggttacgacaatctgcacgttttttag

SEQ ID NO: 282779 - DNA, 1458 bp, Artificial Sequence
  derived and/or modified sequence
atgaccaagtacctgacccccaagagccctgtgttcatcgcccaggtgggccaggacctggtgtcccagacagaggagaagctgctgcagaagccctgcaaggagctgttcagcgcctgtgcccagagcgtgcatgagtacctgcggggggagcccttccacgagtacctggacagcatgttctttgaccgcttcctgcagtggaagtggctggagcggcagcctgtgaccaagaacaccttccggcagtacagagtgctgggcaaaggaggctttggagaggtgtgtgcctgccaggtgcgggccaccgggaagatgtatgcctgcaagaggctggagaagaagaggatcaagaagaggaaaggagagagcatggccctgaatgagaagcagatcctggagaaggtgaacagccagtttgtggtgaacctggcctatgcctatgagaccaaggatgccctgtgcctggtgctgaccatcatgaatggaggagacctgaagttccacatctacaacatgggcaaccctggctttgaggaggagcgggccctcttctatgctgctgagatcctgtgtggcctggaggacctgcaccgggagaacacagtgtacagagacctgaagccagagaacatcctgctggatgattatggccacatccgcatcagtgacctgggcctggccgtgaagatccctgagggggacctgatccggggccgggtgggcaccgtgggctacatggcccctgaggtgctgaacaaccagagatatggcctgagcccagactactggggcctgggctgcctgatctatgagatgattgagggccagagccccttccggggcaggaaggagaaggtgaagcgggaggaggtggaccggcgggtgctggagacagaggaggtgtacagccacaagttcagcgaggaggccaagagcatctgcaagatgctgctgaccaaggatgccaagcagaggctgggctgccaggaggagggcgctgctgaggtgaagaggcaccccttcttcaggaacatgaacttcaagaggctggaggccggcatgctggaccccccatttgtgcctgaccccagggctgtgtactgcaaggatgtgctggacatcgagcagttcagcacagtgaagggcgtgaacctggaccacacagatgatgacttctacagcaagttcagcactggatctgtgtccatcccctggcagaatgagatgattgaaacagagtgcttcaaggagctgaatgtgtttggccccaacggcaccctgcccccagacctgaacagaaaccaccccccagagccccccaagaagggcctgctgcagaggctcttcaagaggcagcaccagaacaacagcaagagcagccccagcagcaagaccagcttcaaccaccacatcaacagcaaccacgtgagcagcaacagcacaggcagcagctag

SEQ ID NO: 282780 - DNA, 1200 bp, Artificial Sequence
  derived and/or modified sequence
atgaccaagtacctgacccccaagagccctgtgttcatcgcccaggtgggccaggacctggtgtcccagacagaggagaagctgctgcagaagccctgcaaggagctgttcagcgcctgtgcccagagcgtgcatgagtacctgcggggggagcccttccacgagtacctggacagcatgttctttgaccgcttcctgcagtggaagtggctggagcggcagcctgtgaccaagaacaccttccggcagtacagagtgctgggcaaaggaggctttggagaggtgtgtgcctgccaggtgcgggccaccgggaagatgtatgcctgcaagaggctggagaagaagaggatcaagaagaggaaaggagagagcatggccctgaatgagaagcagatcctggagaaggtgaacagccagtttgtggtgaacctggcctatgcctatgagaccaaggatgccctgtgcctggtgctgaccatcatgaatggaggagacctgaagttccacatctacaacatgggcaaccctggctttgaggagggcgctgctgaggtgaagaggcaccccttcttcaggaacatgaacttcaagaggctggaggccggcatgctggaccccccatttgtgcctgaccccagggctgtgtactgcaaggatgtgctggacatcgagcagttcagcacagtgaagggcgtgaacctggaccacacagatgatgacttctacagcaagttcagcactggatctgtgtccatcccctggcagaatgagatgattgaaacagagtgcttcaaggagctgaatgtgtttggccccaacggcaccctgcccccagacctgaacagaaaccaccccccagagccccccaagaagggcctgctgcagaggctcttcaagaggcagcaccagaacaacagcaagagcagccccagcagcaagagcacagtggagcccgcccagaccctgctgctgcggagcggcagcagcggggccccagccctggtgggcctgcccggggagacccctggggccggggagggcggccggcccagcagaagaagaaggaccagccgcttcctgaaggagatcagcacccaggtgtgcttcccccggcggcccaggcctggctggattggatttgtgtttggagagcactgcaacagaaaccccatcggctatgacaacctgcacgtgttctag

SEQ ID NO: 282781 - DNA, 1458 bp, Artificial Sequence
  derived and/or modified sequence
atgaccaagtacctgacccccaagagccccgtgttcatcgcccaggtgggccaggacctggtatctcagacggaggagaaacttttacagaaaccttgcaaagaactgttttctgcctgtgcccagagcgttcatgagtatctgcgcggagagccattccatgagtatctcgactcgatgttctttgaccggtttctccagtggaaatggttggagcgccagcccgtgacaaaaaatacttttcggcagtaccgcgtgcttgggaagggcggattcggtgaagtgtgtgcatgccaggttcgggcgactggaaaaatgtatgcctgtaagaggctggagaaaaagaggattaaaaagcgcaaaggcgagtcgatggcgttgaatgagaaacagatattagagaaagttaacagtcagttcgtcgttaacctcgcatacgcctatgagacgaaagacgcattatgtttggttctcacaatcatgaatggcggcgacctgaagttccatatatacaacatgggcaaccccgggtttgaagaggagagggccctgttttacgccgctgaaatactgtgtggcctcgaggatcttcatagggagaatacagtctatagggacttaaagcccgagaacatcctgctggacgactacggacatatccgcattagtgacctgggacttgctgtgaaaattccggaaggcgacctcatacggggacgagtgggcacggtgggctatatggctcctgaggtcttaaataatcaacgctacgggctctctccagactattggggcctaggctgcctaatttatgagatgatcgaggggcagtctcccttcagggggcgcaaagagaaggtcaaaagagaagaagttgataggcgagtactcgagacagaggaggtgtacagccacaagttcagtgaggaggcgaagagtatatgtaagatgctgctgaccaaggacgccaagcagcgtctgggctgccaggaggaaggcgccgcagaagttaagaggcatcccttctttagaaatatgaactttaagaggctggaggctggcatgctcgatcccccatttgttcccgacccccgtgccgtgtactgtaaggacgtattggacatcgagcaattcagtaccgtgaagggtgttaatctggaccacaccgatgatgatttctacagtaagtttagcaccggaagcgtgagcattccttggcaaaatgaaatgatcgagactgagtgtttcaaggagcttaatgtgttcggtccgaacggcacgctcccccccgatttgaacaggaaccatccaccagagccaccgaagaagggattgttgcaacgactgttcaaacgccagcatcaaaacaattcgaagagctcgccctcctccaaaacctcatttaatcaccatatcaacagcaaccacgtgagcagcaatagcacagggtctagctag

SEQ ID NO: 282782 - DNA, 1200 bp, Artificial Sequence
  derived and/or modified sequence
atgaccaagtacctgacccccaagagccccgtgttcatcgcccaggttggccaagatttggttagtcagacagaagagaaactgctacagaaaccatgcaaagagctctttagtgcttgcgcgcaaagcgtgcatgagtatctgaggggcgaaccttttcatgagtacctcgattctatgttcttcgacagatttttacagtggaaatggctcgagaggcagccagttacgaagaacacattcaggcagtaccgtgtgctggggaagggcggatttggagaggtatgtgcctgtcaggttcgcgccaccggaaagatgtacgcttgtaagcgtcttgagaagaagcgaatcaaaaagagaaagggagagtctatggccttgaacgaaaagcagattttggagaaagttaacagccagtttgtggtgaatctggcatacgcttatgagaccaaggatgccctgtgcctggtgttgacgattatgaatggaggagacttgaaattccatatttacaacatggggaacccaggatttgaggagggggccgcagaggtaaagagacatcctttctttcggaacatgaactttaaaagattggaggccggtatgctggaccctccgttcgttccagacccaagagcggtctactgcaaagatgtactggatatagaacaattttctacagtcaagggtgtgaatcttgatcacacggatgatgacttttactctaagttcagtacaggctccgtgtctatcccttggcaaaatgagatgatcgagacagagtgctttaaagaattgaatgtcttcggaccaaacggaaccctcccccctgatctaaatcggaatcaccctcctgagccgcccaaaaagggcttactacagaggttgttcaaaaggcaacatcagaacaattcgaagtcctccccttccagcaagtccaccgtggaacccgcacaaacactgctgcttagatctgggtcatccggggcacctgcacttgtaggcctgcctggcgaaacgcctggagccggggagggaggccgaccgtctcgacggaggcggacatcaagatttcttaaggagatctccacccaggtgtgcttccccagacggcccaggccaggttggattggctttgtcttcggggagcactgtaatcgcaatcctataggttacgacaatctacatgtattttag

SEQ ID NO: 282783 - DNA, 1458 bp, Artificial Sequence
  derived and/or modified sequence
atgacgaaatatttgacacccaagtcccctgtatttattgcacaagtgggccaggatttggtttcccagactgaggagaaattgcttcaaaaaccatgcaaagaattgttttcagcctgcgctcagagtgtgcatgagtatctgcgcggagaaccgttccatgagtatttggactccatgtttttcgacagattcttacagtggaagtggttggagcgacagccagtgactaagaacaccttccgccaatatagagtgctcggcaaaggcggtttcggagaagtgtgtgcctgtcaggtaagagctacaggcaaaatgtacgcatgtaaacggttggagaagaagagaataaaaaaaaggaaaggagagagcatggcgctgaacgagaagcagatccttgaaaaggtgaatagccaattcgtcgttaacttggcatacgcctatgagaccaaggacgccctgtgtttagtgctgactatcatgaacggaggggaccttaagttccacatatacaatatgggcaatccgggatttgaggaggaaagggccctcttttatgccgctgagattctctgcgggctagaggatctgcaccgtgaaaataccgtttaccgagatcttaagcctgagaatattctgttagatgattacggtcatatccggatcagcgacttgggcctggcagttaaaatacctgagggagatctgatcagaggtcgagtcggaacagtgggttacatggctcccgaagtccttaataaccaacgatacggactaagtcctgattactggggcttgggttgtctcatatacgagatgatcgaagggcagtcccccttccgcggtagaaaagagaaagtcaagagggaggaggttgaccgtcgcgttctcgagactgaagaggtctatagccataagttctcagaggaggcaaagtccatctgtaagatgctgttgacaaaagatgccaagcagagactgggttgccaggaagagggggctgccgaggtgaaacgtcaccctttttttagaaacatgaacttcaaacggctggaggccggaatgctcgaccctccctttgtgcctgacccgagggccgtatactgcaaggatgtgctcgatattgagcagttctccacagtcaagggcgtgaatctggaccacaccgatgacgacttctacagcaagttcagcactgggtcggtgagcatcccctggcagaatgagatgatcgagaccgagtgtttcaaagaacttaatgtgtttggccctaacggcacgctcccccctgatctcaataggaaccatcctcctgagcctccaaaaaaaggtcttctgcagcgactcttcaagcgacagcaccagaacaactccaagtctagccccagttctaagacctcatttaaccaccacatcaattcgaatcatgtgagcagcaacagtactggcagtagttag

SEQ ID NO: 282784 - DNA, 1200 bp, Artificial Sequence
  derived and/or modified sequence
atgacgaagtacctgacaccgaagtcaccggtcttcatagcccaggtgggccaggatctggtcagtcagactgaggaaaagctccttcagaagccttgtaaagagttgttcagcgcttgcgcccagtccgtgcacgaatatctgaggggcgaaccctttcacgaatatctagatagcatgttcttcgacagatttctgcagtggaagtggttggagcggcaacccgtgactaaaaatacttttcgccagtaccgagttctgggcaagggtggttttggcgaagtgtgtgcttgccaagtaagagccaccgggaagatgtacgcatgcaagaggcttgagaagaaaagaattaagaaacggaaaggagaatctatggcgctgaatgaaaaacaaatcctcgaaaaggtgaactcacagttcgtggtgaaccttgcctatgcttacgagacgaaggatgcgctgtgcttagttctgaccattatgaacggaggagacctgaagtttcatatttataacatggggaacccaggctttgaggagggggctgccgaagtcaaacgccacccgttcttccgaaacatgaactttaagaggctcgaagccggaatgctggaccctcctttcgtgccagaccccagagctgtttattgcaaggatgtgctggacattgaacagttttccacagtaaagggggtcaacctagaccacactgacgatgatttctattcgaagttttctaccggtagcgtctcgattccgtggcagaacgagatgatagagaccgaatgcttcaaggaactgaacgttttcggaccaaatgggactcttcccccagacctcaacagaaaccacccaccggaacctcctaaaaagggcctacttcagaggctgtttaagcgtcagcaccagaataattctaagtcttctccctctagcaagtccacggtggaacctgcgcagacactcttgctgcgatctggatcttctggcgcacccgcactagtggggttgcctggagagacgccgggagctggcgaagggggacggccttcccggagaaggaggacctcccgattccttaaggaaatctcgactcaggtgtgctttccaaggaggcctaggcctggctggatcggctttgtattcggcgagcattgcaatcggaaccctattggctacgacaacctccatgtgttttag

SEQ ID NO: 282785 - DNA, 1458 bp, Artificial Sequence
  derived and/or modified sequence
atgaccaagtacctgacccccaagagccccgtgttcatcgcccaggtgggccaggacctggtgagccagaccgaggagaagctgctgcagaagccctgcaaggagctgttcagcgcctgcgcccagagcgtgcacgagtacctgagaggcgagcccttccacgagtacctggacagcatgttcttcgacagattcctgcagtggaagtggctggagagacagcccgtgaccaagaacaccttcagacagtacagagtgctgggcaagggcggcttcggcgaggtgtgcgcctgccaggtgagagccaccggcaagatgtacgcctgcaagagactggagaagaagagaatcaagaagagaaagggcgagagcatggccctgaacgagaagcagatcctggagaaggtgaacagccagttcgtggtgaacctggcctacgcctacgagaccaaggacgccctgtgcctggtgctgaccatcatgaacggcggcgacctgaagttccacatctacaacatgggcaaccccggcttcgaggaggagagagccctgttctacgccgccgagatcctgtgcggcctggaggacctgcacagagagaacaccgtgtacagagacctgaagcccgagaacatcctgctggacgactacggccacatcagaatcagcgacctgggcctggccgtgaagatccccgagggcgacctgatcagaggcagagtgggcaccgtgggctacatggcccccgaggtgctgaacaaccagagatacggcctgagccccgactactggggcctgggctgcctgatctacgagatgatcgagggccagagccccttcagaggcagaaaggagaaggtgaagagagaggaggtggacagaagagtgctggagaccgaggaggtgtacagccacaagttcagcgaggaggccaagagcatctgcaagatgctgctgaccaaggacgccaagcagagactgggctgccaggaggagggcgccgccgaggtgaagagacaccccttcttcagaaacatgaacttcaagagactggaggccggcatgctggacccccccttcgtgcccgaccccagagccgtgtactgcaaggacgtgctggacatcgagcagttcagcaccgtgaagggcgtgaacctggaccacaccgacgacgacttctacagcaagttcagcaccggcagcgtgagcatcccctggcagaacgagatgatcgagaccgagtgcttcaaggagctgaacgtgttcggccccaacggcaccctgccccccgacctgaacagaaaccacccccccgagccccccaagaagggcctgctgcagagactgttcaagagacagcaccagaacaacagcaagagcagccccagcagcaagaccagcttcaaccaccacatcaacagcaaccacgtgagcagcaacagcaccggcagcagctag

SEQ ID NO: 282786 - DNA, 1200 bp, Artificial Sequence
  derived and/or modified sequence
atgaccaagtacctgacccccaagagccccgtgttcatcgcccaggtgggccaggacctggtgagccagaccgaggagaagctgctgcagaagccctgcaaggagctgttcagcgcctgcgcccagagcgtgcacgagtacctgagaggcgagcccttccacgagtacctggacagcatgttcttcgacagattcctgcagtggaagtggctggagagacagcccgtgaccaagaacaccttcagacagtacagagtgctgggcaagggcggcttcggcgaggtgtgcgcctgccaggtgagagccaccggcaagatgtacgcctgcaagagactggagaagaagagaatcaagaagagaaagggcgagagcatggccctgaacgagaagcagatcctggagaaggtgaacagccagttcgtggtgaacctggcctacgcctacgagaccaaggacgccctgtgcctggtgctgaccatcatgaacggcggcgacctgaagttccacatctacaacatgggcaaccccggcttcgaggagggcgccgccgaggtgaagagacaccccttcttcagaaacatgaacttcaagagactggaggccggcatgctggacccccccttcgtgcccgaccccagagccgtgtactgcaaggacgtgctggacatcgagcagttcagcaccgtgaagggcgtgaacctggaccacaccgacgacgacttctacagcaagttcagcaccggcagcgtgagcatcccctggcagaacgagatgatcgagaccgagtgcttcaaggagctgaacgtgttcggccccaacggcaccctgccccccgacctgaacagaaaccacccccccgagccccccaagaagggcctgctgcagagactgttcaagagacagcaccagaacaacagcaagagcagccccagcagcaagagcaccgtggagcccgcccagaccctgctgctgagaagcggcagcagcggcgcccccgccctggtgggcctgcccggcgagacccccggcgccggcgagggcggcagacccagcagaagaagaagaaccagcagattcctgaaggagatcagcacccaggtgtgcttccccagaagacccagacccggctggatcggcttcgtgttcggcgagcactgcaacagaaaccccatcggctacgacaacctgcacgtgttctag

SEQ ID NO: 282787 - protein, 1001 aa, Artificial Sequence
  derived and/or modified sequence
MALPQSEDAMTGDTDKYLGPQDLKELGDDSLPAEGYMGFSLGARSASLRSFSSDRSYTLNRSSYARDSMMIEELLVPSKEQHLTFTREFDSDSLRHYSWAADTLDNVNLVSSPIHSGFLVSFMVDARGGSMRGSRHHGMRIIIPPRKCTAPTRITCRLVKRHKLANPPPMVEGEGLASRLVEMGPAGAQFLGPVIVEIPHFGSMRGKERELIVLRSENGETWKEHQFDSKNEDLTELLNGMDEELDSPEELGKKRICRIITKDFPQYFAVVSRIKQESNQIGPEGGILSSTTVPLVQASFPEGALTKRIRVGLQAQPVPDEIVKKILGNKATFSPIVTVEPRRRKFHKPITMTIPVPPPSGEGVSNGYKGDTTPNLRLLCSITGGTSPAQWEDITGTTPLTFIKDCVSFTTNVSARFWLADCHQVLETVGLATQLYRELICVPYMAKFVVFAKMNDPVESSLRCFCMTDDKVDKTLEQQENFEEVARSKDIEVLEGKPIYVDCYGNLAPLTKGGQQLVFNFYSFKENRLPFSIKIRDTSQEPCGRLSFLKEPKTTKGLPQTAVCNLNITLPAHKKIEKTDRRQSFASLALRKRYSYLTEPGMSPQSPCERTDIRMAIVADHLGLSWTELARELNFSVDEINQIRVENPNSLISQSFMLLKKWVTRDGKNATTDALTSVLTKINRIDIVTLLEGPIFDYGNISGTRSFADENNVFHDPVDGYPSLQVELETPTGLHYTPPTPFQQDDYFSDISSIESPLRTPSRLSDGLVPSQGNIEHSADGPPVVTAEDASLEDSKLEDSVPLTEMPEAVDVDESQLENVCLSWQNETSSGNLESCAQARRVTGGLLDRLDDSPDQCRDSITSYLKGEAGKFEANGSHTEITPEAKTKSYFPESQNDVGKQSTKETLKPKIHGSGHVEEPASPLAAYQKSLEETSKLIIEETKPCVPVSMKKMSRTSPADGKPRLSLHEEEGSSGSEQKQGEGFKVKTKKEIRHVEKKSHS

SEQ ID NO: 282788 - protein, 1847 aa, Artificial Sequence
  derived and/or modified sequence
SDANASYLRAARAGHLEKALDYIKNGVDINICNQNGLNALHLASKEGHVEVVSELLQREANVDAATKKGNTALHIASLAGQAEVVKVLVTNGANVNAQSQNGFTPLYMAAQENHLEVVKFLLDNGASQSLATEDGFTPLAVALQQGHDQVVSLLLENDTKGKVRLPALHIAARKDDTKAAALLLQNDNNADVESKSGFTPLHIAAHYGNINVATLLLNRAAAVDFTARNDITPLHVASKRGNANMVKLLLDRGAKIDAKTRDGLTPLHCGARSGHEQVVEMLLDRAAPILSKTKNGLSPLHMATQGDHLNCVQLLLQHNVPVDDVTNDYLTALHVAAHCGHYKVAKVLLDKKANPNAKALNGFTPLHIACKKNRIKVMELLLKHGASIQAVTESGLTPIHVAAFMGHVNIVSQLMHHGASPNTTNVRGETALHMAARSGQAEVVRYLVQDGAQVEAKAKDDQTPLHISARLGKADIVQQLLQQGASPNAATTSGYTPLHLSAREGHEDVAAFLLDHGASLSITTKKGFTPLHVAAKYGKLEVANLLLQKSASPDAAGKSGLTPLHVAAHYDNQKVALLLLDQGASPHAAAKNGYTPLHIAAKKNQMDIATTLLEYGADANAVTRQGIASVHLAAQEGHVDMVSLLLGRNANVNLSNKSGLTPLHLAAQEDRVNVAEVLVNQGAHVDAQTKMGYTPLHVGCHYGNIKIVNFLLQHSAKVNAKTKNGYTPLHQAAQQGHTHIINVLLQNNASPNELTVNGNTALGIARRLGYISVVDTLKIVTEETMTTTTVTEKHKMNVPETMNEVLDMSDDEVRKANAPEMLSDGEYISDVEEGNRCTWYKIPKVQEFTVKSEDAMTGDTDKYLGPQDLKELGDDSLPAEGYMGFSLGARSASLRSFSSDRSYTLNRSSYARDSMMIEELLVPSKEQHLTFTREFDSDSLRHYSWAADTLDNVNLVSSPIHSGFLVSFMVDARGGSMRGSRHHGMRIIIPPRKCTAPTRITCRLVKRHKLANPPPMVEGEGLASRLVEMGPAGAQFLGPVIVEIPHFGSMRGKERELIVLRSENGETWKEHQFDSKNEDLTELLNGMDEELDSPEELGKKRICRIITKDFPQYFAVVSRIKQESNQIGPEGGILSSTTVPLVQASFPEGALTKRIRVGLQAQPVPDEIVKKILGNKATFSPIVTVEPRRRKFHKPITMTIPVPPPSGEGVSNGYKGDTTPNLRLLCSITGGTSPAQWEDITGTTPLTFIKDCVSFTTNVSARFWLADCHQVLETVGLATQLYRELICVPYMAKFVVFAKMNDPVESSLRCFCMTDDKVDKTLEQQENFEEVARSKDIEVLEGKPIYVDCYGNLAPLTKGGQQLVFNFYSFKENRLPFSIKIRDTSQEPCGRLSFLKEPKTTKGLPQTAVCNLNITLPAHKKIEKTDRRQSFASLALRKRYSYLTEPGMSPQSPCERTDIRMAIVADHLGLSWTELARELNFSVDEINQIRVENPNSLISQSFMLLKKWVTRDGKNATTDALTSVLTKINRIDIVTLLEGPIFDYGNISGTRSFADENNVFHDPVDGYPSLQVELETPTGLHYTPPTPFQQDDYFSDISSIESPLRTPSRLSDGLVPSQGNIEHSADGPPVVTAEDASLEDSKLEDSVPLTEMPEAVDVDESQLENVCLSWQNETSSGNLESCAQARRVTGGLLDRLDDSPDQCRDSITSYLKGEAGKFEANGSHTEITPEAKTKSYFPESQNDVGKQSTKETLKPKIHGSGHVEEPASPLAAYQKSLEETSKLIIEETKPCVPVSMKKMSRTSPADGKPRLSLHEEEGSSGSEQKQGEGFKVKTKKEIRHVEKKSHS

SEQ ID NO: 282789 - protein, 811 aa, Artificial Sequence
  derived and/or modified sequence
MALPQSEDAMTGDTDKYLGPQDLKELGDDSLPAEGYMGFSLGARSASLRSFSSDRSYTLNRSSYARDSMMIEELLVPSKEQHLTFTREFDSDSLRHYSWAADTLDNVNLVSSPIHSGFLVSFMVDARGGSMRGSRHHGMRIIIPPRKCTAPTRITCRLVKRHKLANPPPMVEGEGLASRLVEMGPAGAQFLGPVIVEIPHFGSMRGKERELIVLRSENGETWKEHQFDSKNEDLTELLNGMDEELDSPEELGKKRICRIITKDFPQYFAVVSRIKQESNQIGPEGGILSSTTVPLVQASFPEGALTKRIRVGLQAQPVPDEIVKKILGNKATFSPIVTVEPRRRKFHKPITMTIPVPPPSGEGVSNGYKGDTTPNLRLLCSITGGTSPAQWEDITGTTPLTFIKDCVSFTTNVSARFWLADCHQVLETVGLATQLYRELICVPYMAKFVVFAKMNDPVESSLRCFCMTDDKVDKTLEQQENFEEVARSKDIEVLEGKPIYVDCYGNLAPLTKGGQQLVFNFYSFKENRLPFSIKIRDTSQEPCGRLSFLKEPKTTKGLPQTAVCNLNITLPAHKKIEKTDRRQSFASLALRKRYSYLTEPGMSPQSPCERTDIRMAIVADHLGLSWTELARELNFSVDEINQIRVENPNSLISQSFMLLKKWVTRDGKNATTDALTSVLTKINRIDIVTLLEGPIFDYGNISGTRSFADENNVFHDPVDGYPSLQVELETPTGLHYTPPTPFQQDDYFSDISSIESPLRTPSRLSDGLVPSQGNIEHSADGPPVVTAEDASLEDSKLEDSVPLTEMPEAVM

SEQ ID NO: 282790 - DNA, 5544 bp, Artificial Sequence
  derived and/or modified sequence
agcgatgccaatgcctcttatttgcgcgccgctcgtgctgggcatctggagaaagcactggactacatcaaaaacggggtcgatatcaatatatgtaatcagaatggcctgaacgctctgcacttggcaagcaaagaggggcacgttgaagtggtctctgaattgctgcaacgagaagctaatgtcgacgctgctactaaaaaaggaaatactgccttgcacatagctagcctggcaggacaggcagaggtggtcaaagtgttagtcactaatggcgcaaatgtgaacgcccaaagccaaaatggctttacccctctgtacatggcagctcaggaaaatcacttggaggttgtcaagttcctgctggacaatggcgcttcccaatctctggctacggaagacggcttcaccccactggctgtagccctacagcagggtcatgaccaagtagtgagcctgttgctggagaacgacacgaagggcaaagtgcgcctccccgcattgcacatcgcggctagaaaagacgataccaaggccgccgcactgttattacagaacgacaacaatgcagatgtcgagagcaagagtggattcacacctctccacatcgctgcacattatgggaacatcaacgtggccacattgctcctgaaccgggcagcggccgtcgattttacagcacgcaatgacatcacacctctacatgtcgcatctaagagaggcaacgccaacatggtgaaacttctgctggatcggggcgctaaaattgatgccaagaccagagacggtctcacccccctgcattgtggagcgcggagcggtcacgaacaggtggtggagatgctacttgacagagccgccccaattctcagcaaaacaaaaaatggattgtctcctctacatatggctactcagggggatcacctcaactgtgtccagttgctgttgcaacacaatgtgccggtggatgacgtgaccaatgattacctgactgctctgcacgtggccgcacattgcgggcactacaaagtagcaaaggtactcctggacaaaaaggctaaccctaacgccaaagccctaaatgggttcacaccactacatattgcatgcaagaagaatcgaattaaggtcatggaattgcttctgaagcacggagccagcattcaggccgttacagagtctggcctcactcctatccatgtcgctgcctttatgggacacgtgaacattgtgtcgcaactaatgcatcacggggcttctcccaatactacaaacgttaggggtgagacagccctccatatggcggcccggtccgggcaggccgaggtggttagatacctagtgcaggatggagcacaggtggaggcaaaagccaaggacgaccaaacgcccctgcacatctccgcacgtcttggcaaagcggacatcgtacagcagctcctccaacagggggcctcacctaatgccgccactacctcaggttataccccactacatctctccgcaagggaaggtcatgaggacgtcgcggccttcttgctggaccatggggcctccctcagtattaccacaaagaaagggtttacacccctgcatgttgcagctaaatacggcaagctggaggttgctaatcttttgctccagaagtctgctagtcccgacgcagccggaaaatctggactgacgccgttacatgtagccgcgcattacgataaccagaaagttgcgctgctcctgctggatcaaggcgccagccctcatgccgcggctaagaacggctatactcctttacacatagccgctaaaaagaaccagatggatatcgccactactctgctcgagtatggagcagacgccaacgcagtgacacggcagggaatcgcctctgttcacctggctgcgcaggagggtcacgttgatatggtctcattgctactcggcagaaacgccaacgtgaacttgagcaataagtcaggcctcaccccactccacttggccgcccaagaagacagggttaatgttgcagaggtgctagtgaatcaaggagcgcatgtggacgcccagacaaagatgggatataccccccttcatgtgggttgccactacgggaatattaaaatcgttaatttcttactgcaacactcagccaaagtgaacgctaagacaaagaacggatacaccccgcttcaccaggcagcccagcagggacatacccacattataaacgtcctgcttcagaacaacgcctcaccgaatgagttgactgtgaacggcaatactgctctcggcatagccagacgactaggatacatcagtgtcgtcgacactctcaagatagtcactgaggagacgatgaccacaaccacagtgacagagaagcacaaaatgaatgtcccggaaacgatgaacgaagtgttggacatgagcgacgatgaagttcgtaaggcaaacgctcccgaaatgctgtccgacggggaatacatatcagatgtcgaggaggggaaccgctgcacatggtataaaatccccaaggtccaggagttcaccgtgaagtctgaagatgcaatgaccggggatacagataaatacctgggaccacaagacttgaaggaacttggggacgactccctccctgccgaaggatacatggggttctctctcggggcacggagtgcatccttaaggtcctttagcagtgaccggagttatacattaaatcgatcgtcatatgctcgcgactctatgatgatagaggagctgctggtgccctccaaggaacagcacctaacatttacacgtgagtttgactcagactccctccggcactatagctgggctgccgataccttggacaacgtaaacttggtgtctagtccaatccactccggctttctggtctcgtttatggttgatgcaagagggggatcaatgaggggatctaggcatcatggaatgaggataatcataccacctcggaaatgcacagctcctactcgcattacttgcagactggttaagcggcacaaactggctaaccccccacctatggtcgagggcgagggcctggcctctcgcctcgtggagatggggccggctggcgctcagttcctgggcccagtcatagtggagatccctcacttcggctctatgcgcggcaaggagcgggaactgattgtcctgcggagtgagaatggcgagacatggaaagaacaccagttcgatagtaagaacgaagatctcaccgaactgcttaatggcatggacgaggagctagacagcccggaggaattgggaaagaagcgaatatgtcggatcatcactaaagactttccccagtactttgctgttgtgagccgcatcaagcaggaaagcaaccaaatcggccccgagggaggaattctgagctcaacaacagtcccactggtgcaagcctccttccccgaaggcgctcttacgaaacggattcgggtggggctgcaggcgcaacccgtaccagacgaaattgtcaagaaaatactcggaaataaggctacatttagtcctatcgttaccgttgagccacggagacgaaagttccacaagcccatcacaatgactatccccgttccccctccttccggggaaggagttagcaacgggtataaaggggacacaacccctaatctgcggctgctctgcagtatcacaggaggtacatctcccgctcaatgggaggatatcacaggcactacccctctgacattcattaaggactgtgtgtcctttaccaccaacgtgtctgctaggttttggctggctgattgtcaccaggtcttggagaccgttgggctcgcgacccagctgtatagagaactcatctgcgtaccctatatggccaagttcgtggtattcgctaagatgaatgatcctgttgaaagctccctgcgatgcttctgtatgactgacgacaaggttgacaaaaccctggagcaacaagaaaattttgaggaggtggctcggagtaaagatattgaggttttggaaggcaagcctatctatgtcgattgctacgggaatttggcaccattgactaaaggcggacagcagctggtctttaacttctattcctttaaggaaaaccgcctaccatttagcattaagatccgagacacatcccaggaaccatgtggacgactgtcctttctcaaagagcctaagacaaccaaagggctgccccaaacagccgtctgcaacttaaatattacgctgcctgctcacaagaaaatcgaaaagacagaccgccggcagtcgttcgccagcttagcccttcgaaaacgatattcttatctcaccgaaccaggcatgtctccacagagtccatgcgagagaaccgacattcggatggccatcgtggccgatcatttggggctctcttggactgagctggcacgtgaactgaacttcagcgtggacgaaatcaaccaaatccgggttgaaaacccaaactctctgatatctcagtccttcatgcttctgaagaagtgggtgaccagagacggtaagaacgccaccaccgacgccctcacaagcgtgctgactaagattaataggatcgatatcgtcactctcctcgaaggtccaatttttgattatggcaatatctccgggacaaggagctttgccgatgaaaataacgtgtttcatgatccggtggatggatacccctctctccaggtggagcttgagacccccactgggctgcactacacaccgccgaccccattccagcaggatgactacttctctgatatctcctccatcgagagtccactgaggactccgagccggctttcagatggattggttccatcgcaaggtaacatcgaacacagtgccgatggcccgcctgttgtgaccgctgaggatgcttctctggaggattccaagcttgaagattccgtgcctttgacggagatgccagaggccgtcgacgtcgatgagtcccagctggagaatgtctgtctgtcatggcagaacgagacgtccagcggaaatttagagtcgtgtgcccaggcccgtagagtaaccgggggactcctcgatcgcctggatgattctcctgaccagtgcagagattctatcacgtcgtacttaaagggagaagccggtaaattcgaggcaaacgggtctcacacagagataaccccggaggctaagactaagagctacttccctgagtctcagaatgacgttgggaagcagagcaccaaggaaactctcaagcccaagatccatgggtctggacatgtggaggagcctgcatcgccgcttgccgcctaccagaaatccttggaggagacaagcaaactgattattgaggagacaaagccgtgcgtgcctgtgagcatgaaaaaaatgagtagaaccagccccgctgatggcaagccccgattaagcctgcacgaagaagagggatcttctggtagtgaacagaaacagggggaaggcttcaaggttaaaaccaagaaagagatcaggcacgtcgaaaagaagagccatagctag

SEQ ID NO: 282791 - DNA, 5544 bp, Artificial Sequence
  derived and/or modified sequence
agtgatgccaatgccagctacctgcgggccgcccgggccggccacctggagaaggccctggactacatcaagaatggagtggacatcaacatctgcaaccagaatggcctgaatgccctgcacctggccagcaaggagggccacgtggaggtggtgtctgagctgctgcagcgggaggccaacgtggatgctgccaccaagaagggcaacacagccctgcacatcgccagcctggccggccaggccgaggtggtgaaggtgctggtgaccaatggagccaacgtgaatgcccagagccagaatggcttcacccccctgtacatggccgcccaggagaaccacctggaggtggtgaagttcctgctggacaacggggccagccagagcctggccacagaagatggcttcacccccctggccgtggccctgcagcagggccatgaccaggtggtgtccctgctgctggagaatgacaccaagggcaaggtgcggctgcctgccctgcacatcgccgccaggaaggatgacaccaaggccgccgccctgctgctgcagaatgacaacaatgctgatgtggagagcaagagcggcttcacccccctgcacatcgccgcccactacggcaacatcaacgtggccaccctgctgctgaacagagctgctgctgtggacttcaccgccagaaatgacatcacccccctgcacgtggccagcaagagaggaaatgccaacatggtgaagctgctgctggacagaggagccaagattgatgccaagaccagagatggcctgacccccctgcactgtggggcccggagcggccacgagcaggtggtggagatgctgctggaccgggccgcccccatcctgagcaagaccaagaatggcctgagccccctgcacatggccacccagggcgaccacctgaactgtgtgcagctgctgctgcagcacaacgtgcctgtggatgatgtgaccaatgactacctgacagccctgcacgtggccgcccactgcggccactacaaggtggccaaggtgctgctggacaagaaggccaaccccaatgccaaggccctgaatggcttcacccccctgcacatcgcctgcaagaagaaccgcatcaaggtgatggagctgctgctgaagcacggggccagcatccaggccgtgacagagagcggcctgacccccatccacgtggccgccttcatgggccacgtgaacatcgtgtcccagctgatgcaccacggggccagccccaacaccaccaacgtgcggggggagacagccctgcacatggccgcccggagcggccaggccgaggtggtgcgctacctggtgcaggatggagcccaggtggaggccaaggccaaggatgaccagacccccctgcacatcagcgcccggctgggcaaggctgacatcgtgcagcagctgctgcagcagggcgccagccccaatgctgccaccaccagcggctacacccccctgcacctgagcgcccgggagggccatgaagatgtggccgccttcctgctggaccacggggccagcctgagcatcaccaccaagaagggcttcacccccctgcacgtggccgccaagtatggcaagctggaggtggccaacctgctgctgcagaagagcgccagcccagatgctgctgggaagagcggcctgacccccctgcacgtggccgcccactatgacaaccagaaggtggccctgctgctgctggaccagggcgccagcccccacgccgccgccaagaatggctacacccccctgcacatcgccgccaagaagaaccagatggacatcgccaccaccctgctggagtatggagcagatgccaatgctgtgacccggcagggcatcgcctctgtgcacctggccgcccaggagggccacgtggacatggtgtccctgctgctgggcagaaatgccaacgtgaacctgagcaacaagagcggcctgacccccctgcacctggccgcccaggaggacagagtgaatgtggccgaggtgctggtgaaccagggcgcccacgtggatgcccagaccaagatgggctacacccccctgcacgtgggctgccactacggcaacatcaagatcgtgaacttcctgctgcagcacagcgccaaggtgaatgccaagaccaagaatggctacacccccctgcaccaggccgcccagcagggccacacccacatcatcaacgtgctgctgcagaacaatgccagccccaatgagctgactgtgaatggaaacacagccctgggcatcgcccggcggctgggctacatctctgtggtggacaccctgaagatcgtgacagaggagaccatgaccaccaccaccgtgacagagaagcacaagatgaatgtgcctgagaccatgaatgaggtgctggacatgtctgatgatgaggtgaggaaggccaatgcccctgagatgctgagtgatggagagtacatcagtgatgtggaggagggcaaccgctgcacctggtacaagatccccaaggtgcaggagttcaccgtgaagtcagaagatgccatgactggagacacagacaagtacctgggcccccaggacctgaaggagctgggagatgacagcctgcctgctgagggctacatgggcttcagcctgggcgcccggagcgccagcctgcggagcttcagcagtgacaggagctacaccctgaacagaagcagctatgcccgggacagcatgatgattgaggagctgctggtgcccagcaaggagcagcacctgaccttcacccgggagtttgacagcgacagcctgcggcactacagctgggccgctgacaccctggacaacgtgaacctggtgagcagccccatccacagcggcttcctggtgtccttcatggtggatgcccggggcggctccatgaggggcagccgccaccacggcatgaggatcatcatcccccccaggaaatgtacagcccccacccgcatcacctgccgcctggtgaagaggcacaagctggccaaccccccacccatggtggagggggagggcctggccagccggctggtggagatgggccctgctggggcccagttcctgggccctgtgattgtggagatcccccacttcggctccatgaggggcaaggagcgggagctgattgtgctgcggagtgaaaatggagagacctggaaggagcaccagtttgacagcaagaatgaagacctgacagagctgctgaatggcatggatgaggagctggacagccctgaggagctgggcaagaagaggatctgccgcatcatcaccaaggacttcccccagtactttgctgtggtgagccgcatcaagcaggagagcaaccagatcggccctgagggcggcatcctgagcagcaccaccgtgcccctggtgcaggccagcttccctgagggcgccctgaccaagaggatccgggtgggcctgcaggcccagcctgtgcctgatgagatcgtgaagaagatcctgggcaacaaggccaccttcagccccatcgtgacagtggagcccaggaggaggaagttccacaagcccatcaccatgaccatccctgtgcccccacccagcggggagggcgtgtccaatggctacaagggggacaccacccccaacctgcggctgctgtgcagcatcactggaggcaccagccctgcccagtgggaggacatcaccggcaccacccccctgaccttcatcaaggactgtgtgtccttcaccaccaacgtgtctgcccgcttctggctggccgactgccaccaggtgctggagaccgtgggcctggccacccagctgtaccgggagctgatctgtgtgccctacatggccaagtttgtggtgtttgccaagatgaatgaccctgtggagagcagcctgcgctgcttctgcatgacagatgacaaggtggacaagaccctggagcagcaggagaactttgaggaggtggcccggagcaaggacatcgaggtgctggagggcaagcccatctacgtggactgctacggcaacctggcccccctgaccaagggcggccagcagctggtgttcaacttctacagcttcaaggagaaccggctgcccttcagcatcaagatccgggacaccagccaggagccctgtggccgcctgtccttcctgaaggagcccaagaccaccaagggcctgccccagacagctgtgtgcaacctgaacatcaccctgcctgcccacaagaagattgagaagacagaccggcggcagagctttgccagcctggccctgaggaagcgctacagctacctgacagagcccggcatgagcccccagagcccctgtgagaggacagacatccgcatggccatcgtggccgaccacctgggcctgtcctggacagagctggcccgggagctgaacttctctgtggatgagatcaaccagatccgggtggagaaccccaacagcctcatcagccagagcttcatgctgctgaagaagtgggtgaccagagatggcaagaatgccaccacagatgccctgacctctgtgctgaccaagatcaacagaattgatattgtgaccctgctggagggccccatctttgattatggcaacatcagcggcaccaggagctttgctgatgagaacaacgtgttccatgaccctgtggatggctaccccagcctgcaggtggagctggagacccccaccggcctgcactacaccccacccacccccttccagcaggatgactacttcagtgacatcagcagcattgagagccccctgcggacccccagccggctgagtgatggcctggtgcccagccagggcaacatcgagcacagcgcagatggcccccctgtggtgacagcagaagatgccagcctggaggacagcaagctggaggacagcgtgcccctgacagagatgcctgaggccgtggatgtggatgagagccagctggagaatgtgtgcctgtcctggcagaatgagaccagcagcggcaacctggagagctgtgcccaggcccggcgggtgactggaggcctgctggaccggctggatgacagcccagaccagtgccgggacagcatcaccagctacctgaagggggaggccggcaagtttgaggccaacggcagccacacagagatcaccccagaggccaagaccaagagctacttccctgagagccagaatgatgtgggcaagcagagcaccaaggagaccctgaagcccaagatccacggcagcggccacgtggaggagcccgccagccccctggccgcctaccagaagagcctggaggagaccagcaagctgatcatcgaggagaccaagccctgtgtgcctgtgtccatgaagaagatgagcaggaccagccctgcagatggcaagccccggctgagcctgcacgaggaggagggcagcagcggcagcgagcagaagcagggcgagggcttcaaggtgaagaccaagaaggagatccgccacgtggagaagaagagccacagctag

SEQ ID NO: 282792 - DNA, 5544 bp, Artificial Sequence
  derived and/or modified sequence
agcgacgccaacgccagctacctgcgggccgcccgggccggccacctggagaaggcgcttgactacattaaaaatggagtcgatatcaacatttgtaatcagaatggattaaatgccctacacctggcatcaaaggaggggcatgtcgaggttgtttctgagctgctgcagcgcgaggccaacgtggatgccgcaactaaaaagggtaacaccgctcttcatatagcctctctggcagggcaggccgaggtcgtcaaggtgctggtcaccaacggtgctaacgtgaacgcccagagtcagaacggattcacaccactgtatatggccgctcaggaaaaccatctcgaagtggttaagttcctcttggacaatggcgcttcacagtcactggccaccgaagacggctttacccccttagccgtggcactccagcaaggccatgatcaggtggtgagccttctgcttgaaaacgatacgaaaggcaaagtgcgactgcccgccctgcacatcgcagcacgcaaagatgataccaaggccgcggcgcttctgctccagaatgataataatgcggatgtggagtctaaatcaggattcactccactgcacatagcagcccactatgggaatattaacgtcgccacgcttctccttaacagggcagctgcagtggacttcacggcccgcaatgatattacaccgctgcatgttgcctccaagcgaggcaatgcaaatatggtgaagctacttctcgaccgcggagctaagatcgatgctaaaactcgggatggccttacaccattacactgtggtgccagatccggccatgagcaggttgtagagatgctcctcgaccgcgcggcccccattttgagcaagacgaagaacggactgtcccctctgcatatggcaacacaaggagatcatttgaattgtgtgcaactgctgctgcaacataatgttccagtcgatgatgtgactaacgattatcttacagcactccatgtcgccgcccactgtggtcactataaagttgcgaaggtgctcctcgacaagaaagccaaccctaatgctaaggccctgaatgggttcacgcccctgcacatcgcgtgcaaaaagaataggattaaagttatggaattactgctgaaacacggcgcatccatccaggccgttaccgaaagcgggctgaccccaatccatgtggctgcgttcatgggacacgtgaacatagtgtcacagttaatgcatcacggggccagtcccaacactaccaatgtgaggggggaaaccgccttgcacatggctgcaaggtcaggacaggccgaggtggtgcgctacttagttcaggatggagcccaggtggaggcgaaggctaaagatgaccaaacgccgctgcacattagtgcccgcctcggcaaggccgacattgttcagcaactccttcagcagggggcttcccctaatgcagcaaccactagtggatacactccactccacttgagtgcgcgagagggccacgaagatgtggctgctttcttactcgaccacggagctagcttgtctataaccactaaaaaagggttcaccccccttcacgtagccgccaaatacggaaagctagaggtggccaaccttctgctgcagaaaagcgcctcacctgacgccgctgggaagagcggtctaacacctctgcatgtcgccgcccactacgacaatcagaaggtggctctgttgctcctcgaccagggggccagtccacacgccgccgccaaaaatggctacacgcctcttcatatcgctgccaagaagaatcagatggacatcgccaccacattactcgaatatggagctgacgctaatgcagtcacgcgccagggcatcgcctccgtgcaccttgctgcgcaggaaggtcacgtggacatggtgagcctcctgctcggccgcaatgcaaatgttaatctcagtaacaaatctggcctgacaccgctgcacctagcggctcaggaagatagggtgaacgttgctgaagtccttgtcaatcagggtgcccatgtcgatgctcaaacgaagatggggtacaccccactgcacgtggggtgtcactatggtaatattaaaattgtgaatttcctcctgcagcatagcgccaaggtgaacgcaaagacaaaaaatggctacacccccttgcatcaggctgctcaacagggccacacccatattattaacgtgctgctgcagaataacgcctctccaaacgagctgaccgtcaacggcaataccgcgttggggatagcccgtcggcttgggtatatctctgtcgtcgatacattaaagattgtaactgaagagaccatgacaacaactaccgtgactgagaaacacaagatgaatgtgccagagactatgaatgaagtgttggacatgtccgatgacgaagtgcggaaggcgaacgcgcccgaaatgctgtcagatggagaatatatttctgatgttgaggagggaaatagatgtacctggtataagatccccaaggtgcaagaattcacggtaaaaagcgaggatgcaatgacaggagacacagacaagtacctggggcctcaggacttgaaagaactcggcgacgatagcctgccagccgagggatacatgggctttagcttaggtgcccggtcagctagtctgaggagcttctccagcgaccggtcatataccctgaaccgatcctcttacgcccgtgactcaatgatgatcgaggagctgttggttccctccaaagaacagcatcttacatttacccgggagttcgactctgactctcttaggcactattcctgggctgcggacacattggataacgtgaatttggtatccagtccaatccatagtggcttcctggtctcgtttatggtggacgcacgaggtgggtcgatgcgggggtcacgccaccatgggatgcgaattattatcccgcctagaaagtgcacagcacctacaaggattacgtgtaggctggttaagaggcataaactggcgaacccccctccaatggtggagggtgaaggtttggcctctcgcctggtggaaatggggcctgctggagcccagtttctgggacccgttatcgttgagatccctcacttcgggagtatgagaggcaaggagagagaacttatcgtgttaaggagtgagaatggcgagacctggaaagagcaccaattcgattcaaaaaacgaagacttgactgaattactgaacggcatggacgaggagttggacagtccagaggagctggggaaaaagcgtatatgccgcattatcaccaaagacttcccacaatactttgcagtggtttcccgcatcaaacaggaaagcaatcaaattgggcctgaagggggtatcttgtcttcgaccaccgtgcccctggtgcaggcatcattccctgaaggcgccctgacgaaaagaatcagggttggtctgcaagcgcagcccgttccagacgaaattgttaagaagattcttggcaataaagctacgttctctccaatcgtgacagtggagccgcgcagacgcaaattccataaaccaattacgatgacaattcctgtacccccgccaagcggggaaggcgtgagcaacggatacaagggggacaccaccccgaacctccgcctgctctgtagtatcactggggggacgtccccagcccaatgggaagatatcaccggcaccacgccactgacatttatcaaggattgcgtatcctttaccactaacgtgtccgctagattctggctcgccgattgtcaccaggtgcttgaaactgtgggtcttgccacccagttgtatagggaactgatatgtgtgccctacatggctaaatttgtggttttcgccaaaatgaatgacccggtggaaagctcacttcgctgtttttgtatgactgacgataaagtggacaagaccttagaacagcaggaaaattttgaagaggtggcccgatctaaggacattgaggtcctggaggggaaacccatatatgtggattgttatgggaacctggctcctctgaccaagggtggccagcagcttgtgttcaacttttactcattcaaggagaacagactgcccttttccattaaaattagagacactagccaggaaccctgcggaaggctgagtttcttaaaggagccaaagactacaaagggcctcccacaaacggcagtgtgtaacctgaacatcacactgcctgcacacaagaaaattgaaaagacagatcgaaggcaatccttcgcgtcgctggccttaaggaaacggtactcatacttgaccgaacctgggatgtcaccacaatccccgtgtgagcgaacagatatccggatggcaatcgttgcggatcatctgggactctcgtggaccgaacttgcaagagagctaaacttctcagtcgatgagatcaatcagatccgtgtggaaaatcccaactcgctcataagccaaagcttcatgctactcaagaagtgggtcacacgcgacggcaagaacgcaaccaccgacgccctgacctctgtgttaactaaaattaaccgaattgatatcgtgactttgctagagggccctatcttcgactacggcaacatcagtgggaccaggtctttcgccgacgagaacaatgttttccatgatccagtggacgggtacccttctttacaggtagaactggaaactccaaccggtctgcactataccccacctacacctttccaacaagacgactacttctctgacattagctctatcgaatccccattacggactcctagcagactcagcgatgggctggtcccatcccagggcaacattgaacattccgcggatgggccacccgttgtgacagccgaagacgcctccctggaagacagcaagctcgaagattccgtgcctttgaccgaaatgcctgaggcagttgacgtggacgagagccagttggagaatgtatgtcttagctggcagaatgagacttccagcggaaacctggagagttgcgcccaggcgaggagagtgactggcggactgctggatcgcctcgacgactccccggaccagtgcagggactctataacctcctatttgaagggggaggccgggaagttcgaagcaaacggctcccacactgagatcacccctgaggccaagactaaatcatactttcctgaatcacagaatgacgtagggaagcaaagcacaaaagaaaccctgaagcctaaaatccacggcagcgggcatgtggaggagccagcttctcccttagctgcctatcagaagtcactggaggagacctcgaagttgattatcgaggaaaccaagccctgcgtgcctgtgtcaatgaaaaagatgtcccgcacttctcctgctgatggcaagcctaggctttcattgcatgaggaggagggaagcagcggttccgaacagaagcagggagaaggatttaaagtgaagaccaaaaaggaaataagacacgtcgaaaaaaagtcccattcctag

SEQ ID NO: 282793 - DNA, 5593 bp, Artificial Sequence
  derived and/or modified sequence
tctgatgccaatgcaagttacttaagagcagctcgagctggacaccttgaaaaggccctcgactacataaaaaatggagttgacatcaacatttgcaatcagaatgggttgaacgctctccaccttgcttccaaagaaggccatgtagaggttgtttctgagctgctgcagagagaagccaatgtggatgcagctacaaagaaaggaaacacagcattgcacatcgcatctttggctgggcaagcagaggtggtaaaagtcttggttacaaatggagccaatgtcaatgcacaatctcagaatggtttcacgccattgtatatggcagcccaggaaaatcacctggaagttgtcaagtttcttcttgacaatggtgcaagccagagcctagccacagaggatggcttcacaccattggcagtggctttgcaacaaggtcacgaccaagtcgtttcgctcctgctagagaatgacaccaaaggaaaagtgcgtctcccagctcttcatatcgcggcccgaaaagacgacacgaaagccgccgccctgctgctgcagaatgacaacaatgcagatgtggaatcaaagagtggcttcactccgctccacatagctgctcactatggaaatatcaatgtagccacgttgctgttaaaccgagcggctgctgtggatttcaccgcaaggaatgacatcactcctttacatgttgcatcaaaaagaggaaatgcaaatatggtaaaactattgctcgatcgaggagctaaaatcgatgccaaaaccagggatggtctgacaccactgcactgtggagcaaggagtggccacgagcaggtggtagaaatgttgcttgatcgagctgcccccattctttcaaaaaccaagaatggattatctccattgcacatggccacacaaggggatcatttaaactgcgtccagcttctcctccagcataatgtacccgtggatgatgtcaccaatgactacctgactgccctacacgtggctgcccactgtggccattacaaagttgccaaggttctcttggataagaaagctaaccccaatgccaaagccctgaatggctttacccctcttcatattgcctgcaagaagaatcgaattaaagtaatggaactccttctgaaacacggtgcatccatccaagctgtaaccgagtcgggccttaccccaatccatgttgctgccttcatggggcatgtaaatattgtatcacaactaatgcatcatggagcctcaccaaacaccaccaatgtgagaggagaaacagcactgcacatggcagctcgctccggccaagctgaagttgtgcggtatctggtacaagacggagctcaggtagaagctaaagctaaggatgaccaaacaccactccacatttcagcccgactggggaaagcagacatagtacaacagctgttgcagcaaggggcatctccaaatgcagccacaacttctgggtacaccccacttcacctttccgcccgagaggggcatgaggatgtggccgcgttccttttggatcatggagcgtctttatctataacaacaaagaaaggatttactcctcttcatgtggcagcaaaatatggaaagcttgaagtcgccaatctcctgctacagaaaagtgcatctccagatgctgctgggaagagcgggctaacaccactgcatgtagctgcacattacgataatcagaaagtggcccttctgcttttggaccaaggagcctcacctcacgcagccgcaaagaatggttatacgccactgcacatcgctgccaaaaagaaccagatggacatagcgacaactctgctggaatatggtgctgatgccaacgcagttacccggcaaggaattgcttccgtccatctcgcagctcaggaagggcacgtggacatggtgtcgctgctcctcggtagaaatgcgaatgtgaacctgagcaataagagcggcctgaccccactccatttggctgctcaagaagatcgagtgaatgtggcagaagtcctcgtaaaccaaggggctcatgtggacgcccagacaaagatgggatacacaccactgcatgtgggctgccactatggaaatatcaagattgttaatttcctgctccagcattctgcaaaagttaatgccaaaacaaagaatgggtatacgccattacatcaagcagcacagcaggggcatacgcatataataaatgtcttacttcagaacaacgcctcccccaatgaactcactgtgaatgggaatactgcccttggcattgcccggcgcctcggctacatctcagtagtggacaccctgaagatagtgaccgaagagaccatgaccacaactactgtcacagagaagcacaaaatgaatgttccagaaacgatgaatgaagttcttgatatgtctgatgatgaagttcgtaaagccaatgcccctgaaatgctcagtgatggcgaatatatctcagatgttgaagaaggtaatagatgcacatggtacaaaattcccaaggtacaagagtttacggtgaaaagtgaagatgcaatgaccggggacacagacaaatatcttgggccacaggaccttaaggaattgggtgatgattccctgcctgcagagggttacatgggctttagtctcggagcgcgttctgccagcctccgctccttcagttcggataggtcttacaccttgaacagaagctcctatgcacgggacagcatgatgattgaagaactccttgtgccatccaaagagcagcatctaacattcacaagggaatttgattcagattctcttagacattacagctgggctgcagacaccttagacaatgtcaatcttgtttcaagccccattcattctgggtttctggttagctttatggtggacgcgagagggggctccatgagaggaagccgtcatcacgggatgagaatcatcattcctccacgcaagtgtacggcccccactcgaatcacctgccgtttggtaaagagacataaactggccaacccaccccccatggtggaaggagagggattagccagtaggctggtagaaatgggtcctgcaggggcacaatttttaggccctgtcatagtggaaatccctcactttgggtccatgagaggaaaagagagagaactcattgttcttcgaagtgaaaatggtgaaacttggaaggagcatcagtttgacagcaaaaatgaagatttaaccgagttacttaatggcatggatgaagaacttgatagcccagaagagttagggaaaaagcgtatctgcaggattatcacgaaagatttcccccagtattttgcagtggtttcccggattaagcaggaaagcaaccagattggtcctgaaggtggaattctgagcagcaccacagtgccccttgttcaagcatctttcccagagggtgccctaactaaaagaattcgagtgggcctccaggcccagcctgttccagatgaaattgtgaaaaagatccttggaaacaaagcaacttttagcccaattgtcactgtggaaccaagaagacggaaattccataaaccaatcacaatgaccattccggtgcccccgccctcaggagaaggtgtatccaatggatacaaaggggacactacacccaatctgcgtcttctctgtagcattacagggggcacttcgcctgctcagtgggaagacatcacaggaacaactcctttgacgtttataaaagattgtgtctcctttacaaccaatgtttcagccagattttggcttgcagactgccatcaagttttagaaactgtggggttagccacgcaactgtacagagaattgatatgtgttccatatatggccaagtttgttgtttttgccaaaatgaatgatcccgtagaatcttccttgcgatgtttctgcatgacagatgacaaagtggacaaaactttagagcaacaagagaattttgaggaagtcgcaagaagcaaagatattgaggttctggaaggaaaacctatttatgttgattgttatggaaatttggccccacttaccaaaggaggacagcaacttgtttttaacttttattctttcaaagaaaatagactgccattttccatcaagattagagacaccagccaagagccctgtggtcgtctgtcttttctgaaagaaccaaagacaacaaaaggactgcctcaaacagcggtttgcaacttaaatatcactctgccagcacataaaaagattgagaaaacagatagacgacagagcttcgcatccttagctttacgtaagcgctacagctacttgactgagcctggaatgagtccacagagtccatgtgaacggacagatatcaggatggcaatagtagccgatcacctgggacttagttggacagaactggcaagggaactgaatttttcagtggatgaaatcaatcaaatacgtgtggaaaatccaaattctttaatttctcagagcttcatgttattaaaaaaatgggttaccagagacggaaaaaatgccacaactgatgccttaacttcggtcttgacaaaaattaatcgaatagatatagtgacactgctagaaggaccaatatttgattatggaaatatttcaggcaccagaagttttgcagatgagaacaatgttttccatgaccctgttgatggttatccttcccttcaagtggaactggaaacccccacagggttgcactacacaccacctacccctttccagcaagatgattattttagtgatatctctagcatagaatctccccttagaacccctagtagactgagtgatgggctagtgccttcccaggggaacatagagcattccgcagatggacctccagtcgtaactgcagaagacgcttccttagaagacagcaaactggaagactcagtgcctttaacagaaatgcctgaagcagtggatgtagatgagagccagttggagaatgtatgtctgagttggcagaatgagacatcaagtggaaacctagagtcctgcgctcaagctcgaagagtaactggtgggttactagatcgactggatgacagccctgaccagtgtagagattccattacctcatatctcaaaggagaagctggcaaatttgaagcaaatggaagccatacagaaatcactccagaagcaaagacaaaatcttactttccagaatcccaaaatgatgtaggaaaacagagtaccaaggaaactctgaaaccaaaaatacatggatctggtcatgttgaagaaccagcatcaccactagcagcatatcagaaatctctagaagaaaccagcaagcttataatagaagagactaaaccctgtgtgcctgtcagtatgaaaaagatgagtaggacttctccagcagatggcaagccaaggcttagcctccatgaagaagaggggtccagtgggtctgagcaaaagcagggagaaggttttaaggtgaaaacgaagaaagaaatccggcatgtggaaaagaagagccactcgtaacagcgaacggtcagtcaaggatcataagtttttactgccagtattgaga

SEQ ID NO: 282794 - DNA, 5543 bp, Artificial Sequence
  derived and/or modified sequence
tctgatgcaaatgcctcttatttacgggctgcacgagccggtcatctggagaaggcccttgattatattaagaacggcgtcgacattaatatatgcaatcagaatggtctgaatgcactgcacctggccagcaaagaagggcacgtcgaggttgtttcggaacttcttcagcgggaggccaatgtggacgctgccaccaagaaggggaacaccgcattacatattgcctcattggccggtcaggcagaggtcgttaaagtactggtcactaacggcgctaacgtcaatgcacagagtcagaatggctttacacctctgtatatggcagctcaggagaatcatctcgaggtggtaaaatttctacttgataatggcgcaagccagtccctggccacggaagatggtttcacccctcttgctgtggctctacagcaaggccatgaccaagttgtctcactcttactcgagaatgacaccaaggggaaagtgcggctccccgctcttcacatcgcagctcgaaaagacgatactaaagcagctgccctgcttcttcaaaacgataacaatgccgatgtggaatctaagagtggtttcactccacttcacatcgcagcacactacggaaacattaatgtcgcaacactccttctgaacagggctgcagccgtggacttcaccgctcggaatgacattacgccactccacgttgctagcaagcggggaaacgccaatatggtgaagttactcctcgacagaggcgctaagatcgacgccaaaacgcgcgacggattgacaccactgcactgcggagctcgatcgggccatgaacaggtcgtcgagatgttactcgaccgggctgcccctatactgagtaaaacaaaaaacggcttgtccccacttcacatggcaactcagggggatcacctgaactgcgtgcagctactgctccaacataacgttccagttgatgacgttaccaatgattatctgaccgctctccacgtggctgcccactgcggccactacaaagtggcgaaagtgctgctcgacaaaaaggcgaatcccaatgcaaaagccctgaacgggttcacccctctccatatcgcatgtaagaaaaataggatcaaagttatggaactgcttctcaagcacggcgctagcattcaagccgtgaccgaatcaggattgacaccaattcacgtggcggcttttatgggccatgttaacatcgtgtcacagctgatgcaccatggagcttctccaaatacgactaatgtgaggggtgaaaccgctctgcatatggccgctcgaagcgggcaggcagaagtggttagataccttgtccaggacggtgcacaggtagaggccaaagctaaagatgaccagacccccttacatatcagcgcaaggctggggaaagctgacatcgtccagcagctgttacagcaaggagcctctcccaacgccgctactacatccggctatacccctcttcatctgagcgctcgtgagggccacgaggacgtggccgctttcctccttgaccacggagccagcctcagcattacaacaaagaaaggttttacacctttgcacgtggctgcaaaatacggaaagttggaggtggctaacctcttgttgcagaagtccgccagccccgacgcagccggaaagtctggtctgacgccactacatgtggctgcacattacgacaaccagaaggtcgccctgttgctgcttgatcagggagccagtccgcacgctgcagcaaaaaacggttatacaccactgcacatcgcggcaaagaaaaatcagatggacatcgcgacgactctattggaatatggtgccgacgctaatgccgtgacacgtcagggtatcgcgtcagtccatttagccgcacaggagggacacgtcgatatggttagtttgctcctggggcgaaatgcaaacgtaaatctttctaataagagcggtctgacccccctccatctcgccgcacaggaggacagggtaaatgtggctgaggtgctcgtcaaccaaggggctcatgtggacgcacagacaaaaatgggctatacaccgcttcacgtcggctgccattacggcaacataaaaattgtgaattttcttctccagcactccgctaaagtcaacgctaagactaaaaacggctataccccgctccaccaagctgcacaacaggggcacacacatataattaacgtcctgttacagaacaacgcttcccccaatgaactgacagtgaacggaaatacagcgctcggcattgcacgaaggctgggctacatctcagtggttgacacattgaaaattgtcacagaggagactatgaccacaaccacagtcactgagaaacacaagatgaatgtgccagaaacaatgaacgaggtactcgatatgagcgatgacgaagttcggaaggcaaacgctcctgagatgttgtcagacggcgaatacattagtgacgttgaggaaggaaataggtgcacgtggtataaaattcccaaggtgcaagaatttaccgtaaaatccgaagatgccatgacaggcgacactgataagtatcttggcccacaggatttgaaggagttaggcgacgatagcttgcccgcagaaggatacatgggatttagtctcggcgctcgatccgcttccctgcgcagcttctcgtccgatcgaagttacacactgaacagaagctcctatgctcgcgactcgatgatgattgaggagctactagtgccatctaaagagcagcatctcactttcaccagagagttcgactccgatagcctgagacattacagttgggccgctgacacacttgacaatgttaatttggttagctcacccatccactctggctttctggtgtctttcatggttgatgcgcgtggtgggagtatgaggggttcacgacatcacggcatgcgcatcattatcccgccaaggaaatgtaccgccccaacccggattacctgtcggcttgtgaagaggcacaagctcgccaatcctccacccatggttgaaggagagggtctggctagtaggctcgtggagatgggacccgctggtgcccagttcctcggcccagtcattgtggaaattccacacttcgggagcatgcgaggcaaagaaagggagcttattgtgctaaggtctgaaaacggggagacctggaaggagcatcaattcgacagcaaaaatgaggacctgacagagctcctgaacggcatggatgaagaactggatagccccgaggaactcgggaagaagaggatctgcagaattataactaaagatttcccacaatacttcgccgtcgtgtctcggattaaacaggaatccaatcaaatcggtcccgagggcggaatcttgagctctacgaccgtccctctggtccaagccagcttcccagagggcgctttaacaaagaggattcgtgtagggctgcaggcccaaccagtccctgacgagatcgtaaaaaagattctcggaaataaagcgacattttctcctattgtcacggttgaacctcgtagaagaaagttccacaaacctataacgatgaccatccccgtaccaccaccttcaggcgaaggcgtgtctaacgggtataaaggggatacgactcctaacctgaggctgctatgctccattactggaggtaccagccctgcacaatgggaggacatcacaggaaccaccccactgacgttcattaaggactgcgtctcatttaccaccaacgtgtcagccaggttctggcttgctgattgccaccaggtgcttgagacagtgggcttggctactcaactgtacagggagctcatatgcgtgccctacatggccaagtttgtcgtgttcgctaaaatgaacgatccagtcgagagttctctcaggtgtttctgcatgactgacgataaggttgacaagactcttgaacaacaagaaaatttcgaagaagtcgcaagatcaaaagacattgaggtcctcgaaggcaaacctatctacgtggactgctacggtaatctcgctccactaactaaaggtggccagcagctggtttttaatttctacagcttcaaggaaaataggctgcctttctcaattaagattagggatacatctcaagagccttgtggaagactgtccttcttgaaagagcctaagactaccaaggggctacctcaaaccgccgtttgcaacctgaatatcaccttgcccgctcataagaagattgaaaagaccgaccgtcgacagtcgttcgcctccctcgccttacggaagcggtactcgtacctaaccgaacccggaatgagcccccagagcccctgtgagcgtacagacatacggatggctattgtggccgatcacttgggactcagctggacagaactggccagagagttgaacttttcagtggatgagatcaaccagatccgcgtcgaaaaccccaacagcctcatctcccagagtttcatgctgctgaagaaatgggtgactcgcgatggaaagaacgctactaccgatgcactgaccagcgtgctgaccaagatcaaccgaattgacatcgtgactctgctggaaggccctatcttcgactatggcaatatcagcggaacacggagcttcgctgacgagaacaatgtattccatgacccggtggacggctatccctcactccaggtggaattggagactcccactggcctgcactatactcccccaacaccatttcagcaggatgattattttagtgatatctcgtctatcgagagtccactccgaaccccctctcgcctcagcgatgggctggtgccctcccaaggcaatatcgaacacagtgcagacggacccccagtggtgactgctgaagatgccagcctggaggacagtaaactagaggacagcgtacccctcacggagatgccagaagctgtcgacgtcgatgagtcccagcttgaaaacgtctgtctctcctggcagaacgaaacatcttctgggaacttggagagctgcgcccaggccaggcgagtgaccggtggccttctggaccgactggacgactccccagatcagtgtcgagattctattacaagctatctgaagggtgaggcagggaagttcgaggcgaacgggtcccacacagagatcacgccagaggcgaaaaccaagtcatactttccggagagtcagaacgatgttggaaaacagtccaccaaagaaaccctcaagccgaaaatacacggtagcggccatgtcgaggaacctgcatctcccctggcggcataccagaaaagcctggaggaaactagcaagctgattatcgaggagactaaaccatgcgtgccagtcagcatgaaaaagatgagtcgcacctcgccagccgacggcaaaccccgtctcagcctacatgaagaggaggggtccagcggatctgagcaaaaacaaggagaaggctttaaggtgaagaccaagaaagagatccgccatgttgagaaaaagtcacactcata

SEQ ID NO: 282795 - DNA, 5544 bp, Artificial Sequence
  derived and/or modified sequence
agcgacgccaacgccagctacctgagagccgccagagccggccacctggagaaggccctggactacatcaagaacggcgtggacatcaacatctgcaaccagaacggcctgaacgccctgcacctggccagcaaggagggccacgtggaggtggtgagcgagctgctgcagagagaggccaacgtggacgccgccaccaagaagggcaacaccgccctgcacatcgccagcctggccggccaggccgaggtggtgaaggtgctggtgaccaacggcgccaacgtgaacgcccagagccagaacggcttcacccccctgtacatggccgcccaggagaaccacctggaggtggtgaagttcctgctggacaacggcgccagccagagcctggccaccgaggacggcttcacccccctggccgtggccctgcagcagggccacgaccaggtggtgagcctgctgctggagaacgacaccaagggcaaggtgagactgcccgccctgcacatcgccgccagaaaggacgacaccaaggccgccgccctgctgctgcagaacgacaacaacgccgacgtggagagcaagagcggcttcacccccctgcacatcgccgcccactacggcaacatcaacgtggccaccctgctgctgaacagagccgccgccgtggacttcaccgccagaaacgacatcacccccctgcacgtggccagcaagagaggcaacgccaacatggtgaagctgctgctggacagaggcgccaagatcgacgccaagaccagagacggcctgacccccctgcactgcggcgccagaagcggccacgagcaggtggtggagatgctgctggacagagccgcccccatcctgagcaagaccaagaacggcctgagccccctgcacatggccacccagggcgaccacctgaactgcgtgcagctgctgctgcagcacaacgtgcccgtggacgacgtgaccaacgactacctgaccgccctgcacgtggccgcccactgcggccactacaaggtggccaaggtgctgctggacaagaaggccaaccccaacgccaaggccctgaacggcttcacccccctgcacatcgcctgcaagaagaacagaatcaaggtgatggagctgctgctgaagcacggcgccagcatccaggccgtgaccgagagcggcctgacccccatccacgtggccgccttcatgggccacgtgaacatcgtgagccagctgatgcaccacggcgccagccccaacaccaccaacgtgagaggcgagaccgccctgcacatggccgccagaagcggccaggccgaggtggtgagatacctggtgcaggacggcgcccaggtggaggccaaggccaaggacgaccagacccccctgcacatcagcgccagactgggcaaggccgacatcgtgcagcagctgctgcagcagggcgccagccccaacgccgccaccaccagcggctacacccccctgcacctgagcgccagagagggccacgaggacgtggccgccttcctgctggaccacggcgccagcctgagcatcaccaccaagaagggcttcacccccctgcacgtggccgccaagtacggcaagctggaggtggccaacctgctgctgcagaagagcgccagccccgacgccgccggcaagagcggcctgacccccctgcacgtggccgcccactacgacaaccagaaggtggccctgctgctgctggaccagggcgccagcccccacgccgccgccaagaacggctacacccccctgcacatcgccgccaagaagaaccagatggacatcgccaccaccctgctggagtacggcgccgacgccaacgccgtgaccagacagggcatcgccagcgtgcacctggccgcccaggagggccacgtggacatggtgagcctgctgctgggcagaaacgccaacgtgaacctgagcaacaagagcggcctgacccccctgcacctggccgcccaggaggacagagtgaacgtggccgaggtgctggtgaaccagggcgcccacgtggacgcccagaccaagatgggctacacccccctgcacgtgggctgccactacggcaacatcaagatcgtgaacttcctgctgcagcacagcgccaaggtgaacgccaagaccaagaacggctacacccccctgcaccaggccgcccagcagggccacacccacatcatcaacgtgctgctgcagaacaacgccagccccaacgagctgaccgtgaacggcaacaccgccctgggcatcgccagaagactgggctacatcagcgtggtggacaccctgaagatcgtgaccgaggagaccatgaccaccaccaccgtgaccgagaagcacaagatgaacgtgcccgagaccatgaacgaggtgctggacatgagcgacgacgaggtgagaaaggccaacgcccccgagatgctgagcgacggcgagtacatcagcgacgtggaggagggcaacagatgcacctggtacaagatccccaaggtgcaggagttcaccgtgaagagcgaggacgccatgaccggcgacaccgacaagtacctgggcccccaggacctgaaggagctgggcgacgacagcctgcccgccgagggctacatgggcttcagcctgggcgccagaagcgccagcctgagaagcttcagcagcgacagaagctacaccctgaacagaagcagctacgccagagacagcatgatgatcgaggagctgctggtgcccagcaaggagcagcacctgaccttcaccagagagttcgacagcgacagcctgagacactacagctgggccgccgacaccctggacaacgtgaacctggtgagcagccccatccacagcggcttcctggtgagcttcatggtggacgccagaggcggcagcatgagaggcagcagacaccacggcatgagaatcatcatcccccccagaaagtgcaccgcccccaccagaatcacctgcagactggtgaagagacacaagctggccaaccccccccccatggtggagggcgagggcctggccagcagactggtggagatgggccccgccggcgcccagttcctgggccccgtgatcgtggagatcccccacttcggcagcatgagaggcaaggagagagagctgatcgtgctgagaagcgagaacggcgagacctggaaggagcaccagttcgacagcaagaacgaggacctgaccgagctgctgaacggcatggacgaggagctggacagccccgaggagctgggcaagaagagaatctgcagaatcatcaccaaggacttcccccagtacttcgccgtggtgagcagaatcaagcaggagagcaaccagatcggccccgagggcggcatcctgagcagcaccaccgtgcccctggtgcaggccagcttccccgagggcgccctgaccaagagaatcagagtgggcctgcaggcccagcccgtgcccgacgagatcgtgaagaagatcctgggcaacaaggccaccttcagccccatcgtgaccgtggagcccagaagaagaaagttccacaagcccatcaccatgaccatccccgtgcccccccccagcggcgagggcgtgagcaacggctacaagggcgacaccacccccaacctgagactgctgtgcagcatcaccggcggcaccagccccgcccagtgggaggacatcaccggcaccacccccctgaccttcatcaaggactgcgtgagcttcaccaccaacgtgagcgccagattctggctggccgactgccaccaggtgctggagaccgtgggcctggccacccagctgtacagagagctgatctgcgtgccctacatggccaagttcgtggtgttcgccaagatgaacgaccccgtggagagcagcctgagatgcttctgcatgaccgacgacaaggtggacaagaccctggagcagcaggagaacttcgaggaggtggccagaagcaaggacatcgaggtgctggagggcaagcccatctacgtggactgctacggcaacctggcccccctgaccaagggcggccagcagctggtgttcaacttctacagcttcaaggagaacagactgcccttcagcatcaagatcagagacaccagccaggagccctgcggcagactgagcttcctgaaggagcccaagaccaccaagggcctgccccagaccgccgtgtgcaacctgaacatcaccctgcccgcccacaagaagatcgagaagaccgacagaagacagagcttcgccagcctggccctgagaaagagatacagctacctgaccgagcccggcatgagcccccagagcccctgcgagagaaccgacatcagaatggccatcgtggccgaccacctgggcctgagctggaccgagctggccagagagctgaacttcagcgtggacgagatcaaccagatcagagtggagaaccccaacagcctgatcagccagagcttcatgctgctgaagaagtgggtgaccagagacggcaagaacgccaccaccgacgccctgaccagcgtgctgaccaagatcaacagaatcgacatcgtgaccctgctggagggccccatcttcgactacggcaacatcagcggcaccagaagcttcgccgacgagaacaacgtgttccacgaccccgtggacggctaccccagcctgcaggtggagctggagacccccaccggcctgcactacaccccccccacccccttccagcaggacgactacttcagcgacatcagcagcatcgagagccccctgagaacccccagcagactgagcgacggcctggtgcccagccagggcaacatcgagcacagcgccgacggcccccccgtggtgaccgccgaggacgccagcctggaggacagcaagctggaggacagcgtgcccctgaccgagatgcccgaggccgtggacgtggacgagagccagctggagaacgtgtgcctgagctggcagaacgagaccagcagcggcaacctggagagctgcgcccaggccagaagagtgaccggcggcctgctggacagactggacgacagccccgaccagtgcagagacagcatcaccagctacctgaagggcgaggccggcaagttcgaggccaacggcagccacaccgagatcacccccgaggccaagaccaagagctacttccccgagagccagaacgacgtgggcaagcagagcaccaaggagaccctgaagcccaagatccacggcagcggccacgtggaggagcccgccagccccctggccgcctaccagaagagcctggaggagaccagcaagctgatcatcgaggagaccaagccctgcgtgcccgtgagcatgaagaagatgagcagaaccagccccgccgacggcaagcccagactgagcctgcacgaggaggagggcagcagcggcagcgagcagaagcagggcgagggcttcaaggtgaagaccaagaaggagatcagacacgtggagaagaagagccacagctag

SEQ ID NO: 282796 - protein, 1101 aa, Artificial Sequence
  derived and/or modified sequence
MSEEPKEKNAKPAHRKRKGKKSDANASYLRAARAGHLEKALDYISVVDTLKIVTEETMTTTTVTEKHKMNVPETMNEVLDMSDDEVRKANAPEMLSDGEYISDVEEGEDAMTGDTDKYLGPQDLKELGDDSLPAEGYMGFSLGARSASLRSFSSDRSYTLNRSSYARDSMMIEELLVPSKEQHLTFTREFDSDSLRHYSWAADTLDNVNLVSSPIHSGFLVSFMVDARGGSMRGSRHHGMRIIIPPRKCTAPTRITCRLVKRHKLANPPPMVEGEGLASRLVEMGPAGAQFLGPVIVEIPHFGSMRGKERELIVLRSENGETWKEHQFDSKNEDLTELLNGMDEELDSPEELGKKRICRIITKDFPQYFAVVSRIKQESNQIGPEGGILSSTTVPLVQASFPEGALTKRIRVGLQAQPVPDEIVKKILGNKATFSPIVTVEPRRRKFHKPITMTIPVPPPSGEGVSNGYKGDTTPNLRLLCSITGGTSPAQWEDITGTTPLTFIKDCVSFTTNVSARFWLADCHQVLETVGLATQLYRELICVPYMAKFVVFAKMNDPVESSLRCFCMTDDKVDKTLEQQENFEEVARSKDIEVLEGKPIYVDCYGNLAPLTKGGQQLVFNFYSFKENRLPFSIKIRDTSQEPCGRLSFLKEPKTTKGLPQTAVCNLNITLPAHKKIEKTDRRQSFASLALRKRYSYLTEPGMSPQSPCERTDIRMAIVADHLGLSWTELARELNFSVDEINQIRVENPNSLISQSFMLLKKWVTRDGKNATTDALTSVLTKINRIDIVTLLEGPIFDYGNISGTRSFADENNVFHDPVDGYPSLQVELETPTGLHYTPPTPFQQDDYFSDISSIESPLRTPSRLSDGLVPSQGNIEHSADGPPVVTAEDASLEDSKLEDSVPLTEMPEAVDVDESQLENVCLSWQNETSSGNLESCAQARRVTGGLLDRLDDSPDQCRDSITSYLKGEAGKFEANGSHTEITPEAKTKSYFPESQNDVGKQSTKETLKPKIHGSGHVEEPASPLAAYQKSLEETSKLIIEETKPCVPVSMKKMSRTSPADGKPRLSLHEEEGSSGSEQKGEGFKVKTKKEIRHVEKKSHS

SEQ ID NO: 282797 - DNA, 3306 bp, Artificial Sequence
  derived and/or modified sequence
atgagcgaggagccaaaggaaaagaacgccaaacctgcgcaccgcaagagaaagggaaaaaaatctgacgccaacgctagctacctgcgcgctgccagagcggggcaccttgaaaaagctctggactacatctccgtagtagatacactaaaaattgtcaccgaagaaacaatgaccactacaaccgtcacagagaagcacaaaatgaatgtcccagagacaatgaatgaggtcctagacatgagcgacgacgaagtgagaaaagccaacgcacctgaaatgctttctgacggtgagtacatttctgacgtcgaagaaggagaggacgccatgacgggggacacagataaatacctgggcccacaggatctgaaggagctgggcgatgactcgctcccagcagaagggtacatgggattctccctcggcgcgagaagcgcttctctccggtccttctcctccgatcggagctacactctgaaccgttcttcttatgctcgtgatagtatgatgattgaggagttgttggtgccgtcaaaagagcagcatctgacttttacaagggaatttgactccgattccttgcggcactattcttgggccgcagacacactggataacgtgaacctggtgtcaagtcctattcatagcggattcctcgttagctttatggtggacgcgcggggtgggtccatgcgcggttccaggcaccacgggatgagaataatcatccctcctcgtaagtgtaccgcccccacccgcattacctgtcgccttgtgaagaggcacaagctggcgaatccgcctcccatggtcgaaggagaagggctggcttcaaggctagtagaaatgggccctgctggcgctcagtttctcgggccagtgattgtggaaattccccacttcggttctatgcgcggcaaagagcgggagctgattgtactgcgaagcgagaacggcgaaacatggaaagagcaccagtttgattctaagaatgaggatttgaccgagctgctaaatggcatggacgaagagctcgacagccccgaggagctggggaagaaacggatttgccgaattataactaaggatttccctcagtactttgctgtcgtatcacgcatcaaacaggaatccaatcagatcggcccagaaggcggcattctgagttctacaacagttcccttggtgcaggcctctttccccgaaggcgccctgacgaaacgcatccgcgtgggtctgcaagcacagcctgtgcccgatgaaatagttaagaagatcctggggaataaagccacattctcacccatagtgaccgttgagcccaggcgtagaaagtttcataagcctataacaatgactattcctgttcctcctccatcaggggaaggggtgagtaacgggtataaaggagacaccactcccaatctgcgccttctgtgtagcattaccggaggaacatcacctgcccagtgggaggacataaccggcaccacgccactcacattcattaaggactgtgtcagctttaccaccaacgtgtcagcccggttctggctggctgattgtcaccaggtgctggaaaccgtcggccttgccacgcaactttaccgcgagttgatttgtgtaccctacatggccaagtttgtggtctttgcaaagatgaatgatcctgttgaaagttctctgcggtgcttctgcatgacagatgataaggtcgataaaacactggagcagcaggagaactttgaagaggtggcccgctccaaggacattgaggtccttgagggcaaaccaatctacgttgattgctatggaaatctggcgccattaaccaaaggaggacagcagctggtgttcaacttttatagcttcaaggagaatagactgcctttctccatcaagatccgggacacctcacaagagccctgcggacggctatctttcctgaaggagccaaaaacaactaagggactgcctcagactgcagtctgcaatttaaacatcacactgcctgcccacaaaaaaatcgaaaagacagatcgcaggcaatcttttgcctccctcgcactgagaaagcgttattcttatttgaccgagccagggatgtcacctcaatcaccatgcgagcgaacagatattaggatggctattgttgctgaccacttgggtctgtcttggacggagctagctcgcgagctgaattttagcgttgatgagatcaatcaaattcgtgtggaaaaccccaattccttgatatcccaatctttcatgctcctgaaaaagtgggtgacccgagacggtaaaaacgcaactacagacgccctgacatccgtcctcacgaaaatcaatcggatcgacatcgtgacactactggaggggcccatctttgactacggtaatatctccgggacccggagcttcgcagatgagaataatgtgttccacgatcctgtggatggttacccaagtctgcaggtggagctagaaacccccacaggccttcactataccccgccaactccatttcagcaggatgactatttctccgacatctctagcatcgaatcccctttacgcacaccaagcaggctgtcggatggtttggtaccatcgcagggaaacatcgaacattcagcggacggtccgccagtcgtgaccgcagaagatgcttctctggaggacagcaagctggaagactcagtgcctttgacagaaatgcccgaagccgtggacgtggacgaatcccaactcgagaacgtttgtcttagctggcagaatgagactagttctggcaaccttgaaagctgtgcacaggcccggcgggtgacgggaggactgctggaccgactcgatgatagccccgatcagtgcagagatagcatcacatcatacctcaaaggggaggccggaaagttcgaggccaatggaagtcatacagagatcaccccggaggctaagactaaaagttatttccccgaatctcagaacgacgtgggcaagcagagcaccaaagaaacgctgaaaccaaaaattcacgggtcaggccacgtggaggaacccgcctccccccttgctgcctaccagaagtctttagaggaaacctctaagttgattattgaggagactaagccttgtgtgcccgtttccatgaagaaaatgtcccgtacctccccagcagatggcaaaccccggttgtcactgcatgaggaagaaggttctagcgggagcgagcaaaagggcgaggggtttaaagtgaagaccaaaaaagagatacggcatgtagaaaagaaaagccattcatag

SEQ ID NO: 282798 - DNA, 3306 bp, Artificial Sequence
  derived and/or modified sequence
atgtctgaggagcccaaggagaagaatgccaagccagcccacaggaagaggaagggcaagaagagtgatgccaatgccagctacctgcgggccgcccgggccggccacctggagaaggccctggactacatctctgtggtggacaccctgaagatcgtgacagaggagaccatgaccaccaccaccgtgacagagaagcacaagatgaatgtgcctgagaccatgaatgaggtgctggacatgtctgatgatgaggtgaggaaggccaatgcccctgagatgctgagtgatggagagtacatcagtgatgtggaggagggggaggatgccatgaccggggacacagacaagtacctgggcccccaggacctgaaggagctgggagatgacagcctgcctgctgagggctacatgggcttcagcctgggcgcccggagcgccagcctgcgctccttcagcagtgacaggagctacaccctgaacagaagcagctatgcccgggacagcatgatgattgaggagctgctggtgcccagcaaggagcagcacctgaccttcacccgggagtttgacagcgacagcctgcggcactacagctgggccgctgacaccctggacaacgtgaacctggtgagcagccccatccacagcggcttcctggtgtccttcatggtggatgcccggggcggctccatgaggggcagccgccaccacggcatgaggatcatcatcccccccaggaagtgcacagcccccacccgcatcacctgccgcctggtgaagaggcacaagctggccaaccccccacccatggtggagggggagggcctggccagccggctggtggagatgggccctgctggggcccagttcctgggccctgtgattgtggagatcccccacttcggctccatgaggggcaaggagcgggagctgattgtgctgcggagtgaaaatggagagacctggaaggagcaccagtttgacagcaagaatgaagacctgacagagctgctgaatggcatggatgaggagctggacagccctgaggagctgggcaagaagaggatctgccgcatcatcaccaaggacttcccccagtactttgctgtggtgagccgcatcaagcaggagagcaaccagatcggccctgagggcggcatcctgagcagcaccaccgtgcccctggtgcaggccagcttccctgagggcgccctgaccaagaggatccgggtgggcctgcaggcccagcctgtgcctgatgaaattgtgaagaagatcctgggcaacaaggccaccttcagccccatcgtgacagtggagcccaggaggaggaagttccacaagcccatcaccatgaccatccctgtgcccccaccttctggagagggcgtgtccaatggctacaagggggacaccacccccaacctgcggctgctgtgcagcatcaccggcggcaccagccctgcccagtgggaggacatcaccggcaccacccccctgaccttcatcaaggactgtgtgtccttcaccaccaacgtgtctgcccgcttctggctggccgactgccaccaggtgctggagaccgtgggcctggccacccagctgtaccgggagctgatctgtgtgccctacatggccaagtttgtggtgtttgccaagatgaatgaccctgtggagagcagcctgcgctgcttctgcatgacagatgacaaggtggacaagaccctggagcagcaggagaactttgaggaggtggcccggagcaaggacatcgaggtgctggagggcaagcccatctacgtggactgctacggcaacctggcccccctgaccaagggcggccagcagctggtgttcaacttctacagcttcaaggaaaatcggctgcccttcagcatcaagatccgggacaccagccaggagccctgtggccgcctgtccttcctgaaggagcccaagaccaccaagggcctgccccagacagctgtgtgcaacctgaacatcaccctgcctgcccacaagaagattgagaagacagaccggcggcagagctttgccagcctggccctgaggaagcgctacagctacctgacagagcccggcatgagcccccagagcccctgtgagaggacagacatccgcatggccatcgtggccgaccacctgggcctgtcctggacagagctggcccgggagctgaacttctctgtggatgagatcaaccagatccgggtggagaaccccaacagcctcatcagccagagcttcatgctgctgaagaagtgggtgaccagagatggcaagaatgccaccacagatgccctgacctctgtgctgaccaagatcaacagaattgacatcgtgaccctgctggagggccccatctttgattatggcaacatcagcggcaccaggagctttgctgatgaaaataatgtgttccatgaccctgtggatggctaccccagcctgcaggtggagctggagacccccaccggcctgcactacaccccacccacccccttccagcaggatgactacttcagtgacatcagcagcattgagagccccctgcggacccccagccggctgagtgatggcctggtgcccagccagggcaacatcgagcacagcgcagatggcccccctgtggtgacagcagaagatgccagcctggaggacagcaagctggaggacagcgtgcccctgacagagatgcctgaggccgtggatgtggatgagagccagctggagaatgtgtgcctgtcctggcagaatgagaccagcagcggcaacctggagagctgtgcccaggcccggcgggtgactggaggcctgctggaccggctggatgacagcccagaccagtgccgggacagcatcaccagctacctgaagggggaggccggcaagtttgaggccaacggcagccacacagagatcaccccagaggccaagaccaagagctacttccctgagagccagaatgatgtgggcaagcagagcaccaaggagaccctgaagcccaagatccacggcagcggccacgtggaggagcccgccagccccctggccgcctaccagaagagcctggaggagaccagcaagctgatcatcgaggagaccaagccctgtgtgcctgtgtccatgaagaagatgagcaggaccagccctgcagatggcaagccccggctgagcctgcacgaggaggagggcagcagcggcagcgagcagaagggggagggcttcaaggtgaagaccaagaaggagatccgccacgtggagaagaagagccacagctag

SEQ ID NO: 282799 - DNA, 3306 bp, Artificial Sequence
  derived and/or modified sequence
atgagcgaggagcccaaggagaagaacgccaagcccgcccaccggaagaggaagggtaagaagagcgatgctaatgcttcttacttgagagctgcccgggctggtcacctggagaaagccttggactatatatccgtggttgatacactgaagatcgtgaccgaggagactatgacaactactaccgtcacggagaagcataagatgaacgtgccagaaacaatgaacgaagtcttggatatgtctgatgacgaagtcagaaaggccaacgcccccgagatgctttcagacggggagtatattagcgatgtagaagagggcgaagatgcaatgaccggagacactgacaagtacttgggcccacaggatctaaaagaactcggtgacgactctctgcccgctgaaggatacatggggttctcactcggagctagatctgcaagtctgcgctccttttcctcagatcgctcctatacactcaaccggagctcctatgccagggattccatgatgatcgaggagctcttggtaccttctaaagagcagcatctcacttttacccgggagttcgacagtgactctctgcgacattattcctgggcagctgatacacttgataacgtaaatctggtctccagtccgattcacagcggcttcctcgtctcttttatggtggatgcccggggcggctctatgagagggagccgacaccacgggatgaggattatcattcccccccgcaagtgcacggctccgactcgaattacctgtcggttggttaaacggcataagctggcgaacccacccccaatggtggagggggagggcctggctagcagactggtggaaatgggcccggccggagctcagttcctcgggcctgtgattgttgaaatcccccactttgggtccatgcgtggaaaggagcgagaactaattgtgctgagatcggagaatggcgagacctggaaggagcaccagtttgatagcaagaacgaggacctaaccgagctgttaaacggcatggatgaagaactggattccccagaggagttgggcaagaagcgtatctgtagaattatcacaaaagatttcccccaatactttgcagtggtgtcacgcatcaaacaagagtccaaccagatcggaccagaagggggcattttgtccagcaccaccgtgcccttagtgcaggcatctttccctgagggagccctgacaaagcgaattcgcgtgggcctgcaggcccagcccgttcctgacgaaatcgtgaagaagattctggggaataaggctactttttctccaatcgtaaccgtggagccacgtcgaagaaagttccacaaacccattacgatgaccatcccggtcccccctcccagcggagagggagtgagcaatggctacaaaggagatactactcccaacctgcggttgctgtgttcaatcaccggcggaactagtccagctcagtgggaagacattacagggaccacccctttgaccttcatcaaagattgcgtgtcgttcacaacaaacgtgtctgcccggttctggctggctgattgccatcaggtgctggagaccgtcggcctagcgacccagttgtacagagaattgatttgtgttccttatatggcaaagtttgtagtgttcgcgaagatgaatgaccccgttgagtcatctctacgttgcttctgtatgacagacgataaggttgacaagaccctcgagcagcaggagaactttgaggaggtggcaagatcaaaagatattgaggtcctggaagggaagcctatctatgtcgactgctacggcaatctggcccctcttacaaaaggcggccagcagcttgtgtttaacttctacagtttcaaggaaaaccggctccccttctcgatcaagatcagggataccagtcaggagccctgtgggagactgtctttcctaaaggaaccgaaaactacaaaaggtttgccacaaaccgcggtttgcaatctgaacatcacactccccgctcataagaagatcgagaagactgatcgacggcagtcttttgccagccttgctttgcggaagagatatagctatctcaccgaaccggggatgagtccccagtctccatgcgagagaactgatattcgcatggcgatcgtggctgatcatttaggcctgagctggacagagcttgctcgggagctgaacttttcagttgacgagatcaaccagattagagtggaaaatcctaattctctgatttctcagtcattcatgttgctgaagaagtgggtaactagagacggcaagaacgctactaccgatgcactgacctccgtgttgaccaagatcaataggatcgatatagtgactctcctagagggaccaatcttcgattatggtaacattagcggaactcggtcgtttgccgacgaaaacaacgtctttcacgaccctgtggacgggtacccctcactgcaggtggaattagaaactcctacgggactacactacaccccccccacaccgtttcagcaggatgattatttctctgacatttcctcaatcgaatcgccgctgcgcacaccgtctaggctcagcgatgggttggtccccagtcaaggaaatattgaacacagcgctgacggtcctccggtcgtaaccgccgaggacgcctccctggaggacagcaaattagaggacagcgtgccactcaccgaaatgcctgaggccgtcgatgtggatgaatctcagttagaaaacgtgtgtctgtcctggcagaatgaaacatcaagcgggaacctggagagttgcgctcaagccaggagggttaccggtgggctgctggaccggttggatgatagtcccgatcagtgtagagacagcataacatcttacctgaaaggggaagctggcaaatttgaagccaacgggtcccatacagagattacaccagaagccaaaaccaagagttacttccctgaatcccagaatgatgtaggaaaacagtctaccaaggagactctgaagccaaagatccacggatctggacatgtggaagagccagcctctccgctggccgcatatcagaagtctctcgaagaaacttccaaactgatcatcgaagaaaccaagccttgcgtgcctgtctcaatgaaaaaaatgtctcgtaccagcccagcggatgggaagcctaggctatcgctccacgaggaggaaggcagctctgggtccgaacagaagggggaaggattcaaggttaaaaccaagaaggaaataagacacgtggaaaaaaaatcacactcatag

SEQ ID NO: 282800 - DNA, 3306 bp, Artificial Sequence
  derived and/or modified sequence
atgagtgaagaaccaaaggagaaaaatgcaaaacctgctcataggaaaaggaaaggaaaaaagtctgatgccaatgcaagttacttaagagcagctcgagctggacaccttgaaaaggccctcgactacatctcagtagtggacaccctgaagatagtgaccgaagagaccatgaccacaactactgtcacagagaagcacaaaatgaatgttccagaaacgatgaatgaagttcttgatatgtctgatgatgaagttcgtaaagccaatgcccctgaaatgctcagtgatggcgaatatatctcagatgttgaagaaggtgaagatgcaatgaccggggacacagacaaatatcttgggccacaggaccttaaggaattgggtgatgattccctgcctgcagagggttacatgggctttagtctcggagcgcgttctgccagcctccgctccttcagttcggataggtcttacaccttgaacagaagctcctatgcacgggacagcatgatgattgaagaactccttgtgccatccaaagagcagcatctaacattcacaagggaatttgattcagattctcttagacattacagctgggctgcagacaccttagacaatgtcaatcttgtttcaagccccattcattctgggtttctggttagctttatggtggacgcgagagggggctccatgagaggaagccgtcatcacgggatgagaatcatcattcctccacgcaagtgtacggcccccactcgaatcacctgccgtttggtaaagagacataaactggccaacccaccccccatggtggaaggagagggattagccagtaggctggtagaaatgggtcctgcaggggcacaatttttaggccctgtcatagtggaaatccctcactttgggtccatgagaggaaaagagagagaactcattgttcttcgaagtgaaaatggtgaaacttggaaggagcatcagtttgacagcaaaaatgaagatttaaccgagttacttaatggcatggatgaagaacttgatagcccagaagagttagggaaaaagcgtatctgcaggattatcacgaaagatttcccccagtattttgcagtggtttcccggattaagcaggaaagcaaccagattggtcctgaaggtggaattctgagcagcaccacagtgccccttgttcaagcatctttcccagagggtgccctaactaaaagaattcgagtgggcctccaggcccagcctgttccagatgaaattgtgaaaaagatccttggaaacaaagcaacttttagcccaattgtcactgtggaaccaagaagacggaaattccataaaccaatcacaatgaccattccggtgcccccgccctcaggagaaggtgtatccaatggatacaaaggggacactacacccaatctgcgtcttctctgtagcattacagggggcacttcgcctgctcagtgggaagacatcacaggaacaactcctttgacgtttataaaagattgtgtctcctttacaaccaatgtttcagccagattttggcttgcagactgccatcaagttttagaaactgtggggttagccacgcaactgtacagagaattgatatgtgttccatatatggccaagtttgttgtttttgccaaaatgaatgatcccgtagaatcttccttgcgatgtttctgcatgacagatgacaaagtggacaaaactttagagcaacaagagaattttgaggaagtcgcaagaagcaaagatattgaggttctggaaggaaaacctatttatgttgattgttatggaaatttggccccacttaccaaaggaggacagcaacttgtttttaacttttattctttcaaagaaaatagactgccattttccatcaagattagagacaccagccaagagccctgtggtcgtctgtcttttctgaaagaaccaaagacaacaaaaggactgcctcaaacagcggtttgcaacttaaatatcactctgccagcacataaaaagattgagaaaacagatagacgacagagcttcgcatccttagctttacgtaagcgctacagctacttgactgagcctggaatgagtccacagagtccatgtgaacggacagatatcaggatggcaatagtagccgatcacctgggacttagttggacagaactggcaagggaactgaatttttcagtggatgaaatcaatcaaatacgtgtggaaaatccaaattctttaatttctcagagcttcatgttattaaaaaaatgggttaccagagacggaaaaaatgccacaactgatgccttaacttcggtcttgacaaaaattaatcgaatagatatagtgacactgctagaaggaccaatatttgattatggaaatatttcaggcaccagaagttttgcagatgagaacaatgttttccatgaccctgttgatggttatccttcccttcaagtggaactggaaacccccacagggttgcactacacaccacctacccctttccagcaagatgattattttagtgatatctctagcatagaatctccccttagaacccctagtagactgagtgatgggctagtgccttcccaggggaacatagagcattccgcagatggacctccagtcgtaactgcagaagacgcttccttagaagacagcaaactggaagactcagtgcctttaacagaaatgcctgaagcagtggatgtagatgagagccagttggagaatgtatgtctgagttggcagaatgagacatcaagtggaaacctagagtcctgcgctcaagctcgaagagtaactggtgggttactagatcgactggatgacagccctgaccagtgtagagattccattacctcatatctcaaaggagaagctggcaaatttgaagcaaatggaagccatacagaaatcactccagaagcaaagacaaaatcttactttccagaatcccaaaatgatgtaggaaaacagagtaccaaggaaactctgaaaccaaaaatacatggatctggtcatgttgaagaaccagcatcaccactagcagcatatcagaaatctctagaagaaaccagcaagcttataatagaagagactaaaccctgtgtgcctgtcagtatgaaaaagatgagtaggacttctccagcagatggcaagccaaggcttagcctccatgaagaagaggggtccagtgggtctgagcaaaagggagaaggttttaaggtgaaaacgaagaaagaaatccggcatgtggaaaagaagagccactcgtaa

SEQ ID NO: 282801 - DNA, 3306 bp, Artificial Sequence
  derived and/or modified sequence
atgtcagaggagcccaaggaaaaaaacgccaaaccagcacaccggaagaggaaaggcaagaagtcggatgccaacgcgtcttatctgcgggcagcacgagctggtcacttggagaaagctcttgactacatctctgtcgtagacactttaaaaattgtgacagaagaaacaatgacaacgactaccgtgactgaaaaacataagatgaatgttcccgagacaatgaacgaagtgctagatatgtccgatgacgaggtgcgaaaggctaacgcgcctgagatgctatctgacggcgaatatatcagcgacgttgaagagggagaggatgctatgacaggagacaccgacaaatacctggggccacaggatctcaaggaactgggggatgacagcctgcctgcagaaggatatatgggattcagcctgggcgctagaagtgcatcccttaggtcattctcaagtgatcgatcttacactcttaatcgttcatcttacgccagagacagcatgatgatagaggaactgctggtgccaagtaaggaacagcatttgacatttaccagggagtttgactctgactcactgcggcattacagttgggcggcagacaccttagacaacgtgaacctggtgtctagccccatccacagcggatttcttgtgagcttcatggtggatgcacggggagggagcatgcgcggatcacgacatcatggcatgcgtatcatcatccctcctcgaaaatgcacagcaccgactaggatcacatgcaggcttgtaaaaaggcacaagttagctaacccacctcccatggtcgagggggaagggcttgcttcgcgcctcgtagaaatggggcctgccggtgcgcaatttctggggccagtaatcgtggaaattccacatttcgggtccatgcgaggcaaggagagagagctcattgtactccgatcggagaatggtgaaacttggaaggagcaccagttcgactctaagaatgaagatctgaccgagctgctcaatggcatggatgaggaactggattctcccgaggaactcgggaagaaaagaatttgtaggattatcacaaaggactttccacagtattttgctgtggtaagcaggattaaacaggaatccaaccagatcggccctgagggtggcatcctcagctctactacagtacccttagtgcaggcttcattccctgagggcgctctgactaaaaggatcagggttggccttcaagctcagccagtccccgacgagattgtgaagaagattctaggaaataaggccacgtttagtcccattgtgaccgtagaacccaggagacggaagttccacaaaccgatcaccatgaccatccccgtccctcctccatccggcgagggagtaagcaacggctataaaggcgacacaacccccaatcttaggctcctgtgctcaataacaggtggcacctcccccgcacagtgggaagatatcacaggcacaaccccgctcacgtttatcaaagattgtgtttctttcactacgaacgtcagtgcccgtttttggttggccgattgccaccaggtgcttgagaccgtggggctggctactcagctgtatagagagctcatctgcgttccctacatggccaagttcgtggttttcgctaagatgaacgacccagtagaatcatccttgaggtgcttttgcatgactgacgataaggttgataagacattggagcagcaggaaaatttcgaagaggtcgctagaagcaaggacatcgaggtgctggagggcaagcccatttacgtcgactgctacggcaatctcgctcctttgacaaaaggagggcaacagctggtctttaatttctatagcttcaaggagaatcgtttaccttttagcatcaagatccgcgacacgtcacaggagccatgcggacgactaagcttcctgaaggaacctaagaccacgaagggtttacctcaaacggctgtctgcaacttgaatatcaccctgccagcccacaagaagattgagaagaccgacagacggcaatccttcgccagcctggccttgcggaagcgctactcttacctcacagaacctggcatgagtccccaatctccttgtgagcgcaccgatatcaggatggccatcgtggctgaccaccttggcctttcctggaccgagctcgcccgagagcttaacttctctgtggatgagatcaaccaaattagggtggagaaccccaactctcttatcagccaaagctttatgctacttaaaaaatgggtgacccgggacggcaaaaatgctacaacagacgcgctcaccagtgtgctgaccaaaataaatagaatcgacattgtgacactcttggaagggcctattttcgattatggaaatatctcaggcacccgctcgttcgccgatgagaacaacgtttttcatgaccccgtggacggataccctagcctgcaggtggagctagaaacgccgacaggactccattatacccctccaacaccctttcagcaagacgattacttctccgacatcagctcgattgagtcaccattgcggacacccagtcgattatctgatgggttggttccaagccagggcaatatagaacattctgctgacgggcctcctgtagtgaccgccgaggacgcttctctagaggacagtaagcttgaggatagtgtacctctgactgagatgccggaggccgtcgatgtggacgaatcacagctggagaatgtatgcctgagttggcagaatgagacctctagcggtaacttggaaagctgcgctcaggcacggagagtgacaggaggcttactggaccgcctcgacgacagccccgatcaatgccgcgactccatcacgtcctacctgaagggagaagctgggaagttcgaggctaacggaagccacacagagatcactcccgaggcaaagactaaatcgtactttcccgagtcccagaacgacgtcggtaaacagtctactaaggaaacccttaaacccaaaatccacgggtccgggcacgtcgaagaaccggcaagccccctggccgcttatcagaaaagtttggaagagacgagtaagctcatcattgaagagacaaagccatgtgtgcccgtgtctatgaagaaaatgtcccgcacgtctccagccgatggcaaacccagactaagtctgcacgaagaggagggctcttctggcagtgagcaaaaaggcgaaggattcaaggtgaagaccaaaaaggagatccgccacgtggagaaaaagtctcactcctag

SEQ ID NO: 282802 - DNA, 3306 bp, Artificial Sequence
  derived and/or modified sequence
atgagcgaggagcccaaggagaagaacgccaagcccgcccacagaaagagaaagggcaagaagagcgacgccaacgccagctacctgagagccgccagagccggccacctggagaaggccctggactacatcagcgtggtggacaccctgaagatcgtgaccgaggagaccatgaccaccaccaccgtgaccgagaagcacaagatgaacgtgcccgagaccatgaacgaggtgctggacatgagcgacgacgaggtgagaaaggccaacgcccccgagatgctgagcgacggcgagtacatcagcgacgtggaggagggcgaggacgccatgaccggcgacaccgacaagtacctgggcccccaggacctgaaggagctgggcgacgacagcctgcccgccgagggctacatgggcttcagcctgggcgccagaagcgccagcctgagaagcttcagcagcgacagaagctacaccctgaacagaagcagctacgccagagacagcatgatgatcgaggagctgctggtgcccagcaaggagcagcacctgaccttcaccagagagttcgacagcgacagcctgagacactacagctgggccgccgacaccctggacaacgtgaacctggtgagcagccccatccacagcggcttcctggtgagcttcatggtggacgccagaggcggcagcatgagaggcagcagacaccacggcatgagaatcatcatcccccccagaaagtgcaccgcccccaccagaatcacctgcagactggtgaagagacacaagctggccaaccccccccccatggtggagggcgagggcctggccagcagactggtggagatgggccccgccggcgcccagttcctgggccccgtgatcgtggagatcccccacttcggcagcatgagaggcaaggagagagagctgatcgtgctgagaagcgagaacggcgagacctggaaggagcaccagttcgacagcaagaacgaggacctgaccgagctgctgaacggcatggacgaggagctggacagccccgaggagctgggcaagaagagaatctgcagaatcatcaccaaggacttcccccagtacttcgccgtggtgagcagaatcaagcaggagagcaaccagatcggccccgagggcggcatcctgagcagcaccaccgtgcccctggtgcaggccagcttccccgagggcgccctgaccaagagaatcagagtgggcctgcaggcccagcccgtgcccgacgagatcgtgaagaagatcctgggcaacaaggccaccttcagccccatcgtgaccgtggagcccagaagaagaaagttccacaagcccatcaccatgaccatccccgtgcccccccccagcggcgagggcgtgagcaacggctacaagggcgacaccacccccaacctgagactgctgtgcagcatcaccggcggcaccagccccgcccagtgggaggacatcaccggcaccacccccctgaccttcatcaaggactgcgtgagcttcaccaccaacgtgagcgccagattctggctggccgactgccaccaggtgctggagaccgtgggcctggccacccagctgtacagagagctgatctgcgtgccctacatggccaagttcgtggtgttcgccaagatgaacgaccccgtggagagcagcctgagatgcttctgcatgaccgacgacaaggtggacaagaccctggagcagcaggagaacttcgaggaggtggccagaagcaaggacatcgaggtgctggagggcaagcccatctacgtggactgctacggcaacctggcccccctgaccaagggcggccagcagctggtgttcaacttctacagcttcaaggagaacagactgcccttcagcatcaagatcagagacaccagccaggagccctgcggcagactgagcttcctgaaggagcccaagaccaccaagggcctgccccagaccgccgtgtgcaacctgaacatcaccctgcccgcccacaagaagatcgagaagaccgacagaagacagagcttcgccagcctggccctgagaaagagatacagctacctgaccgagcccggcatgagcccccagagcccctgcgagagaaccgacatcagaatggccatcgtggccgaccacctgggcctgagctggaccgagctggccagagagctgaacttcagcgtggacgagatcaaccagatcagagtggagaaccccaacagcctgatcagccagagcttcatgctgctgaagaagtgggtgaccagagacggcaagaacgccaccaccgacgccctgaccagcgtgctgaccaagatcaacagaatcgacatcgtgaccctgctggagggccccatcttcgactacggcaacatcagcggcaccagaagcttcgccgacgagaacaacgtgttccacgaccccgtggacggctaccccagcctgcaggtggagctggagacccccaccggcctgcactacaccccccccacccccttccagcaggacgactacttcagcgacatcagcagcatcgagagccccctgagaacccccagcagactgagcgacggcctggtgcccagccagggcaacatcgagcacagcgccgacggcccccccgtggtgaccgccgaggacgccagcctggaggacagcaagctggaggacagcgtgcccctgaccgagatgcccgaggccgtggacgtggacgagagccagctggagaacgtgtgcctgagctggcagaacgagaccagcagcggcaacctggagagctgcgcccaggccagaagagtgaccggcggcctgctggacagactggacgacagccccgaccagtgcagagacagcatcaccagctacctgaagggcgaggccggcaagttcgaggccaacggcagccacaccgagatcacccccgaggccaagaccaagagctacttccccgagagccagaacgacgtgggcaagcagagcaccaaggagaccctgaagcccaagatccacggcagcggccacgtggaggagcccgccagccccctggccgcctaccagaagagcctggaggagaccagcaagctgatcatcgaggagaccaagccctgcgtgcccgtgagcatgaagaagatgagcagaaccagccccgccgacggcaagcccagactgagcctgcacgaggaggagggcagcagcggcagcgagcagaagggcgagggcttcaaggtgaagaccaagaaggagatcagacacgtggagaagaagagccacagctag

SEQ ID NO: 282803 - protein, 193 aa, Artificial Sequence
  derived and/or modified sequence
MSAETPITLNIDPQDLQVQTFTVEKLLEPLIIQVTTLVNCPQNPSSRKKGRSKRASVLLASVEEATWNLLDKGEKIAQEATVLKDELTASLEEVRKESEALKVSAERFTDDPCFLPKREAVVQAARALLAAVTRLLILADMIDVMCLLQHVSAFQRTFESLKNVANKSDLQKTYQKLGKELENLDYLAFKRQQ

SEQ ID NO: 282804 - protein, 234 aa, Artificial Sequence
  derived and/or modified sequence
MTQLPEAEKEKIAEQVADFKKVKSKLDAEIEIWDDTSNDIIVLAKNMCMIMMEMTDFTRGKGPLKHTTDVIYAAKMISESGSRMDVLARQIANQCPDPSCKQDLLAYLEQIKFYSHQLKICSQVKAEIQNLGGELIMSALDSVTSLIQAAKNLMNAVVQTVKMSYIASTKIIRIQSPAGPRHPVVMWRMKAPAKKPLIKREKPEETCAAVRRGSAKKKIHPLQVMSEFRGRQIY

SEQ ID NO: 282805 - protein, 895 aa, Artificial Sequence
  derived and/or modified sequence
MSAETPITLNIDPQDLQVQTFTVEKLLEPLIIQVTTLVNCPQNPSSRKKGRSKRASVLLASVEEATWNLLDKGEKIAQEATVLKDELTASLEEVRKESEALKVSAERFTDDPCFLPKREAVVQAARALLAAVTRLLILADMIDVMCLLQHVSAFQRTFESLKNVANKSDLQKTYQKLGKELENLDYLAFKRQQDLKSPNQRDEIAGARASLKENSPLLHSICSACLEHSDVASLKASKDTVCEEIQNALNVISNASQGIQNMTTPPEPQAATLGSALDELENLIVLNPLTVTEEEIRPSLEKRLEAIISGAALLADSSCTRDLHRERIIAECNAIRQALQDLLSEYMNNAGKKERSNTLNIALDNMCKKTRDLRRQLRKAIIDHVSDSFLDTTVPLLVLIEAAKNGREKEIKEYAAIFHEHTSRLVEVANLACSMSTNEDGIKIVKIAANHLETLCPQIINAALALAARPKSQAVKNTMEMYKRTWENHIHVLTEAVDDITSIDDFLAVSESHILEDVNKCIIALRDQDADNLDRAAGAIRGRAARVAHIVTGEMDSYEPGAYTEGVMRNVNFLTSTVIPEFVTQVNVALEALSKSSLNVLDDNQFVDISKKIYDTIHDIRCSVMMIRTPEELEDVSDLEEEHEVRSHTSIQTEGKTDRAKMTQLPEAEKEKIAEQVADFKKVKSKLDAEIEIWDDTSNDIIVLAKNMCMIMMEMTDFTRGKGPLKHTTDVIYAAKMISESGSRMDVLARQIANQCPDPSCKQDLLAYLEQIKFYSHQLKICSQVKAEIQNLGGELIMSALDSVTSLIQAAKNLMNAVVQTVKMSYIASTKIIRIQSPAGPRHPVVMWRMKAPAKKPLIKREKPEETCAAVRRGSAKKKIHPLQVMSEFRGRQIY

SEQ ID NO: 282806 - DNA, 3232 bp, Artificial Sequence
  derived and/or modified sequence
caacgctcagcgaaattgactgccccactgtcatctgcctctcaatttggtactctgtaactctgtgaccaccaagaagcctttttccgtcccccacaaagctctttttggaaaattccctacgggagctgaattttaagcccatttactttataggaagaaacagaaaggcagcatgtcagctgaaacaccaatcacattgaatatcgatcctcaggatctgcaggtccaaacattcaccgtggagaagctactggagcctctcataatccaggttaccacacttgtaaactgtccccagaacccttccagcaggaaaaaaggacgttcgaaaagagccagtgtccttctagcttctgtggaggaagcaacttggaatttattagacaagggagagaagattgcccaggaagctacagttttaaaggatgagcttacggcttcacttgaggaagttcgcaaagaaagtgaagctctgaaagtatcagctgagagatttacagatgacccctgttttctcccaaaaagggaggctgtggttcaagctgcccgtgccttgctggctgcggtgacgagactccttatccttgcggacatgattgatgtcatgtgcctcttgcaacatgtgtcagcttttcaaaggacatttgagtctctcaaaaatgttgccaacaaatctgacctccagaaaacctaccagaagcttgggaaggagctggaaaatttggattatttagccttcaaacgtcagcaggacttaaaatctccaaatcagagagatgaaattgcaggagcccgagcttcactgaaggagaactctcccctcttgcattcaatttgttcagcttgtttggagcattctgatgttgcttccctcaaagcaagcaaggacacagtttgtgaagaaattcagaatgctctcaatgtaatttcaaatgcttcacaagggatccagaatatgacaaccccaccagaacctcaggcagcaaccctgggaagtgcccttgatgagctggagaatttaattgtcctgaatccactcacagtaactgaggaggaaatacgaccatcactagagaaacgccttgaagccattatcagtggggctgctctgctggcggattcttcatgtacgagggacttacaccgagagcggattatcgcagaatgcaacgccattcgccaggctcttcaggatctgctttcagagtacatgaacaacgctggaaaaaaagaaaggagtaataccctgaatattgctttagacaacatgtgtaagaagacaagagaccttcgcagacagctccgcaaggctattatagatcatgtgtcagactctttcctggatacgacagtccctcttttggttctcattgaagctgctaagaatggccgggaaaaggaaataaaagaatatgctgcgatatttcatgaacacaccagcaggcttgtagaggtggcaaatcttgcttgttccatgtcaacaaatgaagatggaattaaaattgtcaaaattgcagccaatcatttggaaaccttgtgtccacagattattaatgctgcacttgctttggctgcaagacccaaaagtcaagcggtcaaaaacaccatggaaatgtacaagcgtacatgggagaatcatatacatgtcctcactgaagccgtagatgacattacaagcattgatgacttccttgctgtatctgaaagccatatcttggaagatgtcaacaagtgtatcatagccttaagagaccaggatgctgataatttagaccgtgctgcgggtgctatcagaggccgggcagcaagagttgctcacatcgtcacgggtgaaatggacagttacgagccaggggcttacacggaaggtgtaatgagaaatgttaacttccttacaagtactgtaattcctgaatttgtaacacaagtgaatgttgccttggaagccttaagcaaaagctcattgaatgtgttggatgataatcaatttgtggacatctcaaagaagatctatgatacaattcatgatatcagatgttcagtcatgatgattcggaccccagaggaactggaggatgtttctgaccttgaagaggaacacgaggtccgcagtcacaccagcattcagaccgaagggaaaactgatagggctaagatgactcaactgcctgaggcagaaaaagaaaagattgctgagcaagttgctgatttcaagaaagtaaagagtaagctggatgctgagattgagatatgggatgatacaagcaacgacatcattgttctggccaagaacatgtgtatgatcatgatggagatgacagacttcactaggggcaaaggaccactaaagcatacaactgatgtgatctatgcagcgaaaatgatatcagaatcaggatcaaggatggatgtccttgctcggcagattgctaatcagtgcccagatccatcttgtaaacaggacttgttggcctacctggaacagattaagttctactcccaccaactgaaaatctgcagtcaagttaaagctgagatccagaacctgggaggagagctcatcatgtcagctttggacagtgtcacatccctgatccaagcagccaaaaatttaatgaatgctgtagtgcaaacagtgaaaatgtcttacattgcctcaaccaagatcatccgaatccagagtcctgctgggccccggcacccagttgtgatgtggagaatgaaggctcctgcaaaaaaacccttgattaaaagagagaagccagaggaaacgtgtgcagctgtcagacgaggctcagcaaagaaaaaaatccatccattgcaagtcatgagtgaatttagaggaagacaaatctactgaaaccactattctacatatagtgcctatatgacaaaatcctgcctaaccacactgctttattttacacttaagaagttctgtaatttcactaagttttggtgtttaactcacaaataacataaaatattgggcgctaaatcaacaaaagcaatatatatttgggatcatatcactgtcatttctgtatggtcagcacctaatagttaaggaatatttgcttgttgaatgaatgaaattatcacgtgtcattcagcgtttcccatcatagagattatctactattcgttaccaaataaacacaggagaggccagagagtcctgtttatctgtaatacttcatgtacacttatcatccttatcttgaattaa

SEQ ID NO: 282807 - protein, 594 aa, Artificial Sequence
  derived and/or modified sequence
MESNHKSGDGLSGTQKEAALRALVQRTGYSLVQENGQRKYGGPPPGWDAAPPERGCEIFIGKLPRDLFEDELIPLCEKIGKIYEMRMMMDFNGNNRGYAFVTFSNKVEAKNAIKQLNNYEIRNGRLLGVCASVDNCRLFVGGIPKTKKREEILSEMKKVTEGVVDVIVYPSAADKTKNRGFAFVEYESHRAAAMARRKLLPGRIQLWGHGIAVDWAEPEVEVDEDTMSSVKILYVRNLMLSTSEEMIEKEFNNIKPGAVERVKKIRDYAFVHFSNREDAVEAMKALNGKVLDGSPIEVTLAKPVDKDSYVRYTRGTGGRGTMLQGEYTYSLGQVYDPTTTYLGAPVFYAPQTYAAIPSLHFPATKGHLSNRAIIRAPSVREIYMNVPVGAAGVRGLGGRGYLAYTGLGRGYQVKGDKREDKLYDILPGMELTPMNPVTLKPQGIKLAPQILEEICQKNNWGQPVYQLHSAIGQDQRQLFLYKITIPALASQNPAIHPFTPPKLSAFVDEAKTYAAEYTLQTLGIPTDGGDGTMATAAAAATAFPGYAVPNATAPVSAAQLKQAVTLGQDLAAYTTYEVYPTFAVTARGDGYGTF

SEQ ID NO: 282808 - protein, 539 aa, Artificial Sequence
  derived and/or modified sequence
MESNHKSGDGLSGTQKEAALRALVQRTGYSLVQENGQRKYGGPPPGWDAAPPERGCEIFIGKLPRDLFEDELIPLCEKIGKIYEMRMMMDFNGNNRGYAFVTFSNKVEAKNAIKQLNNYEIRNGRLLGVCASVDNCRLFVGGIPKTKKREEILSEMKKVTEGVVDVIVYPSAADKTKNRGFAFVEYESHRAAAMARRKLLPGAVERVKKIRDYAFVHFSNREDAVEAMKALNGKVLDGSPIEVTLAKPVDKDSYVRYTRGTGGRGTMLQGEYTYSLGQVYDPTTTYLGAPVFYAPQTYAAIPSLHFPATKGHLSNRAIIRAPSVREIYMNVPVGAAGVRGLGGRGYLAYTGLGRGYQVKGDKREDKLYDILPGMELTPMNPVTLKPQGIKLAPQILEEICQKNNWGQPVYQLHSAIGQDQRQLFLYKITIPALASQNPAIHPFTPPKLSAFVDEAKTYAAEYTLQTLGIPTDGGDGTMATAAAAATAFPGYAVPNATAPVSAAQLKQAVTLGQDLAAYTTYEVYPTFAVTARGDGYGTF

SEQ ID NO: 282809 - protein, 201 aa, Artificial Sequence
  derived and/or modified sequence
MESNHKSGDGLSGTQKEAALRALVQRTGYSLVQENGQRKYGGPPPGWDAAPPERGCEIFIGKLPRDLFEDELIPLCEKIGKIYEMRMMMDFNGNNRGYAFVTFSNKVEAKNAIKQLNNYEIRNGRLLGVCASVDNCRLFVGGIPKTKKREEILSEMKKVTEGVVDVIVYPSAADKTKNRGFAFVEYESHRAAAMARRKLLP

SEQ ID NO: 282810 - DNA, 1620 bp, Artificial Sequence
  derived and/or modified sequence
atggagagcaaccacaagagcggcgacggcctgagcggcacccagaaggaggccgccctgagagccctggtgcagagaaccggctacagcctggtgcaggagaacggccagagaaagtacggcggccccccccccggctgggacgccgccccccccgagagaggctgcgagatcttcatcggcaagctgcccagagacctgttcgaggacgagctgatccccctgtgcgagaagatcggcaagatctacgagatgagaatgatgatggacttcaacggcaacaacagaggctacgccttcgtgaccttcagcaacaaggtggaggccaagaacgccatcaagcagctgaacaactacgagatcagaaacggcagactgctgggcgtgtgcgccagcgtggacaactgcagactgttcgtgggcggcatccccaagaccaagaagagagaggagatcctgagcgagatgaagaaggtgaccgagggcgtggtggacgtgatcgtgtaccccagcgccgccgacaagaccaagaacagaggcttcgccttcgtggagtacgagagccacagagccgccgccatggccagaagaaagctgctgcccggcgccgtggagagagtgaagaagatcagagactacgccttcgtgcacttcagcaacagagaggacgccgtggaggccatgaaggccctgaacggcaaggtgctggacggcagccccatcgaggtgaccctggccaagcccgtggacaaggacagctacgtgagatacaccagaggcaccggcggcagaggcaccatgctgcagggcgagtacacctacagcctgggccaggtgtacgaccccaccaccacctacctgggcgcccccgtgttctacgccccccagacctacgccgccatccccagcctgcacttccccgccaccaagggccacctgagcaacagagccatcatcagagcccccagcgtgagagagatctacatgaacgtgcccgtgggcgccgccggcgtgagaggcctgggcggcagaggctacctggcctacaccggcctgggcagaggctaccaggtgaagggcgacaagagagaggacaagctgtacgacatcctgcccggcatggagctgacccccatgaaccccgtgaccctgaagccccagggcatcaagctggccccccagatcctggaggagatctgccagaagaacaactggggccagcccgtgtaccagctgcacagcgccatcggccaggaccagagacagctgttcctgtacaagatcaccatccccgccctggccagccagaaccccgccatccaccccttcaccccccccaagctgagcgccttcgtggacgaggccaagacctacgccgccgagtacaccctgcagaccctgggcatccccaccgacggcggcgacggcaccatggccaccgccgccgccgccgccaccgccttccccggctacgccgtgcccaacgccaccgcccccgtgagcgccgcccagctgaagcaggccgtgaccctgggccaggacctggccgcctacaccacctacgaggtgtaccccaccttcgccgtgaccgccagaggcgacggctacggcaccttctag

SEQ ID NO: 282811 - DNA, 1785 bp, Artificial Sequence
  derived and/or modified sequence
atggagtccaaccacaagagtggagacgggctcagcggcacccagaaggaggccgccttgagagcgcttgtccaaaggactggatattcactcgtgcaggagaacggccagcgcaagtacggaggtcccccgccagggtgggatgccgcccccccggagcggggctgtgaaatatttataggcaaactcccccgagatcttttcgaagacgaacttatcccactctgtgagaagatcggtaagatttatgaaatgaggatgatgatggatttcaacgggaacaatcgtgggtacgcatttgtgacattttccaacaaagtggaggccaaaaacgctattaaacaactgaataactatgaaatccgtaatggcaggctcttgggcgtatgcgccagtgtggataattgtagattgtttgtcggagggattccaaagaccaagaaaagagaggagattctctctgagatgaaaaaagtgactgagggcgtggtggacgtgatcgtctaccccagtgcggccgataagacgaagaatcgagggttcgctttcgtggaatatgaatctcatcgcgctgctgctatggctcgaaggaagctgctgccagggcgcatccaactgtgggggcacggaattgctgtcgattgggccgagccagaagtagaggttgacgaggacactatgagcagcgttaaaattctgtacgtcagaaatctcatgctcagcacgagtgaagaaatgattgagaaagagttcaataacatcaaacctggagctgtagagagggttaagaagatccgtgactacgccttcgttcatttctccaatcgggaggatgccgtggaagcaatgaaagctctgaatggcaaagtgcttgacggatctcccatcgaggtgacactggccaaacccgtggataaagactcatatgtgagatacacacgaggaactggcggtaggggaacaatgctacaaggcgaatacacttacagcttgggacaggtgtacgatcccaccaccacctatctaggagctccggtcttttatgctccccaaacctacgctgctattcctagtctgcacttccctgctactaaggggcacctcagcaacagagcaatcatcagggccccctccgttcgcgaaatctatatgaacgttcccgtgggggccgcgggggtgcgtgggctgggaggccgcggatacctggcatatacaggcctgggcagagggtatcaggtgaaaggagataaaagggaagacaaactctacgatatcctgcctggaatggaactgaccccgatgaaccccgtgacccttaagccccagggcattaaactggccccccagattttggaggaaatttgccagaaaaacaactgggggcaacctgtctaccagttgcattctgccatagggcaggatcaacgtcagctttttttatataaaattaccattccagccctagccagccagaatccggcaatacacccattcactcccccgaaattgagcgcctttgtagacgaggcaaaaacctacgccgccgaatataccctacaaacgctaggcatcccaactgacggtggggacgggacaatggccaccgccgcagctgccgccacagcattcccgggatacgccgttcccaacgctaccgcccctgtgtctgcggcccagctcaaacaggctgtgactctgggccaagaccttgcagcctacaccacttatgaagtgtatcccacctttgccgtaaccgccaggggcgatggctatggaactttctag

SEQ ID NO: 282812 - DNA, 1785 bp, Artificial Sequence
  derived and/or modified sequence
atggagagcaatcacaagtccggcgacggactgtccggcacacaaaaggaggccgcactaagggctctcgtgcagcgtaccggatactccctggtgcaggagaacggacagcgaaaatacggtggccccccccccggctgggatgcggcccctcctgagcgcggctgtgaaatattcattggaaagctccctcgcgacctcttcgaggacgagctgatccccctctgcgaaaaaatcgggaaaatctatgaaatgaggatgatgatggattttaacggaaacaatcgaggatacgcattcgtgacattttctaataaggtggaggcaaagaatgccattaaacagctcaacaactatgagatccgaaatggacgcctcctcggagtgtgtgcgtccgtagacaactgcagactttttgtgggcggcatcccaaagacgaagaagagggaggagattctgtccgaaatgaagaaagtcaccgaaggcgtagtggatgtgattgtctatcctagcgcggcagacaaaaccaaaaatcgcggattcgctttcgtcgaatacgagagccaccgggccgccgcgatggctcggaggaagctcctgcccggacggatccagctgtggggccatggaatcgctgtcgattgggccgaaccagaggtagaggtggatgaggacacaatgagctcagtcaagatcctgtacgtgcggaaccttatgttgagtactagtgaggaaatgatcgagaaggaattcaataatatcaagcctggggccgtggaaagagtgaaaaagatccgagactacgctttcgtgcacttctctaatcgggaagatgcggtggaggcaatgaaggcactgaatggtaaagtgttggacggcagtccaatcgaggtcacactagctaagccagttgacaaggatagttatgtacggtacacacgaggtacaggcggccgcggtactatgttacaaggcgaatacacctactctctagggcaggtgtacgaccccactaccacgtacctaggcgcgccagtcttttatgccccccagacctacgccgctatcccatccctgcacttccccgcgactaagggtcacctgtccaatcgtgccatcattagagcaccaagcgtgcgggagatctacatgaacgtgcccgtcggcgccgccggcgtccgcggacttgggggtagaggctacctggcgtatacagggctggggagggggtatcaagtgaaaggcgataaacgtgaagacaaactttacgacattctgcctggcatggagttgaccccaatgaaccccgtgactctgaaacctcagggaattaagctggccccacagattctggaggagatttgtcaaaagaataactggggccagccggtctaccagctgcactctgcaataggccaagatcagaggcagttatttttatacaagattaccataccagcgctggcttctcagaatcctgctatccatccatttaccccaccaaagttgtcagcttttgttgatgaggctaaaacttacgctgcagagtatacactgcagaccctcggaatccccactgacggaggcgatgggactatggccaccgcagccgctgccgccactgccttcccgggatacgccgtccccaacgcaactgctcccgtttccgccgcccagctaaagcaggccgtgaccctgggacaagatttggccgcatacacaacttatgaagtgtaccccacctttgcagtgactgcccggggggatggctatggtactttctag

SEQ ID NO: 282813 - DNA, 1620 bp, Artificial Sequence
  derived and/or modified sequence
atggaaagcaatcacaagagtggggatggtctgtctggaacacaaaaggaagcagcactcagagcactcgtgcagcgcacagggtacagcttggtacaggaaaatggccagcggaagtacggggggccccctcccggatgggacgcggccccccccgaaagaggctgcgaaatcttcatcggcaagctccctagagacttgttcgaagatgaactgatccccctgtgcgagaagattggcaaaatctacgagatgcgaatgatgatggacttcaacggcaacaatcgtgggtacgcattcgttaccttctctaacaaggtggaggccaaaaacgctattaagcagcttaacaactatgaaatcaggaacgggcggctgcttggagtgtgtgcaagtgttgataattgtcgactcttcgttggtggcatcccaaaaacgaaaaaacgtgaggagatcctaagtgaaatgaaaaaggtaactgagggcgtggtcgatgtgatcgtctatccaagcgcggcagacaaaactaagaacagaggcttcgccttcgtggagtacgaatcacaccgggctgctgctatggccaggcggaagttgctgcctggcgcggtagagagggtgaagaaaatcagggattatgcctttgtgcatttcagcaacagggaggatgccgtggaagctatgaaggctttgaatgggaaggttctggacggcagccctattgaagtgaccctggccaagcccgtcgacaaagattcctatgtgcgatacacccgcggaaccggcggcaggggcaccatgcttcagggagaatatacctacagtcttgggcaggtttacgatcctaccactacataccttggggcccccgtgttttacgcgccacagacttatgctgcaatcccatcactgcattttccagccacgaagggccatctctccaaccgcgccataatccgagctcctagcgttcgggaaatctacatgaatgtgccagtgggcgcagcaggggttcgcggactcgggggccgtggatatctggcatacactggcttgggtaggggctatcaggtgaagggcgataaacgggaggataagctctatgacattctgccaggtatggaattaacccccatgaacccagtgacattaaagcctcaggggatcaaactggctccacagattctggaggagatttgccagaaaaacaattggggccaaccagtgtatcagttgcacagcgctatcggacaagaccagcggcagctcttcctgtataaaattacaatccctgcgctagcgtcccaaaaccctgcgattcatcctttcaccccacccaagctcagcgcatttgtagatgaggccaagacttacgccgccgagtatacactgcagaccctaggcattcctaccgatggcggagatggaaccatggctacagctgctgctgctgctactgcattcccgggctatgctgtcccaaacgcaaccgccccagtctcagcagcccagctcaagcaggccgtgactttgggccaggacttggccgcatatacaacgtacgaggtatatcctaccttcgccgttacagctcgcggcgatggctatgggactttttag

SEQ ID NO: 282814 - DNA, 1785 bp, Artificial Sequence
  derived and/or modified sequence
atggagagcaaccacaagtctggagatggcctgagcggcacccagaaggaggccgccctgcgggccctggtgcagaggacaggctacagcctggtgcaggagaatggccagaggaaatatggaggccccccacctggctgggatgctgcccctcctgagcggggctgtgagatcttcatcggcaagctgccccgggacctgtttgaagatgagctgatccccctgtgtgagaagattggcaagatctatgagatgaggatgatgatggacttcaacggcaacaacagaggctacgcctttgtgaccttcagcaacaaggtggaggccaagaatgccatcaagcagctgaacaactatgagatcagaaatggccgcctgctgggcgtgtgtgcctctgtggacaactgccgcctgtttgtgggcggcatccccaagaccaagaagcgggaggagatcctgtctgagatgaagaaggtgacagagggcgtggtggatgtgattgtgtaccccagcgctgctgacaagaccaagaacagaggatttgcctttgtggagtatgagagccacagagctgctgccatggcccggaggaagctgctgcccggccgcatccagctgtggggccatggaattgctgtggactgggccgagcctgaggtggaggtggatgaggacaccatgagctctgtgaagatcctgtatgtgaggaacctgatgctgagcaccagcgaggagatgattgagaaggagttcaacaacatcaagccaggagctgtggagcgggtgaagaagatccgggactatgcctttgtgcacttcagcaacagagaagatgctgtggaggccatgaaggccctgaatggcaaggtgctggatggcagccccatcgaggtgaccctggccaagcctgtggacaaggacagctatgtgcgctacacccggggcaccggcggccggggcaccatgctgcagggcgagtacacctacagcctgggccaggtgtatgaccccaccaccacctacctgggcgcccctgtgttctacgccccccagacctacgccgccatccccagcctgcacttccctgccaccaagggccacctgagcaacagagccatcatccgggcccccagcgtgcgggagatctacatgaatgtgcctgtgggcgctgctggggtgcggggcctgggcggccggggctacctggcctacacaggcctgggccggggctaccaggtgaagggggacaagcgggaggacaagctgtatgacatcctgcccggcatggagctgacccccatgaaccctgtgaccctgaagccccagggcatcaagctggccccccagatcctggaggagatctgccagaagaacaactggggccagcctgtgtaccagctgcacagcgccatcggccaggaccagaggcagctgttcctgtacaagatcaccatcccagccctggccagccagaacccagccatccaccccttcaccccacccaagctgagcgcctttgtggatgaggccaagacctacgccgctgagtacaccctgcagaccctgggcatccccacagatggaggagatggcaccatggccacagctgctgctgctgccacagccttccctggctatgctgtgcccaatgccacagcccctgtgtctgctgcccagctgaagcaggccgtgaccctgggccaggacctggccgcctacaccacctatgaggtgtaccccacctttgctgtgacagcccggggagatggctacggcaccttctag

SEQ ID NO: 282815 - DNA, 1997 bp, Artificial Sequence
  derived and/or modified sequence
tgagcaaccctaattaacctgattttttgctgataatcactctcaatggaatcaaatcacaaatccggggatggattgagcggcactcagaaggaagcagccctccgcgcactggtccagcgcacaggatatagcttggtccaggaaaatggacaaagaaaatatggtggccctccacctggttgggatgctgcaccccctgaaaggggctgtgaaatttttattggaaaacttccccgagacctttttgaggatgagcttataccattatgtgaaaaaatcggtaaaatttatgaaatgagaatgatgatggattttaatggcaacaatagaggatatgcatttgtaacattttcaaataaagtggaagccaagaatgcaatcaagcaacttaataattatgaaattagaaatgggcgcctcttaggggtttgtgccagtgtggacaactgccgattatttgttgggggcatcccaaaaaccaaaaagagagaagaaatcttatcggagatgaaaaaggttactgaaggtgttgtcgatgtcatcgtctacccaagcgctgcagataaaaccaaaaaccgaggctttgccttcgtggagtatgagagtcatcgagcagctgccatggcgaggaggaaactgctaccaggaagaattcagttatggggacatggtattgcagtagactgggcagagccagaagtagaagttgatgaagatacaatgtcttcagtgaaaatcctatatgtaagaaatcttatgctgtctacctctgaagagatgattgaaaaggaattcaacaatatcaaaccaggtgctgtggagagggtgaagaaaattcgagactatgcttttgtgcacttcagtaaccgagaagatgcagttgaggctatgaaagctttaaatggcaaggtgctggatggttcccccattgaagtcaccctagcaaaaccagtggacaaggacagttatgttaggtatacccgaggcacaggtggaaggggcaccatgctgcaaggagagtatacctactctttgggccaagtttatgatcccaccacaacctaccttggagctcctgtcttctatgccccccagacctatgcagcaattcccagtcttcatttcccagccaccaaaggacatctcagcaacagagccattatccgagccccttctgttagagaaatttacatgaatgtacctgtaggggctgcgggagtgagaggactgggcggccgtggctatttggcatacacaggcctgggtcgaggataccaggtcaaaggagacaaaagagaagacaaactctatgacattttacctgggatggagctcaccccaatgaatcctgtcacattaaaaccccaaggaattaaactcgctccccagatattagaagagatttgtcagaaaaataactggggacagccagtgtaccagctgcactctgctattggacaagaccaaagacagctattcttgtacaaaataactattcctgctctagccagccagaatcctgcaatccaccctttcacacctccaaagctgagtgcctttgtggatgaagcaaagacgtatgcagccgaatacaccctgcagaccctgggcatccccactgatggaggcgatggcaccatggctactgctgctgctgctgctactgctttcccaggatatgctgtccctaatgcaactgcacccgtgtctgcagcccagctcaagcaagcggtaacccttggacaagacttagcagcatatacaacctatgaggtctacccaacttttgcagtgactgcccgaggggatggatatggcaccttctgaagatgcttttttaaatttaagaataagacacacaaaactctattaaaaaaaaaaaagaaataaacctctaactcggtccccaatgatcataaataatatgtttcctaaagaaatgcctttccagagactgtatagcttataccaattatagaatcatgaagtaagaa

SEQ ID NO: 282816 - DNA, 1620 bp, Artificial Sequence
  derived and/or modified sequence
atggagagcaaccacaagtctggagatggcctgagcggcacccagaaggaggccgccctgcgggccctggtgcagaggacaggctacagcctggtgcaggagaatggccagaggaaatatggaggccccccacctggctgggatgctgcccctcctgagcggggctgtgagatcttcatcggcaagctgccccgggacctgtttgaagatgagctgatccccctgtgtgagaagattggcaagatctatgagatgaggatgatgatggacttcaacggcaacaacagaggctacgcctttgtgaccttcagcaacaaggtggaggccaagaatgccatcaagcagctgaacaactatgagatcagaaatggccgcctgctgggcgtgtgtgcctctgtggacaactgccgcctgtttgtgggcggcatccccaagaccaagaagcgggaggagatcctgtctgagatgaagaaggtgacagagggcgtggtggatgtgattgtgtaccccagcgctgctgacaagaccaagaacagaggatttgcctttgtggagtatgagagccacagagctgctgccatggcccggaggaagctgctgcctggagctgtggagcgggtgaagaagatccgggactatgcctttgtgcacttcagcaaccgggaggatgctgtggaggccatgaaggccctgaatggcaaggtgctggatggcagccccatcgaggtgaccctggccaagcctgtggacaaggacagctatgtgcgctacacccggggcactggaggccggggcaccatgctgcagggcgagtacacctacagcctgggccaggtgtatgaccccaccaccacctacctgggcgcccctgtgttctacgccccccagacctatgctgccatccccagcctgcacttccctgccaccaagggccacctgagcaacagagccatcatccgggcccccagcgtgcgggagatctacatgaatgtgcctgtgggcgccgccggcgtgcggggcctgggcggccggggctacctggcctacacaggcctgggccggggctaccaggtgaagggggacaagcgggaggacaagctgtatgacatcctgcccggcatggagctgacccccatgaaccctgtgaccctgaagccccagggcatcaagctggccccccagatcctggaggagatctgccagaagaacaactggggccagcctgtgtaccagctgcacagcgccatcggccaggaccagaggcagctgttcctgtacaagatcaccatcccagccctggccagccagaacccagccatccaccccttcaccccacccaagctgagcgcctttgtggatgaggccaagacctatgctgctgagtacaccctgcagaccctgggcatccccacagatggaggagatggcaccatggccacagctgctgctgctgccacagccttccctggctatgctgtgcccaatgccacagcccctgtgtctgctgcccagctgaagcaggccgtgaccctgggccaggacctggccgcctacaccacctatgaggtgtaccccacctttgctgtgacagcccggggagatggctacggcaccttctag

SEQ ID NO: 282817 - DNA, 1785 bp, Artificial Sequence
  derived and/or modified sequence
atggagagcaaccacaagagcggcgacggcctgagcggcacccagaaggaagccgctctgcgcgctttggtgcagcgaactggttatagcctagtgcaggaaaacggtcagcggaagtacggcggaccaccgcccggatgggacgccgcccccccagagcgcggctgtgagatcttcattggcaaactgccccgcgacctttttgaggatgagttgattcccctctgtgagaaaatcggcaaaatctacgagatgcgaatgatgatggatttcaacgggaataataggggctatgcgtttgttacatttagcaacaaggtagaggccaaaaatgctattaagcagctgaataattacgagataagaaacgggaggttattgggcgtttgtgccagtgtggacaattgcagactgttcgtcggagggatacctaagacgaagaagcgcgaggagattctgtccgagatgaagaaagttacggagggcgtggtggacgtaatcgtttatccttctgcggctgacaaaactaagaaccgtggctttgcatttgtcgagtacgaatcccacagagcagccgctatggcccgaagaaagttactgccaggccgaatccagctgtgggggcatggcatcgccgtggactgggctgagcccgaagtggaagtcgatgaggacaccatgtctagcgtgaaaattctgtacgtcaggaatcttatgctgtctacatctgaggaaatgatcgaaaaagaatttaataatataaagcctggagcagtggaaagggtgaagaaaatcagagactacgccttcgtacacttctctaatcgggaagacgcggtcgaggccatgaaagccctcaacggaaaggtgctagacggctctcctatagaagtcaccctcgctaagcccgtggataaggacagctatgtccggtatacacggggcaccggtggacgcgggacgatgctgcagggcgagtatacgtatagccttggccaagtctacgatcctaccactacatatctgggcgcaccggtcttctacgcaccccagacctatgccgccatacctagcctgcactttcctgcgaccaaaggccatctctccaaccgcgctatcatccgcgcacccagcgtgcgcgagatctacatgaatgtaccagtgggtgcggcaggtgtgaggggtttaggcggccgggggtacctggcatacacaggtttgggaagggggtaccaggtgaagggggacaaacgcgaggataagttgtatgacatattacccggaatggagttaactcccatgaatccagtgacccttaaaccacagggtattaagctggcccctcagatcctcgaagagatctgtcagaagaacaattggggccaaccagtttaccagttacattctgctatcggacaagaccagcgacagttgtttctctacaagattacaattccggccctcgcctcccaaaaccccgcaatacacccatttacacctcccaagttgtctgcttttgttgatgaagctaaaacctacgccgcggagtatacgctccaaacactgggcatccccacagatgggggggatggcaccatggccacagctgccgctgctgcaaccgccttccctgggtatgcggtccctaacgcgacggctcctgtgagcgctgcacagctcaaacaggcagttacgctgggtcaggatctggctgcctacacaacgtacgaggtataccccactttcgccgttaccgctcgaggcgacgggtacggtaccttctag

SEQ ID NO: 282818 - DNA, 1970 bp, Artificial Sequence
  derived and/or modified sequence
tttgatatgacgattagagcataacccgagtgacacgttgaattcgccataatcaaggaaaccttttccgggtggggatctctgaaattactcagataacagtgctgtgccaaaaacctgtggattttctctacaaaaattattgagcaaccctaattaacctgattttttgctgataatcactctcaatggaatcaaatcacaaatccggggatggattgagcggcactcagaaggaagcagccctccgcgcactggtccagcgcacaggatatagcttggtccaggaaaatggacaaagaaaatatggtggccctccacctggttgggatgctgcaccccctgaaaggggctgtgaaatttttattggaaaacttccccgagacctttttgaggatgagcttataccattatgtgaaaaaatcggtaaaatttatgaaatgagaatgatgatggattttaatggcaacaatagaggatatgcatttgtaacattttcaaataaagtggaagccaagaatgcaatcaagcaacttaataattatgaaattagaaatgggcgcctcttaggggtttgtgccagtgtggacaactgccgattatttgttgggggcatcccaaaaaccaaaaagagagaagaaatcttatcggagatgaaaaaggttactgaaggtgttgtcgatgtcatcgtctacccaagcgctgcagataaaaccaaaaaccgaggctttgccttcgtggagtatgagagtcatcgagcagctgccatggcgaggaggaaactgctaccaggtgctgtggagagggtgaagaaaattcgagactatgcttttgtgcacttcagtaaccgagaagatgcagttgaggctatgaaagctttaaatggcaaggtgctggatggttcccccattgaagtcaccctagcaaaaccagtggacaaggacagttatgttaggtatacccgaggcacaggtggaaggggcaccatgctgcaaggagagtatacctactctttgggccaagtttatgatcccaccacaacctaccttggagctcctgtcttctatgccccccagacctatgcagcaattcccagtcttcatttcccagccaccaaaggacatctcagcaacagagccattatccgagccccttctgttagagaaatttacatgaatgtacctgtaggggctgcgggagtgagaggactgggcggccgtggctatttggcatacacaggcctgggtcgaggataccaggtcaaaggagacaaaagagaagacaaactctatgacattttacctgggatggagctcaccccaatgaatcctgtcacattaaaaccccaaggaattaaactcgctccccagatattagaagagatttgtcagaaaaataactggggacagccagtgtaccagctgcactctgctattggacaagaccaaagacagctattcttgtacaaaataactattcctgctctagccagccagaatcctgcaatccaccctttcacacctccaaagctgagtgcctttgtggatgaagcaaagacgtatgcagccgaatacaccctgcagaccctgggcatccccactgatggaggcgatggcaccatggctactgctgctgctgctgctactgctttcccaggatatgctgtccctaatgcaactgcacccgtgtctgcagcccagctcaagcaagcggtaacccttggacaagacttagcagcatatacaacctatgaggtctacccaacttttgcagtgactgcccgaggggatggatatggcaccttctgaagatgcttttttaaatttaagaataagacacacaaaactctattaaaaaaaaaaaagaaataaacctctaactcggtccccaatgatcataaataatatgtttcctaaagaaatgcctttccagagactgtatagcttataccaattatagaatcatgaagt

SEQ ID NO: 282819 - DNA, 1785 bp, Artificial Sequence
  derived and/or modified sequence
atggagagcaaccacaagagcggcgacggcctgagcggcacccagaaagaggctgctctcagagctctcgtacaaaggaccggctactccctcgttcaagagaacggtcagcggaaatacggaggaccccctccaggctgggacgcagctccccccgaacggggctgcgagattttcatcggaaagctcccaagagacctcttcgaggatgagctgatccccttgtgtgaaaagattggaaagatctatgagatgaggatgatgatggacttcaacgggaacaaccgcggatacgcttttgtaacatttagtaataaggtagaagctaaaaatgccataaaacagctcaacaactacgagattcggaatgggagactcctcggagtatgcgccagcgtcgacaattgtaggctgttcgttggaggtattcctaaaaccaagaagcgggaagagatcctgtcggaaatgaaaaaggtgaccgaaggcgtcgtggatgtcatcgtctacccttctgccgccgacaaaacgaaaaatagggggttcgccttcgtggagtatgagtctcatcgtgctgcagcgatggcgcggaggaagctacttccaggtcgaatccagttgtgggggcatggcattgctgtggactgggcagaacccgaggtggaggtggacgaggatactatgagcagcgtcaagattctttacgtccgtaatttaatgttgagtacttcagaggaaatgattgagaaggaatttaataacatcaaacccggggccgtggagcgagttaaaaaaatacgggactatgcattcgtgcatttttcaaacagggaggacgctgtcgaagcaatgaaagctctgaacggcaaagtgctggatgggtctcccatcgaggtcacattggcaaagccggtggacaaggatagttacgtgaggtatacaaggggcaccggcggcaggggtaccatgctgcagggggagtacacctacagtctcggtcaggtttatgatcccaccaccacttatttgggtgccccagtgttttatgccccccagacgtacgctgccatcccatcgctgcacttcccagctaccaaaggacacttatcaaaccgcgctatcatccgcgctccgtctgtccgcgaaatttatatgaatgtaccggtcggagcggccggcgtgcggggcttgggcggccgaggctacctagcctatacgggactggggagaggttaccaggtcaagggggacaaacgggaggacaaactttatgatatactgcccgggatggagttaacccctatgaaccctgtgacgttgaaaccacaggggatcaagctcgctccacagattctcgaagagatctgccagaagaacaactgggggcagcctgtgtatcagctccattcagccattggccaagaccaaaggcagctttttttatacaagatcactatcccggccctggccagccagaaccctgcaattcatccattcactccgcccaaactgagcgccttcgtggatgaagctaaaacttacgccgccgaatacacacttcagaccctcggcatccccaccgatggcggcgacgggaccatggcaaccgcggccgctgctgcaacggcatttcccgggtacgcagtaccaaatgcaaccgctcccgttagcgctgcccagctaaagcaggcagtgaccctggggcaagacctggcagcttatacgacttacgaggtgtacccaaccttcgccgtgactgcccggggggacggctatgggactttctag

SEQ ID NO: 282820 - DNA, 1620 bp, Artificial Sequence
  derived and/or modified sequence
atggagagcaaccacaagagcggcgacggcctgagcggcacccagaaagaggcggccctccgggccctggttcagcgaactggctactccctggtacaggaaaatgggcagaggaaatatggaggcccaccgcccggctgggacgctgcccccccagagcgcggctgcgagattttcatcggcaaacttcctagagacctattcgaagatgaactcatcccgctttgtgaaaaaataggaaagatatatgagatgcgaatgatgatggactttaatggcaacaatagaggatatgcattcgtcacattttctaataaggtcgaagccaagaatgctattaagcagcttaataattacgaaattagaaatggccgactcctcggggtctgtgcctctgtggacaactgccgcctgtttgtagggggcatccctaagacgaagaagcgtgaggaaattctgtccgagatgaagaaggtaaccgaaggggtggtggatgtgatcgtgtaccctagcgcagctgataagacaaaaaacagaggtttcgcctttgtagaatatgaatcccaccgggcagcagccatggcacggagaaagctgttgcccggggcggtggagagagtgaagaagatccgtgactatgccttcgtccacttctctaatagagaggatgcagttgaagcaatgaaagcactaaacggcaaagtgctcgacggctcccccatcgaggtcacccttgcgaagccagtggacaaggattcttacgtccggtacacgcgaggtaccgggggaaggggaacaatgctccagggcgagtatacttactccttgggccaggtctacgatccgaccacaacttacctcggagctccagtattctatgcaccgcagacctacgcagcgataccctccctccatttcccggccactaaaggtcacttatccaacagggctatcattcgcgcccctagcgtacgtgaaatttatatgaacgttcccgttggcgctgccggtgttcgggggttgggcggccgcggatatttagcctacaccggcttgggcagggggtatcaagttaagggagacaagagagaggataagttatatgatatcttgcccggcatggagctgacccccatgaacccagtgacactaaaaccccagggcatcaagctggctccccagatcctggaggagatctgccagaagaacaactggggccagcctgtctatcagctgcactccgccataggacaggatcagagacaattgtttctgtataagataaccattccagccctggcatcccagaaccctgcgattcatcctttcacccctcctaaactgtccgcgttcgtcgatgaggctaaaacctatgcagccgagtacacactccagactctaggcatcccaacagacggtggagacggcactatggccactgcagctgccgctgctacggccttccccggctatgcggttccaaacgccaccgcccctgtctcagcagcacagctaaaacaggcagtaacactcggccaggacctggccgcctacacaacgtacgaggtgtacccaacctttgcagtgactgcccgaggagacgggtacggtacattttag

SEQ ID NO: 282821 - DNA, 1785 bp, Artificial Sequence
  derived and/or modified sequence
atggagtcaaatcacaaaagtggtgacgggctgtcgggaacacaaaaggaagctgccttacgggctcttgtgcagcgcactggctattccctggtgcaggaaaatggtcaacgcaagtacggcggacctcccccaggatgggacgcagctccccctgagcggggatgtgaaattttcatcggcaagttaccccgagacctgtttgaagatgagttgatccccctgtgcgaaaaaatcggcaagatctacgaaatgagaatgatgatggacttcaatgggaacaatcgaggatatgctttcgtcacatttagcaacaaggtggaggccaagaacgctatcaagcagttgaataactatgagatccgtaatggtcgtctcctgggtgtgtgtgcctctgtggataattgtcgcttgttcgtgggtggcatcccaaagactaaaaaacgggaggaaattctgtctgagatgaaaaaagtaaccgaaggcgtcgtggacgtgattgtgtacccttccgctgctgacaaaaccaagaaccgaggcttcgcttttgtggagtatgaatctcaccgggctgccgctatggcgaggcgcaaattgctccctggtcggatacagttgtggggacatggtattgccgtcgattgggctgagcccgaagtggaggttgacgaggacacaatgagctctgtgaaaattctgtatgttagaaaccttatgctgagtacaagtgaggagatgatcgaaaaggaatttaataacatcaaacccggtgccgtcgagagagtgaaaaagatcagagactacgcgtttgtccatttttcgaacagagaggatgctgtcgaggcgatgaaagcactgaatgggaaggttttagatgggtctcccattgaagtgaccctggctaaacctgtggataaagattcctatgtgcggtacacccgcggaaccggtggcagggggacaatgctgcagggagaatacacatactcgctgggacaagtctacgatccgacgacaacctacttgggagcgccagtcttctacgccccacagacctatgcggcaattccgtccttacactttccagccacaaaaggacacctcagtaacagagccattatccgcgctccctccgtaagggaaatctatatgaacgtgcctgttggcgctgcaggtgtcagagggttgggcggacggggatatttggcttacacaggcctgggacgtggttatcaagtcaagggtgacaagcgtgaagataaactatatgacattttgcccggaatggagctgacgcccatgaatcctgtgacgctgaaacctcaaggtattaaactggcaccacagatcctagaggagatttgtcagaaaaataattggggacagcccgtctaccaattgcacagtgcaattggtcaggatcaacgacagctgttcctctataaaatcaccatacctgcccttgcgtcccagaatcccgctatacacccattcacgccgcctaaactgtcagcctttgtggacgaggctaaaacatatgccgctgaatatactctacaaacactgggtatccctactgatggaggagacgggaccatggctaccgctgccgctgctgctaccgcattcccgggatatgctgtgccaaatgcaaccgccccagtgtcggccgctcagcttaaacaggctgtgacactcgggcaagatctggcagcatacaccacttatgaagtatacccaacctttgccgtgacagctcgtggagacggatacggaacattttag

SEQ ID NO: 282822 - DNA, 1785 bp, Artificial Sequence
  derived and/or modified sequence
atggaaagcaatcacaaaagcggggacggtctttcaggaactcagaaagaggcagccctgagagctcttgtgcaaagaactgggtattctctggtacaagagaacgggcagagaaagtatgggggaccccctcctgggtgggatgccgcaccccctgagcgcggttgtgagattttcatcggaaagctgcctagagatctctttgaagatgagctaattccactctgcgagaaaatcggaaagatttacgagatgcggatgatgatggacttcaacggcaacaatcgtggttacgcgtttgtaacattctccaataaagtggaggcaaaaaatgccattaagcaactgaataactatgaaatacgcaacggccgactcctcggagtttgtgccagtgtagacaattgcagactgtttgtgggtgggattcctaaaaccaaaaaaagagaggagattttgtccgagatgaagaaggttacagagggagtcgtggacgtgatcgtgtacccgagtgcagcagataagaccaagaatcgtggctttgctttcgtggagtatgaatcacatcgagcagctgcgatggccagacgcaaactgttgccgggtcgtatccagctgtggggacacggcatcgcagtggattgggctgaacctgaagttgaggtcgacgaagacacaatgtcctccgtgaaaatcctgtacgtccggaacctcatgctgagtacttcagaagagatgatagagaaagagtttaacaacatcaaacctggcgctgtggaaagggtgaagaaaatacgggactatgcctttgtgcactttagcaacagggaggatgccgtggaagcaatgaaggctctgaacggaaaagtgctggacggcagtcctattgaggtaactttagctaagcccgtcgacaaagatagctatgtgcgttacacacgtggcaccggaggccgtgggactatgctgcaaggagaatatacgtacagccttggccaggtatatgatcctaccacaacttatcttggcgctcccgtgttctacgcccctcagacatatgccgctataccaagtctccacttccctgcaacaaaagggcatttatccaatagagcaatcatacgtgctccatccgttagggagatctacatgaacgtccctgttggagcggcaggtgtacgcggactgggcggtagaggatatctcgcttatacaggcctgggtcgaggttatcaagtgaaaggggacaaacgcgaggataaactctatgatattctgcccggtatggaactgacccccatgaatccggtcacattgaaaccccaaggaattaaactcgcgcctcagattctcgaggaaatctgtcagaagaacaactggggtcaacctgtgtaccagctccacagcgctatagggcaggatcagaggcagttgtttctgtataagattacaattcccgctctggcctcacagaaccccgctatccacccatttacaccacccaaactctccgccttcgtcgacgaagccaaaacctacgccgctgagtacaccttgcagaccctgggtattccaacggacggcggagacggaactatggccacggcagcggctgccgctactgcatttcccggatatgctgttcccaatgcaacggcgcctgtttccgctgcccaactcaaacaggctgttaccctagggcaggacctggcagcttatacgacatacgaggtgtatccgacctttgcagtgaccgcaaggggcgatggctacggaaccttctag

SEQ ID NO: 282823 - DNA, 1620 bp, Artificial Sequence
  derived and/or modified sequence
atggagagcaaccataagtccggcgacggtctttccggtacccagaaagaggccgcactgcgagcactagtgcagcgcacaggatacagcttggtgcaggaaaacggtcagagaaagtacggcggaccaccgccaggatgggacgcagcccctcccgagagggggtgtgaaatcttcattggaaaactgccacgtgatctgttcgaagatgaactgattcctttgtgtgagaagattggcaagatctatgagatgcggatgatgatggacttcaatggcaataatcgtggatacgcctttgtgacctttagcaacaaggtggaagccaagaatgccatcaaacagttgaataattatgagattagaaatggtagacttctaggcgtctgtgccagtgtggacaactgtaggttattcgtagggggaatacctaagacaaaaaagagagaagaaatcctgtccgagatgaagaaggtcaccgagggtgttgtggacgtgatcgtttatccaagtgctgctgacaagacaaaaaaccgcggtttcgctttcgtggaatatgagtctcacagggcagctgccatggcacggagaaagttactgcctggggctgtcgaaagggttaagaagatccgcgattacgcctttgtgcacttttcaaatagagaagacgccgtggaggccatgaaggcactgaacgggaaggtgctcgatggctcgcccatcgaggtcaccctagcaaagcctgtggataaggattcttacgtgaggtacactcggggtactgggggaagagggaccatgctccagggagagtacacgtacagtcttgggcaggtatacgaccctactacaacttacctgggcgctcctgtgttttatgcccctcaaacctatgcggctatcccttcactgcacttccctgcgaccaagggacacctgagcaacagagcaattatccgggcacccagcgtgagagagatctacatgaacgtcccagttggcgctgccggagtgcgcggactaggcggtcggggatatctggcttacactggcctcgggcgaggttaccaggtcaaaggagacaagcgcgaagacaagttatatgatatcttgccgggaatggaactaactcctatgaatccagtgacattaaaaccccagggaattaagctggccccacaaatcctggaagaaatatgtcagaagaacaattggggccagccagtatatcagctgcacagcgcgatcggccaggaccagcggcagctgttcctgtacaaaatcaccatccctgccctggcctcccagaatcctgccatacacccctttacgcctccaaagcttagcgcctttgtagacgaggccaagacatacgcggcagaatacacattgcagacactcggaattcctactgacggaggggatggcaccatggcaacggcagccgctgctgctaccgccttcccaggctacgcagtccccaacgcgaccgcccctgtgtcagctgcccagttgaagcaggccgtgactctcggacaggacctggccgcttataccacctacgaggtctatcctacctttgccgtgaccgccagaggagacggctacgggacattctag

SEQ ID NO: 282824 - DNA, 2135 bp, Artificial Sequence
  derived and/or modified sequence
tttgatatgacgattagagcataacccgagtgacacgttgaattcgccataatcaaggaaaccttttccgggtggggatctctgaaattactcagataacagtgctgtgccaaaaacctgtggattttctctacaaaaattattgagcaaccctaattaacctgattttttgctgataatcactctcaatggaatcaaatcacaaatccggggatggattgagcggcactcagaaggaagcagccctccgcgcactggtccagcgcacaggatatagcttggtccaggaaaatggacaaagaaaatatggtggccctccacctggttgggatgctgcaccccctgaaaggggctgtgaaatttttattggaaaacttccccgagacctttttgaggatgagcttataccattatgtgaaaaaatcggtaaaatttatgaaatgagaatgatgatggattttaatggcaacaatagaggatatgcatttgtaacattttcaaataaagtggaagccaagaatgcaatcaagcaacttaataattatgaaattagaaatgggcgcctcttaggggtttgtgccagtgtggacaactgccgattatttgttgggggcatcccaaaaaccaaaaagagagaagaaatcttatcggagatgaaaaaggttactgaaggtgttgtcgatgtcatcgtctacccaagcgctgcagataaaaccaaaaaccgaggctttgccttcgtggagtatgagagtcatcgagcagctgccatggcgaggaggaaactgctaccaggaagaattcagttatggggacatggtattgcagtagactgggcagagccagaagtagaagttgatgaagatacaatgtcttcagtgaaaatcctatatgtaagaaatcttatgctgtctacctctgaagagatgattgaaaaggaattcaacaatatcaaaccaggtgctgtggagagggtgaagaaaattcgagactatgcttttgtgcacttcagtaaccgagaagatgcagttgaggctatgaaagctttaaatggcaaggtgctggatggttcccccattgaagtcaccctagcaaaaccagtggacaaggacagttatgttaggtatacccgaggcacaggtggaaggggcaccatgctgcaaggagagtatacctactctttgggccaagtttatgatcccaccacaacctaccttggagctcctgtcttctatgccccccagacctatgcagcaattcccagtcttcatttcccagccaccaaaggacatctcagcaacagagccattatccgagccccttctgttagagaaatttacatgaatgtacctgtaggggctgcgggagtgagaggactgggcggccgtggctatttggcatacacaggcctgggtcgaggataccaggtcaaaggagacaaaagagaagacaaactctatgacattttacctgggatggagctcaccccaatgaatcctgtcacattaaaaccccaaggaattaaactcgctccccagatattagaagagatttgtcagaaaaataactggggacagccagtgtaccagctgcactctgctattggacaagaccaaagacagctattcttgtacaaaataactattcctgctctagccagccagaatcctgcaatccaccctttcacacctccaaagctgagtgcctttgtggatgaagcaaagacgtatgcagccgaatacaccctgcagaccctgggcatccccactgatggaggcgatggcaccatggctactgctgctgctgctgctactgctttcccaggatatgctgtccctaatgcaactgcacccgtgtctgcagcccagctcaagcaagcggtaacccttggacaagacttagcagcatatacaacctatgaggtctacccaacttttgcagtgactgcccgaggggatggatatggcaccttctgaagatgcttttttaaatttaagaataagacacacaaaactctattaaaaaaaaaaaagaaataaacctctaactcggtccccaatgatcataaataatatgtttcctaaagaaatgcctttccagagactgtatagcttataccaattatagaatcatgaagt

SEQ ID NO: 282825 - DNA, 1785 bp, Artificial Sequence
  derived and/or modified sequence
atggagagcaaccacaagagcggcgacggcctgagcggcacccagaaggaggccgccctgagagccctggtgcagagaaccggctacagcctggtgcaggagaacggccagagaaagtacggcggccccccccccggctgggacgccgccccccccgagagaggctgcgagatcttcatcggcaagctgcccagagacctgttcgaggacgagctgatccccctgtgcgagaagatcggcaagatctacgagatgagaatgatgatggacttcaacggcaacaacagaggctacgccttcgtgaccttcagcaacaaggtggaggccaagaacgccatcaagcagctgaacaactacgagatcagaaacggcagactgctgggcgtgtgcgccagcgtggacaactgcagactgttcgtgggcggcatccccaagaccaagaagagagaggagatcctgagcgagatgaagaaggtgaccgagggcgtggtggacgtgatcgtgtaccccagcgccgccgacaagaccaagaacagaggcttcgccttcgtggagtacgagagccacagagccgccgccatggccagaagaaagctgctgcccggcagaatccagctgtggggccacggcatcgccgtggactgggccgagcccgaggtggaggtggacgaggacaccatgagcagcgtgaagatcctgtacgtgagaaacctgatgctgagcaccagcgaggagatgatcgagaaggagttcaacaacatcaagcccggcgccgtggagagagtgaagaagatcagagactacgccttcgtgcacttcagcaacagagaggacgccgtggaggccatgaaggccctgaacggcaaggtgctggacggcagccccatcgaggtgaccctggccaagcccgtggacaaggacagctacgtgagatacaccagaggcaccggcggcagaggcaccatgctgcagggcgagtacacctacagcctgggccaggtgtacgaccccaccaccacctacctgggcgcccccgtgttctacgccccccagacctacgccgccatccccagcctgcacttccccgccaccaagggccacctgagcaacagagccatcatcagagcccccagcgtgagagagatctacatgaacgtgcccgtgggcgccgccggcgtgagaggcctgggcggcagaggctacctggcctacaccggcctgggcagaggctaccaggtgaagggcgacaagagagaggacaagctgtacgacatcctgcccggcatggagctgacccccatgaaccccgtgaccctgaagccccagggcatcaagctggccccccagatcctggaggagatctgccagaagaacaactggggccagcccgtgtaccagctgcacagcgccatcggccaggaccagagacagctgttcctgtacaagatcaccatccccgccctggccagccagaaccccgccatccaccccttcaccccccccaagctgagcgccttcgtggacgaggccaagacctacgccgccgagtacaccctgcagaccctgggcatccccaccgacggcggcgacggcaccatggccaccgccgccgccgccgccaccgccttccccggctacgccgtgcccaacgccaccgcccccgtgagcgccgcccagctgaagcaggccgtgaccctgggccaggacctggccgcctacaccacctacgaggtgtaccccaccttcgccgtgaccgccagaggcgacggctacggcaccttctag

SEQ ID NO: 282826 - protein, 921 aa, Artificial Sequence
  derived and/or modified sequence
MGQICQRESATAAEKPKLHLLAESEIDKYLYAMRLSDETLIDIMTRFRKEMKNGLSRDFNPTATVKMLPTFVRSIPDGSEKGDFIALDLGGSSFRILRVQVNHEKNQNVHMESEVYDTPENIVHGSGSQLFDHVAECLGDFMEKRKIKDKKLPVGFTFSFPCQQSKIDEAILITWTKRFKASGVEGADVVKLLNKAIKKRGDYDANIVAVVNDTVGTMMTCGYDDQHCEVGLIIGTGTNACYMEELRHIDLVEGDEGRMCINTEWGAFGDDGSLEDIRTEFDREIDRGSLNPGKQLFEKMVSGMYLGELVRLILVKMAKEGLLFEGRITPELLTRGKFNTSDVSAIEKNKEGLHNAKEILTRLGVEPSDDDCVSVQHVCTIVSFRSANLVAATLGAILNRLRDNKGTPRLRTTVGVDGSLYKTHPQYSRRFHKTLRRLVPDSDVRFLLSESGSGKGAAMVTAVAYRLAEQHRQIEETLAHFHLTKDMLLEVKKRMRAEMELGLRKQTHNNAVVKMLPSFVRRTPDGTENGDFLALDLGGTNFRVLLVKIRSGKKRTVEMHNKIYAIPIEIMQGTGEELFDHIVSCISDFLDYMGIKGPRMPLGFTFSFPCQQTSLDAGILITWTKGFKATDCVGHDVVTLLRDAIKRREEFDLDVVAVVNDTVGTMMTCAYEEPTCEVGLIVGTGSNACYMEEMKNVEMVEGDQGQMCINMEWGAFGDNGCLDDIRTHYDRLVDEYSLNAGKQRYEKMISGMYLGEIVRNILIDFTKKGFLFRGQISETLKTRGIFETKFLSQIESDRLALLQVRAILQQLGLNSTCDDSILVKTVCGVVSRRAAQLCGAGMAAVVDKIRENRGLDRLNVTVGVDGTLYKLHPHFSRIMHQTVKELSPKCNVSFLLSEDGSGKGAALITAVGVRLRTEASS

SEQ ID NO: 282827 - protein, 952 aa, Artificial Sequence
  derived and/or modified sequence
MGQICQRESRQGLAMLPRLFLNPWRQVILLPQPPKVLGLQATAAEKPKLHLLAESEIDKYLYAMRLSDETLIDIMTRFRKEMKNGLSRDFNPTATVKMLPTFVRSIPDGSEKGDFIALDLGGSSFRILRVQVNHEKNQNVHMESEVYDTPENIVHGSGSQLFDHVAECLGDFMEKRKIKDKKLPVGFTFSFPCQQSKIDEAILITWTKRFKASGVEGADVVKLLNKAIKKRGDYDANIVAVVNDTVGTMMTCGYDDQHCEVGLIIGTGTNACYMEELRHIDLVEGDEGRMCINTEWGAFGDDGSLEDIRTEFDREIDRGSLNPGKQLFEKMVSGMYLGELVRLILVKMAKEGLLFEGRITPELLTRGKFNTSDVSAIEKNKEGLHNAKEILTRLGVEPSDDDCVSVQHVCTIVSFRSANLVAATLGAILNRLRDNKGTPRLRTTVGVDGSLYKTHPQYSRRFHKTLRRLVPDSDVRFLLSESGSGKGAAMVTAVAYRLAEQHRQIEETLAHFHLTKDMLLEVKKRMRAEMELGLRKQTHNNAVVKMLPSFVRRTPDGTENGDFLALDLGGTNFRVLLVKIRSGKKRTVEMHNKIYAIPIEIMQGTGEELFDHIVSCISDFLDYMGIKGPRMPLGFTFSFPCQQTSLDAGILITWTKGFKATDCVGHDVVTLLRDAIKRREEFDLDVVAVVNDTVGTMMTCAYEEPTCEVGLIVGTGSNACYMEEMKNVEMVEGDQGQMCINMEWGAFGDNGCLDDIRTHYDRLVDEYSLNAGKQRYEKMISGMYLGEIVRNILIDFTKKGFLFRGQISETLKTRGIFETKFLSQIESDRLALLQVRAILQQLGLNSTCDDSILVKTVCGVVSRRAAQLCGAGMAAVVDKIRENRGLDRLNVTVGVDGTLYKLHPHFSRIMHQTVKELSPKCNVSFLLSEDGSGKGAALITAVGVRLRTEASS

SEQ ID NO: 282828 - protein, 139 aa, Artificial Sequence
  derived and/or modified sequence
MGQICQRESATAAEKPKLHLLAESEIDKYLYAMRLSDETLIDIMTRFRKEMKNGLSRDFNPTATVKMLPTFVRSIPDGSEKGDFIALDLGGSSFRILRVQVNHEKNQNVHMESEVYDTPENIVHGSGSQLFDHVAECLG

SEQ ID NO: 282829 - DNA, 2766 bp, Artificial Sequence
  derived and/or modified sequence
atgggccagatatgccaacgcgagagcgccacggcagccgaaaaacctaaacttcacttgctggcagaatccgagatcgacaaatatctatacgcaatgcgtttgtctgacgaaactcttattgacattatgacacgcttccgcaaggagatgaagaatggacttagcagggatttcaatcccacagcaaccgttaagatgctacctaccttcgtccggtccattccagacggcagcgagaaaggcgattttatagccttagacctaggtgggtcatcatttagaatcctgcgcgtgcaggttaatcacgaaaagaatcagaacgtccacatggaatcagaggtctacgatactcccgagaacatcgtgcatggatctggttctcagctcttcgaccacgtggcagaatgtctgggcgattttatggagaagcggaagatcaaggacaagaagctgcccgtaggtttcacgttctcatttccctgtcagcagtcaaagatcgatgaagctattctcataacctggactaagcggttcaaagcgtccggggtagagggggccgatgttgtgaagctccttaacaaagcaatcaaaaagagaggcgactatgacgcaaacatcgttgccgtggtgaacgatacggtaggaacgatgatgacctgcggatacgacgaccagcactgcgaggttgggctcataattggtacaggcaccaatgcctgctatatggaggaattgcgccacatcgatttagttgaaggcgacgagggcaggatgtgtatcaacacggaatggggcgcgttcggtgatgatgggtcgctggaagatattaggaccgagttcgatagggaaattgaccggggttccctgaatccaggtaaacagctgttcgaaaaaatggtgtccgggatgtacctcggagaactagtccgattaatattggttaagatggcgaaagagggcctgctgttcgaggggcggatcacccctgaactgctgacccgcgggaagttcaacacaagtgacgtcagtgctatcgaaaagaataaagaagggctacacaacgcaaaggaaattctaacacggttgggagtagaaccgtccgacgacgactgtgtgtccgtccagcacgtgtgtaccatcgtctccttccggtctgcgaaccttgtggctgcaaccttgggggcgatccttaaccggctaagggacaacaagggtacccctaggttaagaactaccgtgggagtcgatgggtccttgtacaagactcacccacagtatagccgcaggtttcacaagaccttgcggcgcctggtccccgactcagatgtgaggtttttgctgagtgaatccggcagtggtaaaggtgcagctatggtgaccgctgtagcctaccgactagctgaacaacatcgccagatcgaagaaactctggctcattttcaccttacaaaggatatgctcctggaggtcaagaagaggatgcgagccgaaatggaattagggttacgcaagcaaacccacaacaatgcagtcgtcaagatgcttccctcctttgtgagaagaacccccgatgggacagaaaacggcgatttcttagcactcgatcttggcgggaccaatttccgcgttctgttggtgaaaatcaggtccggcaagaaacgaaccgtcgagatgcacaacaagatttacgctatccctattgaaataatgcagggtactggcgaggagcttttcgaccatatcgtttcatgcatatcagattttcttgactacatgggcattaaaggaccaagaatgcctcttgggttcaccttttcttttccctgtcaacagacatcattggatgcagggatactgatcacctggacaaaaggcttcaaggctactgactgcgtagggcacgatgtggtgaccctgctaagagacgccattaaacgtagagaagagtttgacctggacgtcgtggccgttgtgaacgacacagtgggcaccatgatgacgtgtgcttacgaggagcctacctgcgaggtgggcttgattgtggggacaggatcaaatgcatgttacatggaggaaatgaaaaacgtagagatggtggagggcgatcagggtcagatgtgcattaacatggaatggggagccttcggggataacggctgcctagatgacattcggacacattatgatcgccttgtggatgagtattctctgaacgccggaaagcaaaggtacgagaaaatgattagcggcatgtacctcggcgagatcgtgcgtaacattttaattgatttcacgaagaaagggttcctgttccggggccagatatcagagacactcaaaactcgggggatttttgagaccaaatttctgtcacagatcgagtctgaccgcctggccctgttgcaagtgcgcgctattctgcagcagctggggttgaatagtacatgcgatgactccattcttgtcaagaccgtatgcggggttgtgagccgacgggcagcacagctgtgcggggctggcatggctgcggttgtagacaaaattagagagaataggggactcgataggctcaacgtgactgtgggcgtcgacggaacgctttataagctgcaccctcactttagtagaatcatgcatcaaaccgtcaaagagctttcaccaaaatgtaacgtgtcctttctgttgagcgaagatggcagtggtaaaggagcagcactgatcacagcggtcggcgtgcggttaagaactgaagcctcttcttag

SEQ ID NO: 282830 - DNA, 2859 bp, Artificial Sequence
  derived and/or modified sequence
atggggcagatctgccagagagagtccaggcagggcctggccatgctccctcgactttttctgaacccctggagacaggtgatcctactcccccagcccccgaaagtgttggggctccaagcaacagcagctgagaagcctaagctccatctgttggccgagagcgaaatcgacaaatacctgtatgctatgcgcttaagtgatgagacattaatcgatatcatgaccaggtttaggaaggagatgaagaacggattaagtagggactttaaccctactgcaactgtgaagatgctgccgacattcgttagaagtataccagacggaagtgagaagggagactttattgccctggatcttggaggaagcagttttcgaattttgcgcgtgcaggtaaaccacgagaaaaaccagaacgttcacatggagtcagaggtgtatgacaccccagagaacatcgtgcacggctccggctcgcagctcttcgatcacgtcgccgaatgcctgggcgactttatggaaaaaaggaaaatcaaagataaaaagcttcccgtgggcttcaccttctctttcccctgtcaacagtcaaagatagatgaggcaatcctgataacatggaccaaaagatttaaggcttccggcgtggaaggcgcagacgtggtgaaactgctcaataaggccattaagaaacggggggattacgacgcgaatatcgtggctgtggtgaatgatacagtagggaccatgatgacttgcgggtatgacgaccagcactgcgaggtggggctgattatcgggacaggcacaaatgcctgctatatggaggaactgcgtcacattgatcttgttgagggtgatgaggggagaatgtgtatcaacaccgagtggggcgctttcggcgatgacggcagcctggaagacatccgcacagagtttgatcgagagatcgatcgtggcagcctgaaccctggaaaacagttattcgagaaaatggtcagcgggatgtatctgggggaacttgttagactgatactcgttaagatggcgaaggagggtttgctgttcgagggacgaatcacccccgaactgttgacccgcggcaagtttaacaccagcgacgtctctgccatcgagaagaacaaggaagggctccacaacgctaaggagattctaacacggctgggtgtggagccgtcagacgatgattgcgtcagcgtgcagcacgtgtgcaccatagtgtccttccgctccgccaacttagtggcagctaccctgggagcgattctgaaccggctgcgcgataataagggcactcctaggctccggactaccgtcggagtggacggctccctgtataagacacacccccaatattcccggaggttccataaaaccctgagaaggctggtacccgattctgacgtgcgtttcttactgagcgagagcgggtccgggaagggtgcggccatggttactgccgtagcttaccgcctggcagaacaacacagacagatcgaggaaacactggctcactttcacttaaccaaagatatgctgctggaggttaaaaaacgcatgagggctgagatggaactaggactgcggaaacaaacacacaataacgctgtcgtgaagatgctgccttcattcgtgaggcggactccggacggaaccgagaacggcgacttcttagccttggacttgggtgggaccaacttccgcgtactacttgtcaaaataaggtcaggcaaaaagcggacagttgagatgcacaataaaatatacgctatccctattgagatcatgcagggtacaggagaagagttattcgatcatatcgtatcttgcatctccgacttcctcgactatatgggtataaaggggccacgcatgcccctgggcttcaccttttcctttccgtgccaacagacttctttagatgccgggattctgatcacctggacaaaggggtttaaggcgactgattgtgtgggccacgatgtcgttaccctcctgcgggacgctataaaaaggcgcgaggagtttgatctggacgtcgttgcggtagtgaacgacaccgtgggcacaatgatgacctgtgcctacgaggagccgacctgcgaggtcggtctcatcgtgggtacaggaagtaatgcttgctacatggaggaaatgaagaatgtggagatggtggaaggtgatcagggtcagatgtgcatcaatatggagtggggagccttcggcgacaacgggtgcctagacgacatccgcacacactatgatcgcctggtcgatgaatacagtcttaacgccggtaaacaacggtacgaaaaaatgatctccgggatgtacctcggtgaaatagttagaaacatcttgatcgacttcaccaagaagggttttctctttcggggccagatcagcgaaaccttgaaaactcgcggtatcttcgagacaaagttcctgtcacagatcgagtccgatcgattagccctcctccaggtcagagccatactacagcagctaggtctgaatagtacctgcgatgatagtatcttggtaaagaccgtgtgtggggtggttagtcgccgggccgcccaactgtgtggtgctgggatggccgccgttgtagataaaatccgggaaaacagaggcctcgacaggctcaatgtgaccgtcggcgttgatggaaccctgtacaagttacacccacactttagccgcataatgcatcagaccgtcaaagagctctccccgaaatgcaacgtgtctttccttctctccgaggacggctctgggaagggtgctgcgttaataaccgctgtgggcgtccggctgcggactgaagctagttcatag

SEQ ID NO: 282831 - DNA, 420 bp, Artificial Sequence
  derived and/or modified sequence
atgggccagatttgtcagcgcgaatctgcaactgctgccgagaagcctaagttacacctgctggccgagtctgagatagacaaatatctgtacgccatgagactttcggacgagacgctgatcgatattatgacccgtttccggaaggaaatgaagaacgggctcagtcgagatttcaatcccaccgcaacggtgaagatgttgccaacgtttgttcgaagcatccctgatggaagtgaaaagggcgacttcatagccttagacctgggagggtcctcctttagaatcttacgtgtgcaggtgaatcatgaaaaaaatcaaaatgtgcacatggagtccgaggtgtatgatacaccagaaaatatcgtacacggaagcgggtcccaactctttgaccatgtggctgagtgcctcggctag

SEQ ID NO: 282832 - DNA, 3961 bp, Artificial Sequence
  derived and/or modified sequence
aaaacatctatcttgctgtgtttggacaggccagcccctgaaacatcttgggcaatggagggttaacttctcaaagtttaataggcaagaccagcaaccatgcaacaaggacttcaactaaccaactaaagaactgttccccagagcattgttcctgagaaggaaaagagtccaaacacctacccacacctgctttgtgccaagaatccacagttggattgcaaggacagtgtatgttgtccttttggaaaaatgagagtgagcccaaatgaagaacaagcaaaggcgttcaagacccagctgttgagagtagaaaagcagaagaaaggacccgaggtcagcaagtgccctccccacaatggggcagatctgccagcgagaatcggctacagcagctgaaaaaccaaaacttcatctacttgctgaaagtgagcattgttgatgctcttgagagcatcagccaggacattaatgtgcaccactgtggtggcgtggaaagatggcaaaaagagccctgcatgattttattgacaagtatctctatgccatgcggctctccgatgaaactctcatagatatcatgactcgcttcaggaaggagatgaagaatggcctctcccgggattttaatccaacagccacagtcaagatgttgccaacattcgtaaggtccattcctgatggctctgaaaagggagatttcattgccctggatcttggtgggtcttcctttcgaattctgcgggtgcaagtgaatcatgagaaaaaccagaatgttcacatggagtccgaggtttatgacaccccagagaacatcgtgcacggcagtggaagccagctttttgatcatgttgctgagtgcctgggagatttcatggagaaaaggaagatcaaggacaagaagttacctgtgggattcacgttttcttttccttgccaacaatccaaaatagatgaggccatcctgatcacctggacaaagcgatttaaagcgagcggagtggaaggagcagatgtggtcaaactgcttaacaaagccatcaaaaagcgaggggactatgatgccaacatcgtagctgtggtgaatgacacagtgggcaccatgatgacctgtggctatgacgaccagcactgtgaagtcggcctgatcatcggcactggcaccaatgcttgctacatggaggaactgaggcacattgatctggtggaaggagacgaggggaggatgtgtatcaatacagaatggggagcctttggagacgatggatcattagaagacatccggacagagtttgacagggagatagaccggggatccctcaaccctggaaaacagctgtttgagaagatggtcagtggcatgtacttgggagagctggttcgactgatcctagtcaagatggccaaggagggcctcttatttgaagggcggatcaccccggagctgctcacccgagggaagtttaacaccagtgatgtgtcagccatcgaaaagaataaggaaggcctccacaatgccaaagaaatcctgacccgcctgggagtggagccgtccgatgatgactgtgtctcagtccagcacgtttgcaccattgtctcatttcgctcagccaacttggtggctgccacactgggcgccatcttgaaccgcctgcgtgataacaagggcacacccaggctgcggaccacggttggtgtcgacggatctctttacaagacgcacccacagtattcccggcgtttccacaagactctaaggcgcttggtgccagactccgatgtgcgcttcctcctctcggagagtggcagcggcaagggggctgccatggtgacggcggtggcctaccgcttggccgagcagcaccggcagatagaggagaccctggctcatttccacctcaccaaggacatgctgctggaggtgaagaagaggatgcgggccgagatggagctggggctgaggaagcagacgcacaacaatgccgtggttaagatgctgccctccttcgtccggagaactcccgacgggaccgagaatggtgacttcttggccctggatcttggaggaaccaatttccgtgtgctgctggtgaaaatccgtagtgggaaaaagagaacggtggaaatgcacaacaagatctacgccattcctattgaaatcatgcagggcactggggaagagctgtttgatcacattgtctcctgcatctctgacttcttggactacatggggatcaaaggccccaggatgcctctgggcttcacgttctcatttccctgccagcagacgagtctggacgcgggaatcttgatcacgtggacaaagggttttaaggcaacagactgcgtgggccacgatgtagtcaccttactaagggatgcgataaaaaggagagaggaatttgacctggacgtggtggctgtggtcaacgacacagtgggcaccatgatgacctgtgcttatgaggagcccacctgtgaggttggactcattgttgggaccggcagcaatgcctgctacatggaggagatgaagaacgtggagatggtggagggggaccaggggcagatgtgcatcaacatggagtggggggcctttggggacaacgggtgtctggatgatatcaggacacactacgacagactggtggacgaatattccctaaatgctgggaaacaaaggtatgagaagatgatcagtggtatgtacctgggtgaaatcgtccgcaacatcttaatcgacttcaccaagaagggattcctcttccgagggcagatctctgagacgctgaagacccggggcatctttgagaccaagtttctctctcagatcgagagtgaccgattagcactgctccaggtccgggctatcctccagcagctaggtctgaatagcacctgcgatgacagtatcctcgtcaagacagtgtgcggggtggtgtccaggagggccgcacagctgtgtggcgcaggcatggctgcggttgtggataagatccgcgagaacagaggactggaccgtctgaatgtgactgtgggagtggacgggacactctacaagcttcatccacacttctccagaatcatgcaccagacggtgaaggaactgtcaccaaaatgtaacgtgtccttcctcctgtctgaggatggcagcggcaagggggccgccctcatcacggccgtgggcgtgcggttacgcacagaggcaagcagctaagagtccgggatccccagcctactgcctctccagcacttctctcttcaagcggcgaccccctaccctcccagcgagttgcgctgggagacgctggcgccagggcctgccggcgcggggaggaaagcaaaatccaactaatggtatatattgtagggtacagaatagagcgtgtgctgttgataatatctctcacccggatccctcctcacttgccctgccactttgcatggtttgattttgacctggtcccccacgtgtgaagtgtagtggcatccatttctaatgtatgcattcatccaacagagttatttattggctggagatggaaaatcacaccacctgacaggccttctgggcctccaaagcccatccttggggttccccctccctgtgtgaaatgtattatcaccagcagacactgccgggcctccctcccgggggcactgcctgaaggcgagtgtgggcatagcattagctgcttcctcccctcctggcacccactgtggcctggcatcgcatcgtggtgtgtcaatgccacaaaatcgtgtgtccgtggaaccagtcctagccgcgtgtgacagtcttgcattctgtttgtctcgtggggggaggtggacagtcctgcggaaatgtgtcttgtctccatttggataaaaggaaccaaccaacaaacaatgccatcactggaatttcccaccgctttgtgagccgtgtcgtatgacctagtaaactttgtaccaattc

SEQ ID NO: 282833 - DNA, 2766 bp, Artificial Sequence
  derived and/or modified sequence
atggggcagatctgccagcgagaatcggctacagcagctgaaaaaccaaaacttcatctacttgctgaaagtgagattgacaagtatctctatgccatgcggctctccgatgaaactctcatagatatcatgactcgcttcaggaaggagatgaagaatggcctctcccgggattttaatccaacagccacagtcaagatgttgccaacattcgtaaggtccattcctgatggctctgaaaagggagatttcattgccctggatcttggtgggtcttcctttcgaattctgcgggtgcaagtgaatcatgagaaaaaccagaatgttcacatggagtccgaggtttatgacaccccagagaacatcgtgcacggcagtggaagccagctttttgatcatgttgctgagtgcctgggagatttcatggagaaaaggaagatcaaggacaagaagttacctgtgggattcacgttttcttttccttgccaacaatccaaaatagatgaggccatcctgatcacctggacaaagcgatttaaagcgagcggagtggaaggagcagatgtggtcaaactgcttaacaaagccatcaaaaagcgaggggactatgatgccaacatcgtagctgtggtgaatgacacagtgggcaccatgatgacctgtggctatgacgaccagcactgtgaagtcggcctgatcatcggcactggcaccaatgcttgctacatggaggaactgaggcacattgatctggtggaaggagacgaggggaggatgtgtatcaatacagaatggggagcctttggagacgatggatcattagaagacatccggacagagtttgacagggagatagaccggggatccctcaaccctggaaaacagctgtttgagaagatggtcagtggcatgtacttgggagagctggttcgactgatcctagtcaagatggccaaggagggcctcttatttgaagggcggatcaccccggagctgctcacccgagggaagtttaacaccagtgatgtgtcagccatcgaaaagaataaggaaggcctccacaatgccaaagaaatcctgacccgcctgggagtggagccgtccgatgatgactgtgtctcagtccagcacgtttgcaccattgtctcatttcgctcagccaacttggtggctgccacactgggcgccatcttgaaccgcctgcgtgataacaagggcacacccaggctgcggaccacggttggtgtcgacggatctctttacaagacgcacccacagtattcccggcgtttccacaagactctaaggcgcttggtgccagactccgatgtgcgcttcctcctctcggagagtggcagcggcaagggggctgccatggtgacggcggtggcctaccgcttggccgagcagcaccggcagatagaggagaccctggctcatttccacctcaccaaggacatgctgctggaggtgaagaagaggatgcgggccgagatggagctggggctgaggaagcagacgcacaacaatgccgtggttaagatgctgccctccttcgtccggagaactcccgacgggaccgagaatggtgacttcttggccctggatcttggaggaaccaatttccgtgtgctgctggtgaaaatccgtagtgggaaaaagagaacggtggaaatgcacaacaagatctacgccattcctattgaaatcatgcagggcactggggaagagctgtttgatcacattgtctcctgcatctctgacttcttggactacatggggatcaaaggccccaggatgcctctgggcttcacgttctcatttccctgccagcagacgagtctggacgcgggaatcttgatcacgtggacaaagggttttaaggcaacagactgcgtgggccacgatgtagtcaccttactaagggatgcgataaaaaggagagaggaatttgacctggacgtggtggctgtggtcaacgacacagtgggcaccatgatgacctgtgcttatgaggagcccacctgtgaggttggactcattgttgggaccggcagcaatgcctgctacatggaggagatgaagaacgtggagatggtggagggggaccaggggcagatgtgcatcaacatggagtggggggcctttggggacaacgggtgtctggatgatatcaggacacactacgacagactggtggacgaatattccctaaatgctgggaaacaaaggtatgagaagatgatcagtggtatgtacctgggtgaaatcgtccgcaacatcttaatcgacttcaccaagaagggattcctcttccgagggcagatctctgagacgctgaagacccggggcatctttgagaccaagtttctctctcagatcgagagtgaccgattagcactgctccaggtccgggctatcctccagcagctaggtctgaatagcacctgcgatgacagtatcctcgtcaagacagtgtgcggggtggtgtccaggagggccgcacagctgtgtggcgcaggcatggctgcggttgtggataagatccgcgagaacagaggactggaccgtctgaatgtgactgtgggagtggacgggacactctacaagcttcatccacacttctccagaatcatgcaccagacggtgaaggaactgtcaccaaaatgtaacgtgtccttcctcctgtctgaggatggcagcggcaagggggccgccctcatcacggccgtgggcgtgcggttacgcacagaggcaagcagctaa

SEQ ID NO: 282834 - DNA, 707 bp, Artificial Sequence
  derived and/or modified sequence
gttccccagagcattgttcctgagaaggaaaagagtccaaacacctacccacacctgctttgtgccaagaatccacagttggattgcaaggacagtgtatgttgtccttttggaaaaatgagagtgagcccaaatgaagaacaagcaaaggcgttcaagacccagctgttgagagtagaaaagcagaagaaaggacccgaggtcagcaagtgccctccccacaatggggcagatctgccagcgagaatcggctacagcagctgaaaaaccaaaacttcatctacttgctgaaagtgagcattgttgatgctcttgagagcatcagccaggacattaatgtgcaccactgtggtggcgtggaaagatggcaaaaagagccctgcatgattttattgacaagtatctctatgccatgcggctctccgatgaaactctcatagatatcatgactcgcttcaggaaggagatgaagaatggcctctcccgggattttaatccaacagccacagtcaagatgttgccaacattcgtaaggtccattcctgatggctctgaaaagggagatttcattgccctggatcttggtgggtcttcctttcgaattctgcgggtgcaagtgaatcatgagaaaaaccagaatgttcacatggagtccgaggtttatgacaccccagagaacatcgtgcacggcagtggaagccagcttt

SEQ ID NO: 282835 - DNA, 3992 bp, Artificial Sequence
  derived and/or modified sequence
atctatcttgctgtgtttggacaggccagcccctgaaacatcttgggcaatggagggttaacttctcaaagtttaataggcaagaccagcaaccatgcaacaagaagatactctataaatgatgattcaatgaatgccaagccctgttctatgcactgaagaccaaaagaaataaaagacatcattcctgctctgacttcaactaaccaactaaagaactgttccccagagcattgttcctgagaaggaaaagagtccaaacacctacccacacctgctttgtgccaagaatccacagttggattgcaaggacagtgcgttcaagacccagctgttgagagtagaaaagcagaagaaaggacccgaggtcagcaagtgccctccccacaatggggcagatctgccagcgagaatcgagacagggtcttgctatgttgcccaggctgttcttaaatccctggcgtcaagtgatcctcctgcctcagcctcctaaagtgctgggattacaggctacagcagctgaaaaaccaaaacttcatctacttgctgaaagtgagattgacaagtatctctatgccatgcggctctccgatgaaactctcatagatatcatgactcgcttcaggaaggagatgaagaatggcctctcccgggattttaatccaacagccacagtcaagatgttgccaacattcgtaaggtccattcctgatggctctgaaaagggagatttcattgccctggatcttggtgggtcttcctttcgaattctgcgggtgcaagtgaatcatgagaaaaaccagaatgttcacatggagtccgaggtttatgacaccccagagaacatcgtgcacggcagtggaagccagctttttgatcatgttgctgagtgcctgggagatttcatggagaaaaggaagatcaaggacaagaagttacctgtgggattcacgttttcttttccttgccaacaatccaaaatagatgaggccatcctgatcacctggacaaagcgatttaaagcgagcggagtggaaggagcagatgtggtcaaactgcttaacaaagccatcaaaaagcgaggggactatgatgccaacatcgtagctgtggtgaatgacacagtgggcaccatgatgacctgtggctatgacgaccagcactgtgaagtcggcctgatcatcggcactggcaccaatgcttgctacatggaggaactgaggcacattgatctggtggaaggagacgaggggaggatgtgtatcaatacagaatggggagcctttggagacgatggatcattagaagacatccggacagagtttgacagggagatagaccggggatccctcaaccctggaaaacagctgtttgagaagatggtcagtggcatgtacttgggagagctggttcgactgatcctagtcaagatggccaaggagggcctcttatttgaagggcggatcaccccggagctgctcacccgagggaagtttaacaccagtgatgtgtcagccatcgaaaagaataaggaaggcctccacaatgccaaagaaatcctgacccgcctgggagtggagccgtccgatgatgactgtgtctcagtccagcacgtttgcaccattgtctcatttcgctcagccaacttggtggctgccacactgggcgccatcttgaaccgcctgcgtgataacaagggcacacccaggctgcggaccacggttggtgtcgacggatctctttacaagacgcacccacagtattcccggcgtttccacaagactctaaggcgcttggtgccagactccgatgtgcgcttcctcctctcggagagtggcagcggcaagggggctgccatggtgacggcggtggcctaccgcttggccgagcagcaccggcagatagaggagaccctggctcatttccacctcaccaaggacatgctgctggaggtgaagaagaggatgcgggccgagatggagctggggctgaggaagcagacgcacaacaatgccgtggttaagatgctgccctccttcgtccggagaactcccgacgggaccgagaatggtgacttcttggccctggatcttggaggaaccaatttccgtgtgctgctggtgaaaatccgtagtgggaaaaagagaacggtggaaatgcacaacaagatctacgccattcctattgaaatcatgcagggcactggggaagagctgtttgatcacattgtctcctgcatctctgacttcttggactacatggggatcaaaggccccaggatgcctctgggcttcacgttctcatttccctgccagcagacgagtctggacgcgggaatcttgatcacgtggacaaagggttttaaggcaacagactgcgtgggccacgatgtagtcaccttactaagggatgcgataaaaaggagagaggaatttgacctggacgtggtggctgtggtcaacgacacagtgggcaccatgatgacctgtgcttatgaggagcccacctgtgaggttggactcattgttgggaccggcagcaatgcctgctacatggaggagatgaagaacgtggagatggtggagggggaccaggggcagatgtgcatcaacatggagtggggggcctttggggacaacgggtgtctggatgatatcaggacacactacgacagactggtggacgaatattccctaaatgctgggaaacaaaggtatgagaagatgatcagtggtatgtacctgggtgaaatcgtccgcaacatcttaatcgacttcaccaagaagggattcctcttccgagggcagatctctgagacgctgaagacccggggcatctttgagaccaagtttctctctcagatcgagagtgaccgattagcactgctccaggtccgggctatcctccagcagctaggtctgaatagcacctgcgatgacagtatcctcgtcaagacagtgtgcggggtggtgtccaggagggccgcacagctgtgtggcgcaggcatggctgcggttgtggataagatccgcgagaacagaggactggaccgtctgaatgtgactgtgggagtggacgggacactctacaagcttcatccacacttctccagaatcatgcaccagacggtgaaggaactgtcaccaaaatgtaacgtgtccttcctcctgtctgaggatggcagcggcaagggggccgccctcatcacggccgtgggcgtgcggttacgcacagaggcaagcagctaagagtccgggatccccagcctactgcctctccagcacttctctcttcaagcggcgaccccctaccctcccagcgagttgcgctgggagacgctggcgccagggcctgccggcgcggggaggaaagcaaaatccaactaatggtatatattgtagggtacagaatagagcgtgtgctgttgataatatctctcacccggatccctcctcacttgccctgccactttgcatggtttgattttgacctggtcccccacgtgtgaagtgtagtggcatccatttctaatgtatgcattcatccaacagagttatttattggctggagatggaaaatcacaccacctgacaggccttctgggcctccaaagcccatccttggggttccccctccctgtgtgaaatgtattatcaccagcagacactgccgggcctccctcccgggggcactgcctgaaggcgagtgtgggcatagcattagctgcttcctcccctcctggcacccactgtggcctggcatcgcatcgtggtgtgtcaatgccacaaaatcgtgtgtccgtggaaccagtcctagccgcgtgtgacagtcttgcattctgtttgtctcgtggggggaggtggacagtcctgcggaaatgtgtcttgtctccatttggataaaaggaaccaaccaacaaacaatgccatcactggaatttcccaccgctttgtgagccgtgtcgtatgacctagtaaactttgtaccaattc

SEQ ID NO: 282836 - DNA, 739 bp, Artificial Sequence
  derived and/or modified sequence
agaactccagagagggaaaacatctatcttgctgtgtttggacaggccagcccctgaaacatcttgggcaatggagggttaacttctcaaagtttaataggcaagaccagcaaccatgcaacaaggacttcaactaaccaactaaagaactgttccccagagcattgttcctgagaaggaaaagagtccaaacacctacccacacctgctttgtgccaagaatccacagttggattgcaaggacagtgcgttcaagacccagctgttgagagtagaaaagcagaagaaaggacccgaggtcagcaagtgccctccccacaatggggcagatctgccagcgagaatcggctacagcagctgaaaaaccaaaacttcatctacttgctgaaagtgagattgacaagtatctctatgccatgcggctctccgatgaaactctcatagatatcatgactcgcttcaggaaggagatgaagaatggcctctcccgggattttaatccaacagccacagtcaagatgttgccaacattcgtaaggtccattcctgatggctctgaaaagggagatttcattgccctggatcttggtgggtcttcctttcgaattctgcgggtgcaagtgaatcatgagaaaaaccagaatgttcacatggagtccgaggtttatgacaccccagagaacatcgtgcacggcagtggaagccagctttttgatcatgttgctgagtgcctgggaga

SEQ ID NO: 282837 - DNA, 2766 bp, Artificial Sequence
  derived and/or modified sequence
atgggccagatctgccagcgggagagcgccacagctgctgagaagcccaagctgcacctgctggccgagagcgagattgacaagtacctgtatgccatgaggctgagtgatgagaccctgattgacatcatgacccgcttcaggaaggagatgaagaatggcctgagccgggacttcaaccccacagccaccgtgaagatgctgcccacctttgtgcgcagcatcccagatggcagcgagaagggggacttcatcgccctggacctgggcggcagcagcttccgcatcctgcgggtgcaggtgaaccacgagaagaaccagaatgtgcacatggagagcgaggtgtatgacaccccagagaacatcgtgcacggcagcggcagccagctgtttgaccacgtggccgagtgcctgggggacttcatggagaagaggaagatcaaggacaagaagctgcctgtgggcttcaccttctccttcccctgccagcagagcaagattgatgaggccatcctgatcacctggaccaagcgcttcaaggccagcggcgtggagggcgcagatgtggtgaagctgctgaacaaggccatcaagaagagaggagactatgatgccaacatcgtggccgtggtgaatgacacagtgggcaccatgatgacctgtggctatgatgaccagcactgtgaggtgggcctcatcatcggcaccggcaccaatgcctgctacatggaggagctgcggcacatcgacctggtggagggagatgagggccgcatgtgcatcaacacagagtggggcgcctttggagatgatggcagcctggaggacatcagaacagaatttgaccgggagattgaccggggcagcctgaaccctgggaagcagctgtttgagaagatggtgtctggcatgtacctgggggagctggtgcggctcatcctggtgaagatggccaaggagggcctgctgtttgagggccgcatcaccccagagctgctgacccggggcaagttcaacaccagtgatgtgtctgccatcgagaagaacaaggagggcctgcacaatgccaaggagatcctgacccggctgggcgtggagcccagtgatgatgactgtgtgtctgtgcagcacgtgtgcaccatcgtgtccttccgcagcgccaacctggtggccgccaccctgggcgccatcctgaaccggctgcgggacaacaagggcaccccccggctgcggaccaccgtgggcgtggatggcagcctgtacaagacccacccccagtacagccgccgcttccacaagaccctgcggcggctggtgcctgacagtgatgtgcgcttcctgctgtctgagagcggcagcgggaaaggagctgccatggtgacagctgtggcctaccgcctggccgagcagcaccggcagatcgaggagaccctggcccacttccacctgaccaaggacatgctgctggaggtgaagaagaggatgagagctgagatggagctgggcctgaggaagcagacccacaacaatgctgtggtgaagatgctgcccagctttgtgcggaggaccccagatggaacagaaaatggagacttcctggccctggacctgggcggcaccaacttccgggtgctgctggtgaagatccgcagcggcaagaagaggacagtggagatgcacaacaagatctatgccatccccatcgagatcatgcagggcaccggggaggagctgtttgaccacatcgtgtcctgcatcagtgacttcctggactacatgggcatcaagggccccaggatgcccctgggcttcaccttctccttcccctgccagcagaccagcctggatgctggcatcctgatcacctggaccaagggcttcaaggccacagactgtgtgggccatgatgtggtgaccctgctgagagatgccatcaagagaagagaggagtttgacctggatgtggtggccgtggtgaatgacacagtgggcaccatgatgacctgtgcctatgaggagcccacctgtgaggtgggcctgattgtgggcaccggcagcaatgcctgctacatggaggagatgaagaatgtggagatggtggagggggaccagggccagatgtgcatcaacatggagtggggcgccttcggggacaatggctgcctggatgacatccgcacccactatgaccggctggtggatgagtacagcctgaatgctgggaagcagagatatgagaagatgatcagcggcatgtacctgggggagatcgtgaggaacatcctgattgacttcaccaagaagggcttcctgttccggggccagatcagcgagaccctgaagacccggggcatctttgagaccaagttcctgagccagatcgagagtgaccggctggccctgctgcaggtgcgggccatcctgcagcagctgggcctgaacagcacctgtgatgacagcatcctggtgaagacagtgtgtggggtggtgtcccggcgggccgcccagctgtgtggggccggcatggctgctgtggtggacaagatcagagaaaatagaggcctggaccggctgaatgtgacagtgggcgtggatggcaccctgtacaagctgcacccccacttcagccgcatcatgcaccagacagtgaaggagctgagccccaagtgcaatgtgtccttcctgctgtctgaagatggcagcgggaaaggagctgccctgatcacagctgtgggcgtgcggctgaggacagaggccagcagctag

SEQ ID NO: 282838 - DNA, 2859 bp, Artificial Sequence
  derived and/or modified sequence
atgggccagatctgccagcgggagagccggcagggcctggccatgctgcccaggctcttcctgaacccctggaggcaggtgatcctgctgccccagccccccaaggtgctgggcctgcaggccacagctgctgagaagcccaagctgcacctgctggccgagagcgagattgacaagtacctgtatgccatgaggctgagtgatgagaccctgattgacatcatgacccgcttcaggaaggagatgaagaatggcctgagccgggacttcaaccccacagccaccgtgaagatgctgcccacctttgtgcgcagcatcccagatggcagcgagaagggggacttcatcgccctggacctgggcggcagcagcttccgcatcctgcgggtgcaggtgaaccacgagaagaaccagaatgtgcacatggagagcgaggtgtatgacaccccagaaaatattgtgcacggcagcggcagccagctgtttgaccacgtggctgaatgtctgggggacttcatggagaagaggaagatcaaggacaagaagctgcctgtgggcttcaccttctccttcccctgccagcagagcaagattgatgaggccatcctgatcacctggaccaagcgcttcaaggccagcggcgtggagggcgcagatgtggtgaagctgctgaacaaggccatcaagaagagaggagactatgatgccaacatcgtggccgtggtgaatgacacagtgggcaccatgatgacctgtggctatgatgaccagcactgtgaggtgggcctcatcattggaacaggcaccaatgcctgctacatggaggagctgcggcacatcgacctggtggagggagatgagggccgcatgtgcatcaacacagagtggggcgcctttggagatgatggcagcctggaggacatcagaacagaatttgaccgggagattgaccggggcagcctgaaccctgggaagcagctgtttgagaagatggtgtctggcatgtacctgggggagctggtgcggctcatcctggtgaagatggccaaggagggcctgctgtttgagggccgcatcaccccagagctgctgacccggggcaagttcaacaccagtgatgtgtctgccatcgagaagaacaaggagggcctgcacaatgccaaggagatcctgacccggctgggcgtggagcccagtgatgatgactgtgtgtctgtgcagcacgtgtgcaccatcgtgtccttccgcagcgccaacctggtggccgccaccctgggcgccatcctgaaccggctgcgggacaacaagggcaccccccggctgcggaccaccgtgggcgtggatggcagcctgtacaagacccacccccagtacagccgccgcttccacaagaccctgcggcggctggtgcctgacagtgatgtgcgcttcctgctgtctgagagcggcagcggcaagggggccgccatggtgacagctgtggcctaccgcctggccgagcagcaccggcagatcgaggagaccctggcccacttccacctgaccaaggacatgctgctggaggtgaagaagaggatgagagctgagatggagctgggcctgaggaagcagacccacaacaatgctgtggtgaagatgctgcccagctttgtgcggaggaccccagatggaacagaaaatggagacttcctggccctggacctgggcggcaccaacttccgggtgctgctggtgaagatccgcagcggcaagaagaggacagtggagatgcacaacaagatctatgccatccccatcgagatcatgcagggcactggagaggagctgtttgaccacatcgtgtcctgcatcagtgacttcctggactacatgggcatcaagggccccaggatgcccctgggcttcaccttctccttcccctgccagcagaccagcctggatgctggcatcctgatcacctggaccaagggcttcaaggccacagactgtgtgggccatgatgtggtgaccctgctgagagatgccatcaagaggcgggaggagtttgacctggatgtggtggccgtggtgaatgacacagtgggcaccatgatgacctgtgcctatgaggagcccacctgtgaggtgggcctcatcgtgggcaccggcagcaatgcctgctacatggaggagatgaagaatgtggagatggtggagggggaccagggccagatgtgcatcaacatggagtggggcgcctttggagacaatggctgcctggatgacatccgcacccactatgaccggctggtggatgagtacagcctgaatgccggcaagcagagatatgagaagatgatcagcggcatgtacctgggggagatcgtgaggaacatcctgattgacttcaccaagaagggcttcctgttccggggccagatcagcgagaccctgaagacccggggcatctttgagaccaagttcctgagccagattgaaagtgaccggctggccctgctgcaggtgcgggccatcctgcagcagctgggcctgaacagcacctgtgatgacagcatcctggtgaagacagtgtgtggggtggtgtccagaagagctgcccagctgtgtggggccggcatggctgctgtggtggacaagatccgggagaacagaggcctggaccggctgaatgtgacagtgggcgtggatggcaccctgtacaagctgcacccccacttcagccgcatcatgcaccagacagtgaaggagctgagccccaagtgcaatgtgtccttcctgctgtctgaagatggcagcggcaagggggccgccctgatcacagctgtgggcgtgcggctgaggacagaggccagcagctag

SEQ ID NO: 282839 - DNA, 420 bp, Artificial Sequence
  derived and/or modified sequence
atgggccagatctgccagcgggagagcgccacagctgctgagaagcccaagctgcacctgctggccgagagcgagattgacaagtacctgtatgccatgaggctgagtgatgagaccctgattgacatcatgacccgcttcaggaaggagatgaagaatggcctgagccgggacttcaaccccacagccaccgtgaagatgctgcccacctttgtgcgcagcatcccagatggcagcgagaagggggacttcatcgccctggacctgggcggcagcagcttccgcatcctgcgggtgcaggtgaaccacgagaagaaccagaatgtgcacatggagagcgaggtgtatgacaccccagagaacatcgtgcacggcagcggcagccagctgtttgaccacgtggccgagtgcctgggctag

SEQ ID NO: 282840 - DNA, 2766 bp, Artificial Sequence
  derived and/or modified sequence
atgggccagatctgccagcgggagagcgccaccgccgccgagaagccaaaactgcacctgctggcagaaagcgagattgataaatacctgtacgccatgagactgtcggacgagactctgatagacatcatgacccgcttcaggaaggagatgaagaatgggctctcccgtgactttaaccctacggccaccgtaaagatgctccctacattcgtgcgatccatccctgacggaagtgagaaaggagatttcatcgctttagacttgggcggttccagcttcagaatcctacgcgttcaggtgaaccatgagaagaaccaaaatgttcacatggagtcagaggtgtacgacaccccagagaatatcgtgcatggctctggatctcagctgtttgaccacgtggcggagtgcctgggggatttcatggaaaagagaaagatcaaagacaagaagctgcccgtcggattcacttttagtttcccatgtcagcagtctaagatcgatgaggcaattttgatcacctggaccaaacggtttaaggccagtggggttgagggggccgacgtggttaaactgctgaataaggccatcaaaaaacgcggcgactatgatgcaaatatcgtggcagttgttaatgacacggtgggcactatgatgacttgcgggtatgatgaccagcattgcgaggttggattgatcatcgggaccgggacgaacgcttgctacatggaagagctgaggcacatagatctagttgagggggatgaaggccgcatgtgcataaacacagagtggggtgccttcggagatgatgggtctctagaggatatcaggacagaattcgacagagagattgaccggggatcactcaaccctggcaagcagctctttgaaaagatggtgagcggcatgtatctcggggagctggtaagacttattctggtcaaaatggctaaagaagggctgttatttgaagggaggattacaccagagctcctcactaggggtaagtttaacacctcagacgttagtgccatcgaaaagaacaaggagggtttacataacgccaaagagattcttactcgtcttggagtcgaaccatccgacgacgactgtgtatcagtacagcacgtgtgtaccatcgtttcttttcgcagtgccaacctcgtcgccgccacattgggcgcaatacttaaccgtctcagggacaacaagggaacacctcgactaaggacaacggtgggggtcgatggctctctttacaagactcatccacaatattcaaggagattccacaagacccttcgacgtctggtgccagatagcgacgtgagattcctgctgtctgagtccggcagtggaaagggagccgcaatggtcactgccgtcgcatatcgtctggcagagcagcatcggcaaatcgaggagacacttgcacatttccacctgacgaaggacatgctccttgaagtgaaaaagcgtatgagagccgaaatggagctcggactgaggaaacagacccataataatgcggttgtgaagatgctgccatcattcgtgagaaggacacctgacggcaccgaaaacggggactttctggcactggacctggggggcacaaatttcagggtgctactggtgaagatccgcagtggcaagaagcgcacagtggaaatgcataacaagatctacgctatccctatagaaattatgcagggaacgggggaggaactcttcgaccacatagttagctgtatcagtgattttcttgactatatgggaatcaaaggcccacggatgccccttggctttaccttcagctttccatgtcagcaaactagcctggatgccgggattttaatcacttggacaaagggattcaaagcaaccgactgtgtgggccacgatgttgtcaccctcctacgcgacgctattaagagaagagaggaatttgatctggatgtcgtcgctgtggtgaacgataccgtgggaacaatgatgacttgcgcatacgaggagccgacttgtgaagtcgggctcatcgtgggtacagggtcgaatgcttgctacatggaggagatgaagaacgtagaaatggtggagggggaccagggtcaaatgtgcataaacatggagtggggagccttcggggacaatggttgcctcgatgacatacggacccactatgaccggctggtagatgagtattcacttaatgcaggcaagcagcgttacgaaaaaatgatatctggaatgtatctgggcgaaatcgtccggaacattctcattgatttcaccaaaaagggattcttatttagaggccagataagcgagacactgaagacccgcggcatctttgaaacaaaattcttgagccagatcgagtctgataggctagccttactgcaggtccgcgccatcctccagcagctggggctcaattctacatgtgacgattcaatactcgttaagacagtgtgtggggtggtttctagacgtgccgctcaattatgcggcgccggcatggcggcggtggtcgacaaaataagagagaacaggggcctagatcgcctcaacgttacggtgggtgtggatggcacgctgtacaagctgcatccgcatttctcccggattatgcatcaaactgtgaaagaattatcccccaaatgtaatgtttccttcctgctgtcagaggacggctcgggcaaaggtgccgccctcattaccgcggttggagtgcggctgagaacggaagcctccagctag

SEQ ID NO: 282841 - DNA, 2859 bp, Artificial Sequence
  derived and/or modified sequence
atgggccagatctgccagcgggagagccggcagggcctggccatgctcccccgcctctttctgaatccgtggagacaggtcattcttctcccgcagccccccaaggtattaggattgcaggccacagcagccgaaaagcccaagctgcacctgctggctgagagcgaaatcgataagtacttatacgccatgcgcctgagcgatgagaccttaatagacatcatgacgcgttttcgcaaggaaatgaagaacggcctgtctagggattttaatcctacagcgacggtgaagatgctccccactttcgtccgttccattccagatggatctgagaagggcgattttattgcgcttgacctgggaggaagttctttccggattctgcgggttcaggttaaccatgaaaaaaatcaaaatgtgcacatggaatctgaagtgtatgacacccctgagaatatcgtacacggctccggaagccaactctttgatcatgttgccgagtgtttgggggacttcatggagaagcgtaagataaaagacaagaagctgccagtgggcttcacattttccttcccttgtcagcagagtaagattgatgaggccatcctaataacctggacaaagcgctttaaagcctcgggcgtggagggagctgacgtggttaaacttctcaataaggccataaagaagagaggcgactatgacgccaatatcgtagcagtggtgaatgataccgtcggcacaatgatgacatgcggatacgatgaccagcactgcgaggtcgggttaatcatcggtactggaacgaatgcgtgctatatggaggagctgaggcacatcgacttagttgaaggggacgaaggccggatgtgtatcaataccgagtggggggcctttggcgacgatggctctttagaagacatccgtacagagtttgatagggagattgataggggctcactcaaccctggtaaacagctgttcgagaagatggtgagcggtatgtatttgggcgaactagtgcggttaatcctggtcaagatggctaaagaagggctgctgtttgagggccggataacaccggagctcctgacacgaggcaagtttaatacctccgatgtttccgctatagagaaaaataaggagggcctccacaacgctaaggagatcttgacacggctcggagtggagccaagtgatgatgactgcgtgtcggtgcagcacgtgtgcacaatcgtgagctttcgcagtgccaaccttgtcgccgctacactcggggctatcctgaatagactgcgggataataagggtactcccaggttacggacaacagtcggtgtggatggttcactgtacaagactcacccacagtatagcaggagattccacaaaaccctgcggcgactcgttccagactcagacgtccgattcctgctttcggagtccgggagtggcaagggagccgccatggtgaccgcggtcgcgtaccggctcgccgagcagcatcgacagattgaagagactctagcccactttcatctgactaaagatatgctccttgaggtcaagaaaagaatgagggctgaaatggaacttgggttgaggaaacagacccataataacgccgtggtgaaaatgcttcctagtttcgtccggaggacgccagacggaacagaaaacggggacttcctggcacttgatctggggggaacgaatttccgggttctgcttgttaagatacgaagtggtaaaaagcgcacagtcgagatgcacaacaaaatctacgctatacctatcgagattatgcagggtacaggagaggaactgtttgaccacatcgtgagctgtatctctgacttccttgattacatgggcattaaaggtccgcgcatgcccttgggcttcaccttttcgtttccctgccagcagacctctcttgacgccggtatactgattacgtggactaagggattcaaagcaactgactgcgtgggacatgatgttgtgactttgctcagggacgcaatcaagcgtcgggaggaatttgatcttgacgtggtggccgtggtcaacgatacagtgggaaccatgatgacctgtgcttatgaagagcctacctgcgaggtcggactgatcgtggggaccgggagtaacgcttgttatatggaggaaatgaaaaacgtagagatggtagagggggatcaaggtcagatgtgcattaacatggaatggggcgcatttggggacaacggttgcttggatgacattcgaacacattacgatagactggtggatgagtacagcctgaacgccggtaaacaacgctatgagaagatgatttctgggatgtatcttggtgaaatcgtacggaacatcctcatagacttcacaaaaaaggggtttctcttccggggccagatttctgaaaccctcaagacacgaggcatttttgaaaccaagtttttgtcccagatcgaatctgacaggctggcgctgttacaggtgcgagctatcctccagcagctgggtctgaactcaacctgcgacgacagcattctggtgaagaccgtatgcggagtggtgtcgagaagagcagcacaactttgtggcgccggtatggctgccgttgtagacaagattcgagagaacagagggctggataggctcaacgtgacggttggcgtagacggcacactgtataaactgcacccgcacttctcccgaatcatgcatcagacggtaaaggagctgtcacccaaatgtaacgtttccttcctgttatcagaagatggatcggggaaaggagcagccctgattacggcagttggagtgaggctgcgcactgaagcgtcctcctag

SEQ ID NO: 282842 - DNA, 420 bp, Artificial Sequence
  derived and/or modified sequence
atgggccagatctgccagcgggagagcgccaccgccgccgagaagcctaaactgcatttgctggcagagtcagagattgacaagtacctatatgccatgcggctatccgacgaaacactcatcgacattatgacccggtttcgaaaagaaatgaagaatggattaagtcgagatttcaaccccacggctaccgtcaagatgctgcctactttcgttagaagtatccctgacggctctgaaaagggcgacttcatcgctttagaccttggtggatcctcatttagaattcttcgtgtacaagtcaaccatgaaaagaaccaaaatgtgcacatggaatcagaggtgtacgatacccccgagaacatcgtgcatggatcaggcagccagctatttgaccatgtcgctgagtgcctgggatag

SEQ ID NO: 282843 - DNA, 2766 bp, Artificial Sequence
  derived and/or modified sequence
atgggccaaatctgtcagagagagagtgctacggccgcagaaaagcctaagctccaccttttggctgagagcgagatcgacaaatatctgtacgctatgagactgtccgacgagaccctgatcgacatcatgacccggttcaggaaggagatgaaaaatggtctcagccgagactttaatccaacggctacagttaagatgttaccaacttttgtgcgctcaatccccgacggaagcgagaagggggatttcatcgccctcgatctgggcggttcctcttttcggatcttgcgggttcaagtcaatcacgaaaaaaatcaaaacgtgcatatggagtctgaagtatatgacaccccagagaatatcgtacacggcagcggctctcagcttttcgatcacgtggcggagtgtctcggcgattttatggaaaaacgcaagattaaggataagaagctccctgttgggttcacatttagttttccatgtcagcaatcgaagatcgatgaagccatcctcataacatggactaaaaggtttaaggcatcaggcgtcgaaggtgccgatgtggtgaaactactgaacaaggcgatcaaaaaacgcggtgactatgacgcaaatatcgtcgctgtggtaaatgacacggtggggaccatgatgacctgtggatatgacgaccagcactgcgaggtcggccttattataggaacagggaccaacgcatgctatatggaagagctcaggcatatcgatctagtggagggagacgagggcagaatgtgtattaataccgagtggggagcttttggggacgacgggtccttagaagacattagaacggaatttgatcgcgagatcgaccgtggatccctaaatcctggtaagcagctctttgaaaaaatggtgtctggaatgtatctgggtgagctggttaggctgatactcgtcaagatggccaaggaaggcctgctgttcgagggcagaatcacccccgagctgctgactagggggaagtttaacacgtcggacgtgagcgcaattgagaaaaacaaggagggtctacacaatgcgaaggaaatcctcacccgcctgggagtggaacccagcgacgacgattgtgtgtccgtgcagcatgtctgtacaattgtgtccttcagaagcgctaacctggtggctgcgacactgggggctatccttaatcgccttagagacaacaaaggtacaccacgtttacgtacaacagtgggcgtagatggcagtctgtacaagactcatcctcagtactcaagaagattccacaagactctgcgaagactggtgcccgattcagacgtgcgtttcctgctgagtgaaagcggcagcggtaagggggcagccatggtcacagctgtcgcttaccggctggcagagcagcaccgccagattgaggagaccctggcacactttcacttgaccaaagatatgcttctcgaagtaaagaagcgcatgagggccgaaatggagctcggtcttcggaagcagacccacaataatgccgttgtcaagatgctgccttcttttgttcggagaacacccgatggtacagagaatggagactttctggcactggatctaggcggtaccaatttccgagtgcttctcgtgaagattcgcagcggcaaaaagagaaccgtggagatgcacaataaaatttatgctattccaatcgagattatgcagggaacaggcgaagagctctttgatcatatcgtaagctgtatatctgacttcttagattatatgggtattaagggcccaaggatgcctctggggttcacattctccttcccgtgccagcagactagtctggatgctggcattctcatcacttggactaagggcttcaaagcaacagattgcgtgggccatgacgtggtcactcttctgcgcgacgctatcaagagacgggaggagtttgatctcgatgttgtcgcggtggtcaatgatacagtgggtacaatgatgacgtgcgcgtacgaggagccaacttgcgaagtaggcctgattgtaggtacaggcagcaacgcctgctatatggaagagatgaaaaacgtggaaatggtggaaggcgaccaagggcagatgtgcatcaacatggaatggggcgctttcggggataacgggtgcttggacgatattagaactcactatgatcgcctcgtggatgagtatagcttaaacgccggaaagcaacgttacgagaagatgatatccggcatgtatctgggggagatagttcgcaatattctcatagacttcactaaaaaggggttcctgtttagaggtcaaatatctgaaaccctgaagaccaggggaatcttcgaaaccaaattcctgtcgcagatcgaatcggatcggctggctctgctgcaggtgcgggcaattttgcaacagctcgggctgaattccacctgcgacgattctatcctagttaaaacagtttgcggagtggtgtcaaggcgtgcagcccagctgtgtggggcaggcatggctgcagtggtggataaaattcgggaaaatcggggactagatagactcaatgtgactgtaggagtggacggaactctgtacaagctccacccccatttcagtcggatcatgcatcaaaccgtcaaggagctgtcccctaagtgcaatgtgagcttcctgttgagtgaagacggcagtggcaagggcgctgcacttataaccgccgtcggggtccggctaaggactgaggctagctcctag

SEQ ID NO: 282844 - DNA, 2859 bp, Artificial Sequence
  derived and/or modified sequence
atgggtcagatatgtcaacgagagtcacggcagggcctggctatgttgcctcggctattcctcaacccttggcgccaggtgatcctgctcccacagcctcccaaagtgctagggctgcaggcaacggctgcggagaaacccaagctacacctactggccgagagcgagatcgacaaatacctatatgccatgcggttgtcagacgagactctcatagacatcatgacacgctttcgcaaagaaatgaagaatggcttgtcacgagactttaacccaactgctactgtcaagatgctgccaactttcgttagaagcattcctgatggctcagagaaaggcgactttatagccctcgatctgggaggatcttctttccgaatcctccgagttcaggttaaccatgaaaaaaatcaaaatgtccatatggaatccgaagtttatgatacgccagaaaacatcgtacacggttctggcagccagctgttcgatcatgtagccgaatgtcttggcgattttatggaaaagcgaaagattaaggataaaaagctcccagttggattcactttctcctttccctgccagcagtcaaaaattgacgaggccatcctgatcacatggaccaagaggttcaaagcatcaggtgttgaaggcgctgatgtagtgaagctgctgaacaaagccataaagaagagaggcgattacgacgccaatatagtggcagttgtcaatgacactgttggaacaatgatgacatgcggctatgacgatcaacactgcgaggtcggcttgataatcgggaccggaacaaacgcctgctatatggaagagctaagacacatcgaccttgtagaaggagacgaggggagaatgtgcattaatacagaatggggcgctttcggcgacgacggtagcctggaggacatccgcacggagtttgaccgggaaatcgatagaggatccttaaatcctggcaaacagctctttgaaaaaatggtgtccgggatgtatttgggggagctggttcgcttaatccttgtcaaaatggctaaagaaggcctactgtttgagggacggattactcctgagctcctgaccaggggcaagtttaatacgtccgatgtgtcagccatagagaagaacaaagaagggttacataatgctaaggagatcttaactcgacttggcgtggagccgtcagatgatgattgcgtcagtgtccaacatgtgtgtaccatcgtcagttttcggtctgccaacttagtggcagcaaccctgggcgcaatcttaaaccggttgagggacaacaaggggaccccacggttgaggacaaccgtcggcgtagacggaagcctctataagacgcacccgcagtattctcggcgtttccacaagactctgcggcgactggttcccgactcagacgtacgattcttactctccgaatctgggtcaggaaaaggtgccgctatggttacagcagtggcctatcgcttggcggagcagcatagacaaatagaggaaacgctcgctcatttccaccttaccaaagacatgctgctcgaggtgaagaagcgaatgcgcgcagagatggagttgggactccgaaagcaaacccacaataacgccgttgttaagatgctcccttctttcgtcaggaggaccccagacggtaccgagaatggcgattttctggccctggaccttggaggcacgaactttcgggtcctattagttaaaatccgaagcgggaagaagcgaactgtcgaaatgcacaacaaaatatatgcaatccctatcgagataatgcaggggacaggagaagagctcttcgaccacatagtttcatgtatttcggacttcctggactatatgggcatcaagggccctagaatgcccctgggcttcacgttctccttcccatgccagcaaaccagtctcgatgcaggaatcctgatcacatggacaaaaggatttaaggctacagactgtgtgggacacgacgttgtaaccctgttgcgcgacgccatcaagagacgcgaagagtttgacctggacgtcgttgcagtggtcaacgacaccgtcggcaccatgatgacctgtgcctatgaggaacccacctgcgaggttggactcattgtaggcacaggtagtaacgcttgctatatggaagagatgaaaaatgtagaaatggtagaaggggatcaggggcagatgtgcatcaatatggagtggggggcttttggtgataacgggtgcttggacgacatacgcactcactacgacaggcttgtggatgaatactctctgaatgccggaaagcagcgctacgagaagatgatatccggtatgtatttgggtgagatcgtgaggaatatcctgatagattttacaaagaagggctttcttttccgcggacagatatctgagactcttaagacccggggaatctttgagactaagtttctgagtcagattgaatcagatcgtctggcgctgcttcaggtgagagctatcctgcaacagctaggcctgaattctacctgtgatgactccatcctggtgaagaccgtttgcggggtagtttccaggagggccgcacaactttgcggcgctggcatggccgcagttgttgataaaatccgagaaaacaggggactggaccgtttaaacgtcacagtcggagtggatggtacactgtataagctccaccctcacttcagcagaattatgcaccagaccgtgaaggagttatcgccaaagtgtaacgtgtccttcctcctgagtgaggatgggtccggcaaaggcgcagccctcattaccgctgtcggtgtgagactgagaacggaagcctccagctag

SEQ ID NO: 282845 - DNA, 420 bp, Artificial Sequence
  derived and/or modified sequence
atgggtcaaatctgccagcgcgaatccgctactgccgctgagaaaccaaaactgcaccttctagcagagtccgaaattgacaagtatttgtacgccatgcgtctctctgacgagacccttattgacataatgactcgattccgcaaagaaatgaaaaacggactctccagggacttcaatcccactgcaacagttaaaatgctacccacattcgtacgctcaattccagatggtagcgaaaagggggactttatcgctcttgatctcggcggttcttctttcagaattctgagggtccaggtcaaccatgagaaaaatcagaatgtgcacatggagagcgaggtgtatgacacgcccgagaacattgtgcacggcagtggctcacagctttttgaccatgtggccgagtgtctgggctag

SEQ ID NO: 282846 - DNA, 2766 bp, Artificial Sequence
  derived and/or modified sequence
atgggccagatctgccagagagagagcgccaccgccgccgagaagcccaagctgcacctgctggccgagagcgagatcgacaagtacctgtacgccatgagactgagcgacgagaccctgatcgacatcatgaccagattcagaaaggagatgaagaacggcctgagcagagacttcaaccccaccgccaccgtgaagatgctgcccaccttcgtgagaagcatccccgacggcagcgagaagggcgacttcatcgccctggacctgggcggcagcagcttcagaatcctgagagtgcaggtgaaccacgagaagaaccagaacgtgcacatggagagcgaggtgtacgacacccccgagaacatcgtgcacggcagcggcagccagctgttcgaccacgtggccgagtgcctgggcgacttcatggagaagagaaagatcaaggacaagaagctgcccgtgggcttcaccttcagcttcccctgccagcagagcaagatcgacgaggccatcctgatcacctggaccaagagattcaaggccagcggcgtggagggcgccgacgtggtgaagctgctgaacaaggccatcaagaagagaggcgactacgacgccaacatcgtggccgtggtgaacgacaccgtgggcaccatgatgacctgcggctacgacgaccagcactgcgaggtgggcctgatcatcggcaccggcaccaacgcctgctacatggaggagctgagacacatcgacctggtggagggcgacgagggcagaatgtgcatcaacaccgagtggggcgccttcggcgacgacggcagcctggaggacatcagaaccgagttcgacagagagatcgacagaggcagcctgaaccccggcaagcagctgttcgagaagatggtgagcggcatgtacctgggcgagctggtgagactgatcctggtgaagatggccaaggagggcctgctgttcgagggcagaatcacccccgagctgctgaccagaggcaagttcaacaccagcgacgtgagcgccatcgagaagaacaaggagggcctgcacaacgccaaggagatcctgaccagactgggcgtggagcccagcgacgacgactgcgtgagcgtgcagcacgtgtgcaccatcgtgagcttcagaagcgccaacctggtggccgccaccctgggcgccatcctgaacagactgagagacaacaagggcacccccagactgagaaccaccgtgggcgtggacggcagcctgtacaagacccacccccagtacagcagaagattccacaagaccctgagaagactggtgcccgacagcgacgtgagattcctgctgagcgagagcggcagcggcaagggcgccgccatggtgaccgccgtggcctacagactggccgagcagcacagacagatcgaggagaccctggcccacttccacctgaccaaggacatgctgctggaggtgaagaagagaatgagagccgagatggagctgggcctgagaaagcagacccacaacaacgccgtggtgaagatgctgcccagcttcgtgagaagaacccccgacggcaccgagaacggcgacttcctggccctggacctgggcggcaccaacttcagagtgctgctggtgaagatcagaagcggcaagaagagaaccgtggagatgcacaacaagatctacgccatccccatcgagatcatgcagggcaccggcgaggagctgttcgaccacatcgtgagctgcatcagcgacttcctggactacatgggcatcaagggccccagaatgcccctgggcttcaccttcagcttcccctgccagcagaccagcctggacgccggcatcctgatcacctggaccaagggcttcaaggccaccgactgcgtgggccacgacgtggtgaccctgctgagagacgccatcaagagaagagaggagttcgacctggacgtggtggccgtggtgaacgacaccgtgggcaccatgatgacctgcgcctacgaggagcccacctgcgaggtgggcctgatcgtgggcaccggcagcaacgcctgctacatggaggagatgaagaacgtggagatggtggagggcgaccagggccagatgtgcatcaacatggagtggggcgccttcggcgacaacggctgcctggacgacatcagaacccactacgacagactggtggacgagtacagcctgaacgccggcaagcagagatacgagaagatgatcagcggcatgtacctgggcgagatcgtgagaaacatcctgatcgacttcaccaagaagggcttcctgttcagaggccagatcagcgagaccctgaagaccagaggcatcttcgagaccaagttcctgagccagatcgagagcgacagactggccctgctgcaggtgagagccatcctgcagcagctgggcctgaacagcacctgcgacgacagcatcctggtgaagaccgtgtgcggcgtggtgagcagaagagccgcccagctgtgcggcgccggcatggccgccgtggtggacaagatcagagagaacagaggcctggacagactgaacgtgaccgtgggcgtggacggcaccctgtacaagctgcacccccacttcagcagaatcatgcaccagaccgtgaaggagctgagccccaagtgcaacgtgagcttcctgctgagcgaggacggcagcggcaagggcgccgccctgatcaccgccgtgggcgtgagactgagaaccgaggccagcagctag

SEQ ID NO: 282847 - DNA, 2859 bp, Artificial Sequence
  derived and/or modified sequence
atgggccagatctgccagagagagagcagacagggcctggccatgctgcccagactgttcctgaacccctggagacaggtgatcctgctgccccagccccccaaggtgctgggcctgcaggccaccgccgccgagaagcccaagctgcacctgctggccgagagcgagatcgacaagtacctgtacgccatgagactgagcgacgagaccctgatcgacatcatgaccagattcagaaaggagatgaagaacggcctgagcagagacttcaaccccaccgccaccgtgaagatgctgcccaccttcgtgagaagcatccccgacggcagcgagaagggcgacttcatcgccctggacctgggcggcagcagcttcagaatcctgagagtgcaggtgaaccacgagaagaaccagaacgtgcacatggagagcgaggtgtacgacacccccgagaacatcgtgcacggcagcggcagccagctgttcgaccacgtggccgagtgcctgggcgacttcatggagaagagaaagatcaaggacaagaagctgcccgtgggcttcaccttcagcttcccctgccagcagagcaagatcgacgaggccatcctgatcacctggaccaagagattcaaggccagcggcgtggagggcgccgacgtggtgaagctgctgaacaaggccatcaagaagagaggcgactacgacgccaacatcgtggccgtggtgaacgacaccgtgggcaccatgatgacctgcggctacgacgaccagcactgcgaggtgggcctgatcatcggcaccggcaccaacgcctgctacatggaggagctgagacacatcgacctggtggagggcgacgagggcagaatgtgcatcaacaccgagtggggcgccttcggcgacgacggcagcctggaggacatcagaaccgagttcgacagagagatcgacagaggcagcctgaaccccggcaagcagctgttcgagaagatggtgagcggcatgtacctgggcgagctggtgagactgatcctggtgaagatggccaaggagggcctgctgttcgagggcagaatcacccccgagctgctgaccagaggcaagttcaacaccagcgacgtgagcgccatcgagaagaacaaggagggcctgcacaacgccaaggagatcctgaccagactgggcgtggagcccagcgacgacgactgcgtgagcgtgcagcacgtgtgcaccatcgtgagcttcagaagcgccaacctggtggccgccaccctgggcgccatcctgaacagactgagagacaacaagggcacccccagactgagaaccaccgtgggcgtggacggcagcctgtacaagacccacccccagtacagcagaagattccacaagaccctgagaagactggtgcccgacagcgacgtgagattcctgctgagcgagagcggcagcggcaagggcgccgccatggtgaccgccgtggcctacagactggccgagcagcacagacagatcgaggagaccctggcccacttccacctgaccaaggacatgctgctggaggtgaagaagagaatgagagccgagatggagctgggcctgagaaagcagacccacaacaacgccgtggtgaagatgctgcccagcttcgtgagaagaacccccgacggcaccgagaacggcgacttcctggccctggacctgggcggcaccaacttcagagtgctgctggtgaagatcagaagcggcaagaagagaaccgtggagatgcacaacaagatctacgccatccccatcgagatcatgcagggcaccggcgaggagctgttcgaccacatcgtgagctgcatcagcgacttcctggactacatgggcatcaagggccccagaatgcccctgggcttcaccttcagcttcccctgccagcagaccagcctggacgccggcatcctgatcacctggaccaagggcttcaaggccaccgactgcgtgggccacgacgtggtgaccctgctgagagacgccatcaagagaagagaggagttcgacctggacgtggtggccgtggtgaacgacaccgtgggcaccatgatgacctgcgcctacgaggagcccacctgcgaggtgggcctgatcgtgggcaccggcagcaacgcctgctacatggaggagatgaagaacgtggagatggtggagggcgaccagggccagatgtgcatcaacatggagtggggcgccttcggcgacaacggctgcctggacgacatcagaacccactacgacagactggtggacgagtacagcctgaacgccggcaagcagagatacgagaagatgatcagcggcatgtacctgggcgagatcgtgagaaacatcctgatcgacttcaccaagaagggcttcctgttcagaggccagatcagcgagaccctgaagaccagaggcatcttcgagaccaagttcctgagccagatcgagagcgacagactggccctgctgcaggtgagagccatcctgcagcagctgggcctgaacagcacctgcgacgacagcatcctggtgaagaccgtgtgcggcgtggtgagcagaagagccgcccagctgtgcggcgccggcatggccgccgtggtggacaagatcagagagaacagaggcctggacagactgaacgtgaccgtgggcgtggacggcaccctgtacaagctgcacccccacttcagcagaatcatgcaccagaccgtgaaggagctgagccccaagtgcaacgtgagcttcctgctgagcgaggacggcagcggcaagggcgccgccctgatcaccgccgtgggcgtgagactgagaaccgaggccagcagctag

SEQ ID NO: 282848 - DNA, 420 bp, Artificial Sequence
  derived and/or modified sequence
atgggccagatctgccagagagagagcgccaccgccgccgagaagcccaagctgcacctgctggccgagagcgagatcgacaagtacctgtacgccatgagactgagcgacgagaccctgatcgacatcatgaccagattcagaaaggagatgaagaacggcctgagcagagacttcaaccccaccgccaccgtgaagatgctgcccaccttcgtgagaagcatccccgacggcagcgagaagggcgacttcatcgccctggacctgggcggcagcagcttcagaatcctgagagtgcaggtgaaccacgagaagaaccagaacgtgcacatggagagcgaggtgtacgacacccccgagaacatcgtgcacggcagcggcagccagctgttcgaccacgtggccgagtgcctgggctag

SEQ ID NO: 282849 - DNA, 1467 bp, Artificial Sequence
  derived and/or modified sequence
atgagctatccaggctaccccccgactgggtaccctccattccctggctacccacccgcagggcaagaatctagcttcccgccaagtgggcagtatccttatccttccggttttcccccaatgggaggaggcgcctacccacaagtgccgagctcaggctatccaggggcgggcggttatcccgctccaggcgggtatcctgccccaggcggctatcccggcgctcctcagcctggtggcgccccatcctaccctggcgtaccacccggacaggggtttggtgtcccgcctggcggtgcaggattttcaggctatcctcaacccccttcacaaagctacggcgggggaccagcccaagtccctctccctggaggattcccgggggggcagatgcctagccagtacccaggcggtcagcccacctatcctagtcagattaacactgacagtttctcatcgtatcctgtgttctcacccgtgtcactcgattatagcagcgaacccgcaaccgtcacgcaagtgacccagggaacgattcggcctgcagcaaactttgatgctatcagagatgccgagatcctgcgcaaagctatgaagggctttggcaccgatgaacaggccatagtggatgtcgtcgcaaacagatctaatgaccagaggcagaagataaaggccgcttttaagacctcatatgggaaagatctcatcaaagacttaaagagcgagctgtcgggaaacatggaggagttaattctggcactgttcatgccccccacttactacgacgcatggtccttacggaaagccatgcaaggagctgggactcaggaacgcgtgttgatcgagatcctctgtaccagaactaaccaggagataagagagatcgtgagatgttatcaatcagagtttggacgcgacttggaaaaggacattaggtctgacacgtcaggccacttcgaacgcctcctcgtgagtatgtgtcagggtaatagggacgagaaccagtctataaaccatcaaatggcacaggaggatgcccagcgactatatcaagccggtgagggtagacttgggacggacgaatcatgttttaacatgatactagctacgcggtccttccctcaactccgtgccacaatggaggcctactctaggatggcaaaccgtgatctcctgagttctgtgtccagagaattcagtggatatgtggagtcaggattgaagaccatcctgcagtgcgcgttgaacaggcctgcctttttcgcggaacgcctgtactacgctatgaagggagcagggactgacgacagcaccctcgtacgaatagtggtcactcggtccgaaatagatctcgtccagatcaagcagatgttcgcacagatgtaccaaaaaaccctgggaaccatgatcgccggcgacacctccggcgattacagaaggctactgttagctattgtaggccagtag

SEQ ID NO: 282850 - DNA, 1467 bp, Artificial Sequence
  derived and/or modified sequence
atgagctacccaggctacccacccaccggctacccacccttccctggctaccccccagctggccaggagagcagcttccccccatctggccagtacccctaccccagcggcttcccccccatgggcggcggggcctacccccaggtgcccagcagcggctacccaggagctgggggctacccagcccctgggggctacccagcccctgggggctacccaggggccccccagcccggcggggcccccagctacccaggagtgcccccaggccagggctttggagtgcccccaggaggagctggcttcagcggctacccccagccccccagccagagctatggaggcggccctgcccaggtgcccctgcccggcggcttccctgggggccagatgcccagccagtacccaggcggccagcccacctaccccagccagatcaacacagacagcttcagcagctaccctgtgttcagccctgtgtccctggactacagcagcgagcccgccaccgtgacccaggtgacccagggcaccatccggcctgctgccaactttgatgccatcagagatgctgagatcctgaggaaggccatgaagggctttggaacagatgagcaggccatcgtggatgtggtggccaacagaagcaatgaccagaggcagaagatcaaggccgccttcaagaccagctatggcaaggacctgatcaaggacctgaagtctgagctgagcggcaacatggaggagctgatcctggccctcttcatgccacccacctactatgatgcctggagcctgaggaaggccatgcagggcgccggcacccaggagcgggtgctgattgagatcctgtgcaccaggaccaaccaggagatccgggagatcgtgcgctgctaccagagcgagtttggccgggacctggagaaggacatccgcagtgacaccagcggccactttgagcggctgctggtgtccatgtgccagggcaacagagatgagaaccagagcatcaaccaccagatggcccaggaggatgcccagaggctgtaccaggccggggagggccgcctgggcacagatgagagctgcttcaacatgatcctggccaccaggagcttcccccagctgcgggccaccatggaggcctacagcaggatggccaacagagacctgctgagctctgtgtcccgggagttcagcggctacgtggagagcggcctgaagaccatcctgcagtgtgccctgaacagacctgccttctttgctgagcggctgtactatgccatgaagggggccggcacagatgacagcaccctggtgcgcatcgtggtgaccaggagtgaaattgacctggtgcagatcaagcagatgtttgcccagatgtaccagaagaccctgggcaccatgattgctggggacaccagcggggactacagaaggctgctgctggccatcgtgggccagtag

SEQ ID NO: 282851 - DNA, 1467 bp, Artificial Sequence
  derived and/or modified sequence
atgagctaccccggctacccccccaccggctacccccccttccccggctatccccccgcagggcaggagtcaagctttcccccctctggacagtatccttatccaagtgggtttcctcccatgggaggcggcgcatatcctcaggtaccatcctcagggtaccctggagccggaggctaccctgccccgggggggtaccctgcgcccggcggctatcctggggcaccacagcctggcggagctccatcatatcctggcgtcccgccaggacagggctttggagtaccaccgggaggcgccggcttttccggttacccacaaccgccttcgcaatcctacggaggtggtccagctcaggtacccttacctggtggcttcccgggcggccagatgccatcccagtacccaggaggacagcctacctacccatcccagataaacaccgactctttttcaagctatcccgtgttctctcctgtgagcctggactatagtagcgaaccagctaccgtaacacaggtcacacaggggacaatccgcccagctgctaactttgatgcaatcagagacgcggaaatcctgagaaaggctatgaaaggatttggcacagatgagcaggctattgtagacgttgtcgcaaaccggagtaacgatcagaggcaaaaaatcaaggccgccttcaaaacgagctacggtaaggatctaattaaagatctgaagtccgagctgtccggaaacatggaggagctcatccttgccctttttatgccacccacatactatgacgcctggtccctccgtaaggctatgcagggcgctggtacgcaggaacgcgtgttgatcgagatcttgtgcaccagaactaatcaagagattagagaaattgtgcggtgctatcagtctgagttcgggagggatctggagaaagacatccggtcagacactagcgggcattttgaacgactcctggtgagcatgtgccaggggaaccgagacgaaaaccaaagtattaatcatcagatggcacaggaggatgcacagcgtctgtaccaggccggggaaggacgcctgggcactgatgaaagttgttttaatatgatcctggctactcgatcttttccacagctaagggctacaatggaggcatacagcaggatggctaaccgtgacctcctttccagcgtgagtagggagtttagcgggtacgttgaaagcggcctgaagaccattctgcagtgcgctctgaacagacccgccttctttgccgaaaggttatactatgccatgaagggggcgggaacggatgacagcactcttgtacgtattgtggttacccgctctgaaatcgatcttgtgcagatcaagcagatgttcgcccagatgtatcagaagaccctaggcactatgattgctggcgacacttcaggcgattaccgacgacttctactcgccatcgtgggccaatag

SEQ ID NO: 282852 - DNA, 2174 bp, Artificial Sequence
  derived and/or modified sequence
cccggctccatcttgcgggagaccgggttgggctgtgacgctgctgctggggtcagaatgtcatacccaggctatcccccaacaggctacccacctttccctggatatcctcctgcaggtcaggagtcatcttttcccccttctggtcagtatccttatcctagtggctttcctccaatgggaggaggtgcctacccacaagtgccaagtagtggctacccaggagctggaggctaccctgcgcctggaggttatccagcccctggaggctatcctggtgccccacagccagggggagctccatcctatcccggagttcctccaggccaaggatttggagtcccaccaggtggagcaggcttttctgggtatccacagccaccttcacagtcttatggaggtggtccagcacaggttccactacctggtggctttcctggaggacagatgccttctcagtatcctggaggacaacctacttaccctagtcagatcaatacagattctttttcttcctatcctgttttctctcctgtttctttggattatagcagtgaacctgccacagtgactcaggtcactcaaggaactatccgaccagctgccaacttcgatgctataagagatgcagaaattcttcgtaaggcaatgaagggttttgggacagatgagcaggcaattgtggatgtggtggccaaccgttccaatgatcagaggcaaaaaattaaagcagcatttaagacctcctatggcaaggatttaatcaaagatctcaaatcagagttaagtggaaatatggaagaactgatcctggccctcttcatgcctcctacgtattacgatgcctggagcttacggaaagcaatgcagggagcaggaactcaggaacgtgtattgattgagattttgtgcacaagaacaaatcaggaaatccgagaaattgtcagatgttatcagtcagaatttggacgagaccttgaaaaggacattaggtcagatacatcaggacattttgaacgtttacttgtgtccatgtgccagggaaatcgtgatgagaaccagagtataaaccaccaaatggctcaggaagatgctcagcgtctctatcaagctggtgaggggagactagggaccgatgaatcttgctttaacatgatccttgccacaagaagctttcctcagctgagagctaccatggaggcttattctaggatggctaatcgagacttgttaagcagtgtgagccgtgagttttccggatatgtagaaagtggtttgaagaccatcttgcagtgtgccctgaaccgccctgccttctttgctgagaggctctactatgctatgaaaggtgctggcacagatgactccaccctggtccggattgtggtcactcgaagtgagattgaccttgtacaaataaaacagatgttcgctcagatgtatcagaagactctgggcacaatgattgcaggtgacacgagtggagattaccgaagacttcttctggctattgtgggccagtaggagggatttttttttttttaatgaaaaaaaatttctattcatagcttatccttcagagcaatgacctgcatgcagcaatatcaaacatcagctaaccgaaagagctttctgtcaaggaccgtatcagggtaatgtgcttggtttgcacatgttgttattgccttaattctaattttattttgttctctacatacaatcaatgtaaagccatatcacaatgatacagtaatattgcaatgtttgtaaaccttcattcttactagtttcattctaatcaagatgtcaaattgaataaaaatcacagcaatctctgattctgtgtaataatattgaataattttttagaaggttactgaaagctctgccttccggaatccctctaagtctgcttgatagagtggatagtgtgttaaaactgtgtactttaaaaaaaaattcaacctttacatctagaataatttgcatctcattttgcctaaattggttctgtattcataaacactttccacatagaaaatagattagtattacctgtggcaccttttaagaaagggtcaaatgtttatatgcttaagatacatagcctacttttttttcgcagttgttttctttttttaaattgagttatgacaaataaaaaattgcatata

SEQ ID NO: 282853 - DNA, 1467 bp, Artificial Sequence
  derived and/or modified sequence
atgagttaccctgggtacccaccaaccggataccccccatttccgggttatccacccgctggccaggagagttcctttccaccctccggtcagtacccatatcctagtggattccctccaatgggagggggagcctatccacaagtgccctcctccgggtacccaggagccggaggctaccctgcaccagggggatacccagctccgggaggctacccgggagcacctcagccaggcggtgcacctagctatcctggagttcccccaggacagggattcggggtgccaccgggtggcgctggattctcagggtatccccagcccccatctcagagctatggcggtgggccagctcaggtgcctctgccaggaggcttccctggtggccagatgccatctcaatatccaggtggccagccgacctatccttcccagatcaacaccgattcttttagttcttacccagtgttcagtccggtgtctctggattatagcagcgagccagccaccgttactcaggttacacaaggaactattcggcctgcagccaatttcgatgccatccgggatgccgaaattctgcggaaggccatgaaggggtttggtacggatgaacaagccatcgttgacgtggtggccaaccggtccaacgaccagcgccaaaaaattaaagcggcatttaagacgtcgtatgggaaagacctcataaaggacctgaagagtgaattgagcggcaacatggaggagctgatcctggcactgtttatgcccccaacctattatgacgcctggtccctgaggaaagctatgcagggcgcaggcactcaggagagagtgctcatcgagatcttatgcacaagaacaaaccaggaaatccgtgagattgtaaggtgttaccagagcgagttcggccgtgaccttgagaaggacataaggtctgacacatctggtcacttcgagagactgctcgttagtatgtgccaggggaatcgggacgaaaaccaaagcataaatcaccagatggctcaagaggacgctcagcgcctgtatcaggctggtgagggaaggctcggcactgatgagagctgtttcaacatgattctggccaccaggtcatttccccagctcagggcaacgatggaagcttactctcggatggccaaccgggatttgctgtcaagtgttagcagggaattctcaggttacgtcgaatcgggccttaagacaattttgcagtgcgcgctgaacagacctgcgtttttcgcagaaagactctactacgccatgaagggtgcaggaacagatgactccactctggtgcgcattgttgtgacccggtctgagatcgacctggtgcaaatcaagcagatgttcgcacagatgtaccagaagacactgggcaccatgattgccggagacacaagcggcgactacaggcgccttcttttagcaatcgtggggcagtag

SEQ ID NO: 282854 - DNA, 1467 bp, Artificial Sequence
  derived and/or modified sequence
atgagctaccccggctacccccccaccggctacccccccttccccggctacccccccgccggccaggagagcagcttcccccccagcggccagtacccctaccccagcggcttcccccccatgggcggcggcgcctacccccaggtgcccagcagcggctaccccggcgccggcggctaccccgcccccggcggctaccccgcccccggcggctaccccggcgccccccagcccggcggcgcccccagctaccccggcgtgccccccggccagggcttcggcgtgccccccggcggcgccggcttcagcggctacccccagccccccagccagagctacggcggcggccccgcccaggtgcccctgcccggcggcttccccggcggccagatgcccagccagtaccccggcggccagcccacctaccccagccagatcaacaccgacagcttcagcagctaccccgtgttcagccccgtgagcctggactacagcagcgagcccgccaccgtgacccaggtgacccagggcaccatcagacccgccgccaacttcgacgccatcagagacgccgagatcctgagaaaggccatgaagggcttcggcaccgacgagcaggccatcgtggacgtggtggccaacagaagcaacgaccagagacagaagatcaaggccgccttcaagaccagctacggcaaggacctgatcaaggacctgaagagcgagctgagcggcaacatggaggagctgatcctggccctgttcatgccccccacctactacgacgcctggagcctgagaaaggccatgcagggcgccggcacccaggagagagtgctgatcgagatcctgtgcaccagaaccaaccaggagatcagagagatcgtgagatgctaccagagcgagttcggcagagacctggagaaggacatcagaagcgacaccagcggccacttcgagagactgctggtgagcatgtgccagggcaacagagacgagaaccagagcatcaaccaccagatggcccaggaggacgcccagagactgtaccaggccggcgagggcagactgggcaccgacgagagctgcttcaacatgatcctggccaccagaagcttcccccagctgagagccaccatggaggcctacagcagaatggccaacagagacctgctgagcagcgtgagcagagagttcagcggctacgtggagagcggcctgaagaccatcctgcagtgcgccctgaacagacccgccttcttcgccgagagactgtactacgccatgaagggcgccggcaccgacgacagcaccctggtgagaatcgtggtgaccagaagcgagatcgacctggtgcagatcaagcagatgttcgcccagatgtaccagaagaccctgggcaccatgatcgccggcgacaccagcggcgactacagaagactgctgctggccatcgtgggccagtag

SEQ ID NO: 282855 - DNA, 1401 bp, Artificial Sequence
  derived and/or modified sequence
atgagctatcctggctacccaccgacgggatacccaccgttccccggttaccctcccgcaggtcaagagtccagttttccaccctctggccaatacccatacccctccggatttccacctatgggagggggcgcttaccctcaggttcccagtagtggctatccaggcgcagggggataccctgccccaggtggttatccagcccccggcggctaccccggcgctccacagccgggcggtgcccccagctacccaggcgttcctcccggccaagggtttggcgtcccccctggcggcgctggtttctccgggtaccctcagccaccttctcagtcctatggtggcgggcctgctcaggtgccactgccgggcggttttcccggaggtcagatgccctctcaatatccgggtggtcagcctacctacccaagccagccagcgaccgtcacacaagtcacccaggggaccatcaggcctgctgcaaactttgatgccattcgagacgcggaaatattgaggaaggctatgaaaggcttcggcactgacgagcaagccatagtggatgttgtggccaatagatctaacgaccaacgccaaaagattaaagctgccttcaaaacttcgtacgggaaagatcttataaaagatctgaaaagcgagctgtcgggcaacatggaggagctcatcttggctctattcatgccaccaacgtactacgacgcttggtccctacgcaaagccatgcagggtgccggcacacaagaacgtgtcctgatcgaaatcctgtgcacccggactaatcaagaaatacgggagattgtgcggtgctatcagtcggaattcggccgagacctggaaaaagacatccgctctgatacaagtggccactttgaaaggctgctcgtgtctatgtgtcaggggaacagggacgagaaccagagcatcaatcaccagatggcacaggaggatgcccagcgtctgtatcaggcgggtgagggaagattgggaaccgacgagagctgcttcaacatgatccttgctactcgcagcttcccacagctgcgagcaaccatggaagcatactcacgcatggctaatcgcgatcttctctccagcgtgtcccgagaattcagcggatatgtagagtccggtctgaaaacgattcttcagtgtgctcttaaccgcccagcttttttcgcagagaggttgtattacgctatgaaaggagctggaaccgacgattctacactggtaagaatcgttgtgacacgctccgagatcgacctcgtccagattaagcagatgtttgcgcagatgtaccagaagaccttgggaacgatgattgctggtgacacatcaggagattatagacggctgctgctggcaattgtggggcaatag

SEQ ID NO: 282856 - DNA, 1011 bp, Artificial Sequence
  derived and/or modified sequence
atgcccagtcagtaccctggtgggcagcctacctatccttctcaacctgctaccgtcacccaggtcacacaaggcaccatcagacctgccgcaaactttgacgcaattcgggatgccgaaatcttgaggaaggctatgaagggctttggtacagacgagcaagccatcgtagatgtagtagccaatcgctctaatgatcagcggcaaaaaattaaagctgccttcaagacctcctatggcaaagacctcattaaggatctgaagtctgaactgtctggaaatatggaagagctaatcctcgcactgttcatgccccctacgtattacgacgcatggagcttgagaaaagctatgcagggggcggggacccaagaaagagtgttgatcgaaattctctgcactcgtaccaaccaggaaattagggaaattgtcaggtgttaccaaagcgagtttggtagggaccttgaaaaagatattcgctccgatacctcaggacatttcgagcggctccttgtcagcatgtgtcaagggaaccgcgacgagaaccagagtattaaccatcagatggcccaagaggatgcacagcggctttaccaagcaggagaaggtaggctgggcactgatgaatcgtgttttaatatgattctcgccacacgctcctttccccaactgcgcgccaccatggaagcatacagtcgtatggccaaccgggacctcctgagctccgttagcagagaattctccgggtatgtggaatccggattaaagacaatacttcagtgcgccctcaacaggccagccttcttcgccgaaaggctctattacgctatgaaaggcgctggcacggatgactcaactctcgtgcgcatcgttgtgactaggtccgaaatagatttggtacaaattaaacagatgtttgctcagatgtaccagaaaactctggggaccatgatcgcaggggacacttccggagactatcgccgactcctcttggcaattgtgggccagtag

SEQ ID NO: 282857 - DNA, 1401 bp, Artificial Sequence
  derived and/or modified sequence
atgagctacccaggctacccacccaccggctacccacccttccctggctaccccccagctggccaggagagcagcttccccccatctggccagtacccctaccccagcggcttcccccccatgggcggcggggcctacccccaggtgcccagcagcggctacccaggagctgggggctacccagcccctgggggctacccagcccctgggggctacccaggggccccccagcccggcggggcccccagctacccaggagtgcccccaggccagggctttggagtgcccccaggaggagctggcttcagcggctacccccagccccccagccagagctatggaggcggccctgcccaggtgcccctgcccggcggcttccctgggggccagatgcccagccagtacccaggcggccagcccacctaccccagccagcctgccaccgtgacccaggtgacccagggcaccatccggcctgctgccaactttgatgccatcagagatgctgagatcctgaggaaggccatgaagggctttggaacagatgagcaggccatcgtggatgtggtggccaacagaagcaatgaccagaggcagaagatcaaggccgccttcaagaccagctatggcaaggacctgatcaaggacctgaagtctgagctgagcggcaacatggaggagctgatcctggccctcttcatgccacccacctactatgatgcctggagcctgaggaaggccatgcagggcgccggcacccaggagcgggtgctgattgagatcctgtgcaccaggaccaaccaggagatccgggagatcgtgcgctgctaccagagcgagtttggccgggacctggagaaggacatccgcagtgacaccagcggccactttgagcggctgctggtgtccatgtgccagggcaacagagatgagaaccagagcatcaaccaccagatggcccaggaggatgcccagaggctgtaccaggccggggagggccgcctgggcacagatgagagctgcttcaacatgatcctggccaccaggagcttcccccagctgcgggccaccatggaggcctacagcaggatggccaacagagacctgctgagctctgtgtcccgggagttcagcggctacgtggagagcggcctgaagaccatcctgcagtgtgccctgaacagacctgccttctttgctgagcggctgtactatgccatgaagggggccggcacagatgacagcaccctggtgcgcatcgtggtgaccaggagtgaaattgacctggtgcagatcaagcagatgtttgcccagatgtaccagaagaccctgggcaccatgattgctggggacaccagcggggactacagaaggctgctgctggccatcgtgggccagtag

SEQ ID NO: 282858 - DNA, 1011 bp, Artificial Sequence
  derived and/or modified sequence
atgcccagccagtacccaggcggccagcccacctaccccagccagcctgccaccgtgacccaggtgacccagggcaccatccggcctgctgccaactttgatgccatcagagatgctgagatcctgaggaaggccatgaagggctttggaacagatgagcaggccatcgtggatgtggtggccaacagaagcaatgaccagaggcagaagatcaaggccgccttcaagaccagctatggcaaggacctgatcaaggacctgaagtctgagctgagcggcaacatggaggagctgatcctggccctcttcatgccacccacctactatgatgcctggagcctgaggaaggccatgcagggcgccggcacccaggagcgggtgctgattgagatcctgtgcaccaggaccaaccaggagatccgggagatcgtgcgctgctaccagagcgagtttggccgggacctggagaaggacatccgcagtgacaccagcggccactttgagcggctgctggtgtccatgtgccagggcaacagagatgagaaccagagcatcaaccaccagatggcccaggaggatgcccagaggctgtaccaggccggggagggccgcctgggcacagatgagagctgcttcaacatgatcctggccaccaggagcttcccccagctgcgggccaccatggaggcctacagcaggatggccaacagagacctgctgagctctgtgtcccgggagttcagcggctacgtggagagcggcctgaagaccatcctgcagtgtgccctgaacagacctgccttctttgctgagcggctgtactatgccatgaagggggccggcacagatgacagcaccctggtgcgcatcgtggtgaccaggagtgaaattgacctggtgcagatcaagcagatgtttgcccagatgtaccagaagaccctgggcaccatgattgctggggacaccagcggggactacagaaggctgctgctggccatcgtgggccagtag

SEQ ID NO: 282859 - DNA, 1401 bp, Artificial Sequence
  derived and/or modified sequence
atgagctaccccggctacccccccaccggctacccccccttccccggatacccacccgccgggcaggagtcctcattccctccctccgggcagtatccatacccctcaggatttcctcctatgggagggggcgcttacccgcaggtgcccagttccggttaccctggtgcagggggatatcctgccccaggcggttatcctgcacctggaggatatccgggggctccccagcccggcggcgctccgtcctaccccggtgtgccccccgggcaggggttcggagtgcccccagggggtgccggttttagcggatatccacagccaccaagtcagagctatggaggcggacccgcccaagttcccctgcccggcggtttcccgggaggtcagatgcctagccaatatccagggggccagcctacgtatcccagccagcccgctaccgttactcaggtcacacagggcactataagacccgcagccaattttgacgccatccgcgatgcagaaatcctcagaaaagcaatgaaaggatttggcacggatgaacaggctatagtagacgtagtagctaataggagtaatgaccagaggcagaagatcaaagcagcattcaaaacttcctatgggaaagatctcatcaaagatctcaagagcgaattgtctggcaatatggaagagcttattctggctttgttcatgcctcctacttattacgacgcgtggtccttgcggaaagcaatgcaaggagcaggtacgcaagaacgcgtgctgattgaaattctttgcacacgcaccaaccaggagatccgcgaaattgtgcgatgctaccagtccgaattcggccgagatttagagaaagacatcagatccgacacaagcgggcattttgagcgccttctggtatctatgtgtcaaggaaaccgcgacgagaatcagtcgataaatcaccaaatggcccaggaggacgcacagagattgtaccaggcaggtgaaggacgactggggacagatgaatcttgtttcaacatgatcctggctaccaggtccttcccccaactaagggccactatggaagcttattcccggatggcaaatagagacctcctgtcatcggtgtcgcgcgagttctccggatacgttgaatctggactgaaaaccatactgcagtgcgcacttaaccgacccgccttcttcgcagagcgcctgtactatgccatgaagggtgccggcactgatgatagtaccctggtgaggatcgtcgtgacacgaagcgagattgacctcgttcaaatcaaacagatgtttgcccagatgtaccagaagaccttggggacgatgattgctggtgacacctccggagactaccggaggctcctactggctatcgtaggccagtag

SEQ ID NO: 282860 - DNA, 1011 bp, Artificial Sequence
  derived and/or modified sequence
atgcccagccagtaccccggcggccagcccacctaccccagccagccagctacagtcacccaggtgacacaggggacaattcggccagcagcaaacttcgacgccattcgtgacgccgagattttgagaaaagccatgaaaggctttgggactgatgagcaagcaattgtcgatgtcgtagcaaaccgcagcaatgatcagagacagaagataaaggcagcattcaagaccagttacggaaaggacctgatcaaagacttgaaatccgaactgagcggcaatatggaggagctcatcctggccttgtttatgcccccaacgtattacgacgcttggtccctacggaaggccatgcaaggggctgggacgcaagagagggttttgatagaaatcctgtgcacccgaacaaaccaagagattcgagaaatagtgagatgttatcagtctgaattcggcagggacctggagaaggatatccggtccgacacaagtgggcactttgaacgactgttagtaagcatgtgccagggaaaccgagatgagaatcagagtattaatcaccagatggcccaggaggacgcccagaggctctaccaggccggggagggtaggctgggcaccgatgaaagctgtttcaacatgatcctcgcgacacggtcatttccgcagttgcgagcaactatggaggcttatagccgcatggcaaatcgagacctgctgtcttctgtatcacgggagttcagcggctatgtggagagcgggctgaaaaccattctgcagtgtgcgcttaaccgtcccgcattcttcgccgagcgcctgtactacgctatgaagggtgccggcacagacgatagcacactggtacgcattgtggtcacgcggagcgaaattgacctggtacagattaagcagatgtttgctcaaatgtaccagaaaacactgggaacaatgattgcaggagatacaagtggtgattaccggcggctcctcctagcaattgttgggcagtag

SEQ ID NO: 282861 - DNA, 2108 bp, Artificial Sequence
  derived and/or modified sequence
cccggctccatcttgcgggagaccgggttgggctgtgacgctgctgctggggtcagaatgtcatacccaggctatcccccaacaggctacccacctttccctggatatcctcctgcaggtcaggagtcatcttttcccccttctggtcagtatccttatcctagtggctttcctccaatgggaggaggtgcctacccacaagtgccaagtagtggctacccaggagctggaggctaccctgcgcctggaggttatccagcccctggaggctatcctggtgccccacagccagggggagctccatcctatcccggagttcctccaggccaaggatttggagtcccaccaggtggagcaggcttttctgggtatccacagccaccttcacagtcttatggaggtggtccagcacaggttccactacctggtggctttcctggaggacagatgccttctcagtatcctggaggacaacctacttaccctagtcagcctgccacagtgactcaggtcactcaaggaactatccgaccagctgccaacttcgatgctataagagatgcagaaattcttcgtaaggcaatgaagggttttgggacagatgagcaggcaattgtggatgtggtggccaaccgttccaatgatcagaggcaaaaaattaaagcagcatttaagacctcctatggcaaggatttaatcaaagatctcaaatcagagttaagtggaaatatggaagaactgatcctggccctcttcatgcctcctacgtattacgatgcctggagcttacggaaagcaatgcagggagcaggaactcaggaacgtgtattgattgagattttgtgcacaagaacaaatcaggaaatccgagaaattgtcagatgttatcagtcagaatttggacgagaccttgaaaaggacattaggtcagatacatcaggacattttgaacgtttacttgtgtccatgtgccagggaaatcgtgatgagaaccagagtataaaccaccaaatggctcaggaagatgctcagcgtctctatcaagctggtgaggggagactagggaccgatgaatcttgctttaacatgatccttgccacaagaagctttcctcagctgagagctaccatggaggcttattctaggatggctaatcgagacttgttaagcagtgtgagccgtgagttttccggatatgtagaaagtggtttgaagaccatcttgcagtgtgccctgaaccgccctgccttctttgctgagaggctctactatgctatgaaaggtgctggcacagatgactccaccctggtccggattgtggtcactcgaagtgagattgaccttgtacaaataaaacagatgttcgctcagatgtatcagaagactctgggcacaatgattgcaggtgacacgagtggagattaccgaagacttcttctggctattgtgggccagtaggagggatttttttttttttaatgaaaaaaaatttctattcatagcttatccttcagagcaatgacctgcatgcagcaatatcaaacatcagctaaccgaaagagctttctgtcaaggaccgtatcagggtaatgtgcttggtttgcacatgttgttattgccttaattctaattttattttgttctctacatacaatcaatgtaaagccatatcacaatgatacagtaatattgcaatgtttgtaaaccttcattcttactagtttcattctaatcaagatgtcaaattgaataaaaatcacagcaatctctgattctgtgtaataatattgaataattttttagaaggttactgaaagctctgccttccggaatccctctaagtctgcttgatagagtggatagtgtgttaaaactgtgtactttaaaaaaaaattcaacctttacatctagaataatttgcatctcattttgcctaaattggttctgtattcataaacactttccacatagaaaatagattagtattacctgtggcaccttttaagaaagggtcaaatgtttatatgcttaagatacatagcctacttttttttcgcagttgttttctttttttaaattgagttatgacaaataaaaaattgcatata

SEQ ID NO: 282862 - DNA, 1401 bp, Artificial Sequence
  derived and/or modified sequence
atgtcctacccaggctaccctccaacaggctatcctccatttcccggttatccaccagccggacaggaaagcagctttccacctagcgggcagtatccttacccatcagggttcccaccgatgggagggggagcctatccacaggttccttctagtgggtacccaggagcagggggataccccgcacccggtgggtatccggcaccaggcggatatccaggggcaccccagcccggaggtgctcccagctaccccggtgttcctccagggcaagggttcggagtcccgcctggtggtgcgggtttcagtgggtacccccagcctccttctcaaagctatgggggtggcccagcccaagtacccctccctgggggatttcctggtggtcaaatgcccagccagtatccaggtggccagccaacctatcccagtcagccagcaacagtcactcaagttacccaggggactatccggccagccgcaaacttcgacgccatccgggacgccgagatcctgagaaaggcaatgaaaggattcgggactgatgagcaggccatcgtggacgtagtggctaaccgctctaacgatcagcggcagaagataaaggcagccttcaagacaagctacggtaaggacttgattaaagacctcaaaagcgagttgagtggcaacatggaagagctgattcttgcactctttatgccacctacatattatgatgcatggagcctgcgaaaagctatgcagggcgcaggtactcaggaaagggtgctgatcgagattctttgtacaaggacgaaccaggaaataagagagatcgttcgttgttaccaatctgaatttggcagagacttggagaaggatatcaggagcgataccagtgggcatttcgagcgcctgctcgtctcgatgtgtcagggcaacagagacgagaaccagtccataaaccaccagatggcccaggaagacgcccagcgattataccaagccggtgaaggccgactgggcaccgatgaaagctgtttcaatatgattctggccaccagaagtttccctcagttaagagccaccatggaggcatattctcgaatggcaaatcgtgacctgttgagcagtgtgagtcgggagttcagcggctatgttgagtccgggctcaaaactatcctccaatgcgcgctgaatcggcctgctttctttgccgagaggctgtactacgcaatgaagggggctggcacagatgatagtacgctggtgcgtatcgtggtcacccgcagtgagattgatttggttcagattaaacaaatgtttgctcaaatgtaccagaagacactcggtacaatgatcgcaggtgatactagtggggattaccgaagactgctgcttgccatagtgggtcagtag

SEQ ID NO: 282863 - DNA, 1011 bp, Artificial Sequence
  derived and/or modified sequence
atgccctctcagtatccagggggacagcctacttacccaagccaacctgccacggtgacccaagtcacccaaggtaccatccggccagccgctaactttgacgccataagggatgcagagatactgcgtaaagcaatgaagggattcgggactgacgagcaggctatcgtcgacgtggttgctaacagatctaatgaccagcgccaaaaaatcaaagccgcattcaaaaccagctatggcaaggatctcattaaggacctgaagtcagaattatccggcaatatggaggagttaattctcgctctttttatgccaccaacgtattatgacgcttggagtttgcggaaagcaatgcaaggagccggaacgcaagagcgcgtcctcatcgaaatcctctgtactcgcaccaaccaggagatccgcgaaattgtgcgctgctaccagtctgaattcggtcgcgatctcgagaaagatatccgctcggacacaagcggtcactttgagcgcctgcttgtctctatgtgccagggcaatagagatgagaaccaatctattaaccatcagatggcccaagaggatgcccagcgcctttaccaagcaggcgaaggcagacttggcacggatgagagttgcttcaacatgattctggccactagatcatttcctcagcttagagccactatggaggcgtacagtcgcatggccaaccgtgatctgctctcttccgtgagtcgcgaattctccggatatgtcgagtcagggctgaagacaatcctgcagtgtgccctgaaccgaccggcattctttgccgagagactgtactacgctatgaagggcgcagggacagacgactccacgctggtacgtattgtggtcactcgttcagagattgacctggtgcagatcaagcagatgtttgcacagatgtaccaaaagactctgggaacaatgattgctggcgatacttcgggtgattaccgcagactcctactggcaattgtgggacagtag

SEQ ID NO: 282864 - DNA, 1401 bp, Artificial Sequence
  derived and/or modified sequence
atgagctaccccggctacccccccaccggctacccccccttccccggctacccccccgccggccaggagagcagcttcccccccagcggccagtacccctaccccagcggcttcccccccatgggcggcggcgcctacccccaggtgcccagcagcggctaccccggcgccggcggctaccccgcccccggcggctaccccgcccccggcggctaccccggcgccccccagcccggcggcgcccccagctaccccggcgtgccccccggccagggcttcggcgtgccccccggcggcgccggcttcagcggctacccccagccccccagccagagctacggcggcggccccgcccaggtgcccctgcccggcggcttccccggcggccagatgcccagccagtaccccggcggccagcccacctaccccagccagcccgccaccgtgacccaggtgacccagggcaccatcagacccgccgccaacttcgacgccatcagagacgccgagatcctgagaaaggccatgaagggcttcggcaccgacgagcaggccatcgtggacgtggtggccaacagaagcaacgaccagagacagaagatcaaggccgccttcaagaccagctacggcaaggacctgatcaaggacctgaagagcgagctgagcggcaacatggaggagctgatcctggccctgttcatgccccccacctactacgacgcctggagcctgagaaaggccatgcagggcgccggcacccaggagagagtgctgatcgagatcctgtgcaccagaaccaaccaggagatcagagagatcgtgagatgctaccagagcgagttcggcagagacctggagaaggacatcagaagcgacaccagcggccacttcgagagactgctggtgagcatgtgccagggcaacagagacgagaaccagagcatcaaccaccagatggcccaggaggacgcccagagactgtaccaggccggcgagggcagactgggcaccgacgagagctgcttcaacatgatcctggccaccagaagcttcccccagctgagagccaccatggaggcctacagcagaatggccaacagagacctgctgagcagcgtgagcagagagttcagcggctacgtggagagcggcctgaagaccatcctgcagtgcgccctgaacagacccgccttcttcgccgagagactgtactacgccatgaagggcgccggcaccgacgacagcaccctggtgagaatcgtggtgaccagaagcgagatcgacctggtgcagatcaagcagatgttcgcccagatgtaccagaagaccctgggcaccatgatcgccggcgacaccagcggcgactacagaagactgctgctggccatcgtgggccagtag

SEQ ID NO: 282865 - DNA, 1011 bp, Artificial Sequence
  derived and/or modified sequence
atgcccagccagtaccccggcggccagcccacctaccccagccagcccgccaccgtgacccaggtgacccagggcaccatcagacccgccgccaacttcgacgccatcagagacgccgagatcctgagaaaggccatgaagggcttcggcaccgacgagcaggccatcgtggacgtggtggccaacagaagcaacgaccagagacagaagatcaaggccgccttcaagaccagctacggcaaggacctgatcaaggacctgaagagcgagctgagcggcaacatggaggagctgatcctggccctgttcatgccccccacctactacgacgcctggagcctgagaaaggccatgcagggcgccggcacccaggagagagtgctgatcgagatcctgtgcaccagaaccaaccaggagatcagagagatcgtgagatgctaccagagcgagttcggcagagacctggagaaggacatcagaagcgacaccagcggccacttcgagagactgctggtgagcatgtgccagggcaacagagacgagaaccagagcatcaaccaccagatggcccaggaggacgcccagagactgtaccaggccggcgagggcagactgggcaccgacgagagctgcttcaacatgatcctggccaccagaagcttcccccagctgagagccaccatggaggcctacagcagaatggccaacagagacctgctgagcagcgtgagcagagagttcagcggctacgtggagagcggcctgaagaccatcctgcagtgcgccctgaacagacccgccttcttcgccgagagactgtactacgccatgaagggcgccggcaccgacgacagcaccctggtgagaatcgtggtgaccagaagcgagatcgacctggtgcagatcaagcagatgttcgcccagatgtaccagaagaccctgggcaccatgatcgccggcgacaccagcggcgactacagaagactgctgctggccatcgtgggccagtag

SEQ ID NO: 282866 - protein, 162 aa, Artificial Sequence
  derived and/or modified sequence
MSLAQRDAQELYAAGENRLGTDESKFNAVLCSRSRAHLVAVFNEYQRMTGRDIEKSICREMSGDLEEGMLAVVKCLKNTPAFFAERLNKAMRGAGTKDRTLIRIMVSRSETDLLDIRSEYKRMYGKSLYHDISSISCMPASYGHLEEATCLALKLLRVEGND

SEQ ID NO: 282867 - protein, 150 aa, Artificial Sequence
  derived and/or modified sequence
MSYPGYPPPPGGYPPAAPGGGPWGGAAYPPPPSMPPIGLDNVATYAGQFNQDYLSGMAANMSGTFGGANMPNLYPGAPGAGYPPVPPGGFGQPPSAQQPVPPYGMYPPPGGNPPSRMPSYPPYPGAPVPGQPMPPPGQQPPGAYPGQPPV

SEQ ID NO: 282868 - DNA, 324 bp, Artificial Sequence
  derived and/or modified sequence
atgggcagctgggtgcagctgatcaccagcgtgggcaccagcggcttgttcctaggggtgcgagtgagggaggagggggctggcatgagatgttccaagaccatccaggcaggacaatggctagactcttccaagggacctctgggaccttccccgccccccgtccccaccgccgggtattcctcgtcattttgcgtacactacgtaaacctgcttccgggggtgctggttctatcagtgactagccagtacccccacctttcgatggctctgtgtcagctggctgcacacgactggcctaggctctcctgtgtttgtgtttag

SEQ ID NO: 282869 - protein, 204 aa, Artificial Sequence
  derived and/or modified sequence
MSYPGYPPPPGGYPPAAPGGGPWGGAAYPPPPSMPPIGLDNVATYAGQFNQDYLSGMAANMSGTFGGANMPNLYPGAPGAGYPPVPPGGFGQPPSAQQPVPPYGMYPPPGGNPPSRMPSYPPYPGAPVPGQPMPPPGQQPPGAYPGQPPVTYPGQPPVPLPGQQQPVPSYPGYPGSGTVTPAVPPTQFGSRGTITDAPGFDPLR

SEQ ID NO: 282870 - protein, 148 aa, Artificial Sequence
  derived and/or modified sequence
  misc_feature (1)..(1): Xaa can be any naturally occurring amino acid
XENRLGTDESKFNAVLCSRSRAHLVAVFNEYQRMTGRDIEKSICREMSGDLEEGMLAVVKCLKNTPAFFAERLNKAMRGAGTKDRTLIRIMVSRSETDLLDIRSEYKRMYGKSLYHDISSISCMPASYGHLEEATCLALKLLRVEGND

SEQ ID NO: 282871 - DNA, 447 bp, Artificial Sequence
  derived and/or modified sequence
tgagagaaccgactcggaacagatgagagcaagttcaacgctgtcctgtgtagcagaagccgcgcccacctagtggcggtgtttaacgaataccagcgcatgacgggcagagacattgagaagtctatctgtagggagatgtctggcgacctggaggagggcatgttagctgtcgtcaaatgccttaagaacaccccggcattttttgccgagagattgaataaagccatgaggggagcgggcaccaaggatcggaccctcatccgcatcatggtttcaagaagtgagaccgatctcctggacattagatcagagtataagcggatgtatggcaagagtctatatcatgatatttcaagcatcagttgcatgccagcctcctacgggcacctagaagaagccacatgtctggctttaaagctgctgagggtggaaggaaacgactag

SEQ ID NO: 282872 - DNA, 447 bp, Artificial Sequence
  derived and/or modified sequence
tgagaaaatcggctgggcacagatgagagcaagttcaatgctgtgctgtgcagccgcagccgggcccacctggtggccgtgttcaatgagtaccagaggatgacaggccgggacatcgagaagagcatctgccgggagatgtctggggacctggaggagggcatgctggccgtggtgaagtgcctgaagaacaccccagccttctttgctgagcggctgaacaaggccatgagaggagctggcaccaaggacaggaccctcatccgcatcatggtgagccgctcagaaacagacctgctggacatccgctctgagtacaagaggatgtatggcaagagcctgtaccatgacatcagcagcatcagctgcatgcctgccagctatggccacctggaggaggccacctgcctggccctgaagctgctgcgggtggagggcaatgactag

SEQ ID NO: 282873 - DNA, 447 bp, Artificial Sequence
  derived and/or modified sequence
tgagagaaccggctgggcaccgacgagagcaagttcaacgccgtgttgtgcagcagatcgcgtgctcacctggtggcagtgtttaacgaataccagaggatgacaggaagggatatagagaaatcaatttgcagggaaatgagtggtgacctggaggaaggtatgctggctgtggttaaatgtttaaaaaatacccctgccttctttgctgaacggctcaacaaggctatgcggggcgcagggactaaagacaggactctgattcggatcatggtgtctagaagtgagactgaccttctggacatccggagcgagtataagaggatgtacggaaaatctctttaccatgatatatcaagcataagttgtatgccagcaagttacggacatttggaggaggctacttgcttggcattaaaacttttgcgtgtggagggtaatgactag

SEQ ID NO: 282874 - DNA, 750 bp, Artificial Sequence
  derived and/or modified sequence
gggagaaccgcctgggaacagacgagtccaagttcaatgcggttctgtgctcccggagccgggcccacctggtagcagttttcaatgagtaccagagaatgacaggccgggacattgagaagagcatctgccgggagatgtccggggacctggaggagggcatgctggccgtggtgaaatgtctcaagaataccccagccttctttgcggagaggctcaacaaggccatgaggggggcaggaacaaaggaccggaccctgattcgcatcatggtgtctcgcagcgagaccgacctcctggacatcagatcagagtataagcggatgtacggcaagtcgctgtaccacgacatctcgagtatctcctgcatgccagcaagctatggacatctggaagaagccacatgccttgccctcaagttgcttagggtggaaggaaatgattagaaatgagccaagccgagcctgcactcttagaggagatacttcaggggattaccggaagattctgctgaagatctgtggtggcaatgactgaacagtgactggtggctcacttctgcccacctgccggcaacaccagtgccaggaaaaggccaaaagaatgtctgtttctaacaaatccacaaatagccccgagattcaccgtcctagagcttaggcctgtcttccacccctcctgacccgtatagtgtgccacaggacctgggtcggtctagaactctctcaggatgccttttctaccccatcc

SEQ ID NO: 282875 - DNA, 447 bp, Artificial Sequence
  derived and/or modified sequence
taagagaaccgcctcggcaccgacgagagcaaatttaacgccgtgctctgttcacgatcccgcgctcacctggtggccgtctttaatgaatatcagcggatgaccggccgagacatcgaaaagtctatttgtagagaaatgtccggagacctggaagagggaatgttggccgtggttaagtgcctgaaaaacacaccagctttctttgccgagcggctgaacaaagcaatgaggggggctgggacaaaggacagaaccctgatccgcattatggtctctaggagcgagacggatttattggacatcagaagcgagtacaaacgaatgtacggtaagagtctgtatcacgatatttcatctatctcatgcatgcccgcatcgtatgggcacctcgaggaagccacctgtcttgcacttaaactcctccgagtcgagggaaacgactag

SEQ ID NO: 282876 - DNA, 447 bp, Artificial Sequence
  derived and/or modified sequence
tgagagaacagactgggcaccgacgagagcaagttcaacgccgtgctgtgcagcagaagcagagcccacctggtggccgtgttcaacgagtaccagagaatgaccggcagagacatcgagaagagcatctgcagagagatgagcggcgacctggaggagggcatgctggccgtggtgaagtgcctgaagaacacccccgccttcttcgccgagagactgaacaaggccatgagaggcgccggcaccaaggacagaaccctgatcagaatcatggtgagcagaagcgagaccgacctgctggacatcagaagcgagtacaagagaatgtacggcaagagcctgtaccacgacatcagcagcatcagctgcatgcccgccagctacggccacctggaggaggccacctgcctggccctgaagctgctgagagtggagggcaacgactag

SEQ ID NO: 282877 - protein, 326 aa, Artificial Sequence
  derived and/or modified sequence
RLIHPQLCELCIEALERHVIQAVNTSPERGGEEALHAFLLVHSKLLAFYSSHSASSLRPADLLALILLVQDLYPSESTAEDDIQETDSFSLPEEYFTPAPSPGDQSSGSTIWLEGGTPPMDALQIAEDTLQTLVPHCPVPSGPRRIFLDANVKESYCPLVPHTMYCLPLWQGINLVLLTRSPSAPLALVLSQLMDGFSMLEKKLKEGPEPGASLRSQPLVGDLRQRMDKFVKNRGAQEIQSTWLEFKAKAFSKSEPGSSWELLQACGKLKRQLCAIYRLNFLTTAPSRGGPHLPQHLQDQVQRLMREKLTDWKDFLLVKSRRNITM

SEQ ID NO: 282878 - protein, 667 aa, Artificial Sequence
  derived and/or modified sequence
MKCVLVATEGAEVLFYWTDQEFEESLRLKFGQSENEEEELPALEDQLSTLLAPVIISSMTMLEKLSDTYTCFSTENGNFLYVLHLFGECLFIAINGDHTESEGDLRRKLYVLKYLFEVHFGLVTVDGHLIRKELRPPDLAQRVQLWEHFQSLLWTYSRLREQEQCFAVEALERLIHPQLCELCIEALERHVIQAVNTSPERGGEEALHAFLLVHSKLLAFYSSHSASSLRPADLLALILLVQDLYPSESTAEDDIQETDSFSLPEEYFTPAPSPGDQSSGSTIWLEGGTPPMDALQIAEDTLQTLVPHCPVPSGPRRIFLDANVKESYCPLVPHTMYCLPLWQGINLVLLTRSPSAPLALVLSQLMDGFSMLEKKLKEGPEPGASLRSQPLVGDLRQRMDKFVKNRGAQEIQSTWLEFKAKAFSKSEPGSSWELLQACGKLKRQLCAIYRLNFLTTAPSRGGPHLPQHLQDQVQRLMREKLTDWKDFLLVKSRRNITMVSYLEDFPGLVHFIYVDRTTGQMVAPSLNCSQKTSSELGKGPLAAFVKTKVWSLIQLARRYLQKGYTTLLFQEGDFYCSYFLWFENDMGYKLQMIEVPVLSDDSVPIGMLGGDYYRKLLRYYSKNRPTEAVRCYELLALHLSVIPTDLLVQQAGQLARRLWEASRIPLL

SEQ ID NO: 282879 - DNA, 981 bp, Artificial Sequence
  derived and/or modified sequence
cggctcatccatcctcagctgtgtgagctttgcatcgaagcattagagcgccatgtgattcaggctgtgaacacctctccagagagaggcggggaggaagccctccatgccttcctgctcgtccactccaagcttctggctttttactcctcgcattcggcctcttctctgagaccagcagatctcctggcccttatactcctagtgcaagatttgtatccatcggaatctacggcggaagacgatattcaagagactgactctttcagcctccctgaagagtactttactcccgctccttcacccggggaccaaagctccggctccaccatttggttagaaggcgggactcccccaatggatgccctccagattgccgaagatactctccagacattggtgcctcattgtccggtgccatcaggaccgcgaagaattttcttagatgccaatgtgaaagaatcatactgccctctggtgccacacaccatgtattgtctgcctctgtggcagggcattaatctcgtgctgttgaccaggtctccatctgcccctttggctttggtgttaagtcagttgatggacggttttagcatgctcgaaaaaaagctcaaagagggacctgagcctggagcctccttgaggagtcagccacttgtgggagacctccgtcagcgaatggataagttcgtcaaaaatagaggcgcacaagagatacagtccacctggctggagttcaaggctaaggccttttctaaatcagaacccgggtcatcatgggaacttttacaggcctgcgggaagctcaagagacaattgtgcgcaatataccgattgaacttcctgactacggccccatctcgtggaggaccccaccttccccagcatctgcaagatcaagttcagagactgatgcgcgaaaaactaactgattggaaggatttcctcttggtgaagtctcggagaaatatcaccatgtag

SEQ ID NO: 282880 - DNA, 2004 bp, Artificial Sequence
  derived and/or modified sequence
atgaagtgtgtattggtcgctacggaaggggcagaggtactcttttactggactgaccaggaattcgaagagtccttgcggctcaaattcggtcagagcgagaatgaagaagaagaactccctgccctcgaggatcaactgagcactctgctggcccccgtgattatctcctctatgacaatgctggagaaactcagcgatacctacacttgcttttccactgagaacggcaatttcctgtacgtgctgcatctgttcggggagtgccttttcattgcaatcaacggagatcacacagagtcagagggggacctgcgacggaaactctatgtgctaaaatatttgttcgaagtccactttggcttggttactgtggatggccaccttatccggaaggagttgagacctccggacctcgcacaacgcgtacagctatgggaacattttcagtctctgctctggacgtactcccgtctacgggagcaagaacagtgtttcgcagtcgaggccctggaacgactcatacacccacagttgtgtgaactctgtattgaagcattggaaagacatgtcatacaggcagtcaacaccagtcctgagagaggcggagaggaggctctgcacgcatttctgttggtccactcaaaactgctcgcgttttactcctcccactcagcctcgagccttcggccagcggatctactagccctgatccttctggtccaggacctgtacccatccgagtccaccgctgaagacgatatccaagaaactgattccttttcactaccagaggagtacttcacccctgcaccaagtccaggtgaccagagtagcggatccacgatctggctagagggcgggacgccacccatggacgccctgcagattgccgaggacaccctgcagacattagtgcctcactgtccggttccctctggcccacgtcggatctttctggatgctaatgtgaaggaatcctactgtcctctggttcctcacacgatgtactgcctacccctctggcagggcatcaacttggtccttcttactcggtcccccagtgcccccttagcgctcgtcctgtctcagctcatggacggtttcagtatgctggagaagaagctcaaggaagggcctgagccgggtgccagcctgcgaagtcaacctttagtgggcgacctcaggcagcgcatggataaattcgtgaaaaaccgcggcgcccaggaaattcagtccacatggttggagttcaaggctaaggccttttcgaagtctgagcctgggagtagttgggaactcctccaagcctgtggaaaattgaagagacagctgtgcgcaatctaccggctgaatttcctcaccactgcacccagtcgaggtggtccccatctgcctcagcacctccaagatcaggtgcagagattgatgcgagagaagctgacagactggaaagatttccttttggtcaagagcaggcgcaatatcacgatggtatcttatttagaggacttccctggccttgtacacttcatatacgtcgatcgaaccaccggtcagatggtcgctccttcactgaactgcagccaaaaaacttcttcggagctgggcaagggcccactggcagcatttgtgaagaccaaggtgtggtcactgattcagctagccagaaggtatctccagaaagggtacacaacactgctatttcaggagggggacttctactgttcatactttctctggtttgaaaatgacatgggctacaaactgcagatgatcgaggtacctgtgctttccgatgacagcgtgcctattggaatgctcggaggcgactactacagaaaactcttgcgctactacagcaaaaaccgaccaacggaggccgtcaggtgctacgaattgctcgctctgcacctgagtgtcattcccactgatctgttagtgcagcaagctgggcaattagcccggcgtctctgggaggcttcaagaatccccctcctgtag

SEQ ID NO: 282881 - DNA, 978 bp, Artificial Sequence
  derived and/or modified sequence
cgactgattcacccccagctctgtgagctgtgcatagaggcgctggagcggcacgtcatccaggctgtcaacaccagccccgagcggggaggcgaggaggccctgcatgccttcctgctcgtgcactccaagctgctggcattctactctagccacagtgccagctccctgcgcccggccgacctgcttgccctcatcctcctggttcaggacctctaccccagcgagagcacagcagaggacgacattcaggagacagacagcttctccctccctgaggagtacttcacaccagctccttcccctggcgatcagagctcaggtagcaccatctggctggaggggggcaccccccccatggatgcccttcagatagcagaggacaccctccaaacactggttccccactgccctgtgccttccggccccagaaggatcttcctggatgccaacgtgaaggaaagctactgccccctagtgccccacaccatgtactgcctgcccctgtggcagggcatcaacctggtgctcctgaccaggagccccagcgcgcccctggccctggttctgtcccagctgatggatggcttctccatgctggagaagaagctgaaggaagggccggagcccggggcctccctgcgctcccagcccctcgtgggagacctgcgccagaggatggacaagtttgtcaagaatcgaggggcacaggagattcagagcacctggctggagtttaaggccaaggctttctccaaaagtgagcccggatcctcctgggagctgctccaggcatgtgggaagctgaagcggcagctctgcgccatctaccggctgaactttctgaccacagcccccagcaggggaggcccacacctgccccagcacctgcaggaccaagtgcagaggctcatgcgggagaagctgacggactggaaggacttcttgctggtgaagagcaggaggaacatcaccatg

SEQ ID NO: 282882 - DNA, 2778 bp, Artificial Sequence
  derived and/or modified sequence
cacgcggtcctacccggaagcgcgcccgggctcctgcaggcggggcgctgtgcgcgccgcgatccggtacgtgggcctccgggctgtcccctctgggggcggcgatcctccctccggagccccccttcaaccctcccggaagtgagcatttgcaggaccagggatgctgtgctgctctcccatgagccagtcaccgagtcggtctgctgcagccctttctgaacctctggccgtctggatgctccactgtgcttgccaagatgaagtgcgtcttggtggccactgagggcgcagaggtcctcttctactggacagatcaggagtttgaagagagtctccggctgaagttcgggcagtcagagaatgaggaagaagagctccctgccctggaggaccagctcagcaccctcctagccccggtcatcatctcctccatgacgatgctggagaagctctcggacacctacacctgcttctccacggaaaatggcaacttcctgtatgtccttcacctgtttggagaatgcctgttcattgccatcaatggtgaccacaccgagagcgagggggacctgcggcggaagctgtatgtgctcaagtacctgtttgaagtgcactttgggctggtgactgtggacggtcatcttatccgaaaggagctgcggcccccagacctggcgcagcgtgtccagctgtgggagcacttccagagcctgctgtggacctacagccgcctgcgggagcaggagcagtgcttcgccgtggaggccctggagcgactgattcacccccagctctgtgagctgtgcatagaggcgctggagcggcacgtcatccaggctgtcaacaccagccccgagcggggaggcgaggaggccctgcatgccttcctgctcgtgcactccaagctgctggcattctactctagccacagtgccagctccctgcgcccggccgacctgcttgccctcatcctcctggttcaggacctctaccccagcgagagcacagcagaggacgacattcaggagacagacagcttctccctccctgaggagtacttcacaccagctccttcccctggcgatcagagctcaggtagcaccatctggctggaggggggcaccccccccatggatgcccttcagatagcagaggacaccctccaaacactggttccccactgccctgtgccttccggccccagaaggatcttcctggatgccaacgtgaaggaaagctactgccccctagtgccccacaccatgtactgcctgcccctgtggcagggcatcaacctggtgctcctgaccaggagccccagcgcgcccctggccctggttctgtcccagctgatggatggcttctccatgctggagaagaagctgaaggaagggccggagcccggggcctccctgcgctcccagcccctcgtgggagacctgcgccagaggatggacaagtttgtcaagaatcgaggggcacaggagattcagagcacctggctggagtttaaggccaaggctttctccaaaagtgagcccggatcctcctgggagctgctccaggcatgtgggaagctgaagcggcagctctgcgccatctaccggctgaactttctgaccacagcccccagcaggggaggcccacacctgccccagcacctgcaggaccaagtgcagaggctcatgcgggagaagctgacggactggaaggacttcttgctggtgaagagcaggaggaacatcaccatggtgtcatatctagaagacttcccaggcttggtgcacttcatctatgtggaccgcaccactgggcagatggtggcgccttccctcaactgcagtcaaaagacctcgtcggagttgggcaaggggccgctggctgcctttgtcaaaactaaggtctggtctctgatccagctggcgcgcagatacctgcagaagggctacaccacgctgctgttccaggagggggatttctactgctcctacttcctgtggttcgagaatgacatggggtacaaactccagatgatcgaggtgcccgtcctctccgacgactcagtgcctatcggcatgctgggaggagactactacaggaagctcctgcgctactacagcaagaaccgcccaaccgaggctgtcaggtgctacgagctgctggccctgcacctgtctgtcatccccactgacctgctggtgcagcaggccggccagctggcccggcgcctctgggaggcctcccgtatccccctgctctaggccaaggtggccgcagtctgcctttgcatcctgtcctccagccacccttgcttgccactgttccccatgacgagagcctcctgtctgcagtggccatcctgaggatagggcagagtgcccagggtggccccagggcttctaaaaccccacctagaccaccctccatgtcaggtactgagcaaggccccagatccttctctctggaggaagagggaagcccaggggtcctgtttgtaaaacaacggtggcaacagctcctcttccagagctgcctctgcctttatcctgggagatggggaggaagccccatctctgctgttccctgcgtggaggaagcccacccagcaagctctctcctaccccaggtaaaaggtgctcctttgcctgggtttgaattccagcgctgccacttcctctctgcacctcctggcaagtttcttctattccccacgtttaaagcgatggcacctccgtcccagggtggtgtgaggattacccagtgtggtaggtgctc

SEQ ID NO: 282883 - DNA, 981 bp, Artificial Sequence
  derived and/or modified sequence
cggctcatccacccccagctgtgtgagctgtgcatcgaggccctggagcggcacgtgatccaggccgtgaacaccagccctgagcggggcggggaggaggccctgcacgccttcctgctggtgcacagcaagctgctggccttctacagcagccacagcgccagcagcctgcggcctgctgacctgctggccctgatcctgctggtgcaggacctgtaccccagcgagagcacagcagaagatgacatccaggagacagacagcttcagcctgcctgaggagtacttcaccccagcccccagccctggggaccagagcagcggcagcaccatctggctggagggcggcaccccacccatggatgccctgcagattgctgaggacaccctgcagaccctggtgccccactgccctgtgcccagcggcccccggcgcatcttcctggatgccaacgtgaaggagagctactgccccctggtgccccacaccatgtactgcctgcccctgtggcagggcatcaacctggtgctgctgaccaggagccccagcgcccccctggccctggtgctgagccagctgatggatggcttctccatgctggagaagaagctgaaggagggccctgagcccggggccagcctgcggagccagcccctggtgggggacctgcggcagaggatggacaagtttgtgaagaacagaggagcccaggagatccagagcacctggctggagttcaaggccaaggccttcagcaagtctgagcccggcagctcctgggagctgctgcaggcctgtgggaagctgaagaggcagctgtgtgccatctaccgcctgaacttcctgaccacagcccccagcagaggaggcccccacctgccccagcacctgcaggaccaggtgcagaggctgatgagggagaagctgacagactggaaggacttcctgctggtgaagagcagaagaaacatcaccatgtag

SEQ ID NO: 282884 - DNA, 2004 bp, Artificial Sequence
  derived and/or modified sequence
atgaagtgtgtgctggtggccacagagggcgctgaggtgctcttctactggacagaccaggagtttgaggagagcctgcggctgaagtttggccagagtgaaaatgaggaggaggagctgcctgccctggaggaccagctgagcaccctgctggcccctgtgatcatcagctccatgaccatgctggagaagctgagtgacacctacacctgcttcagcacagaaaatggaaacttcctgtatgtgctgcacctgtttggagagtgcctcttcatcgccatcaatggagaccacacagaaagtgaaggagacctgcggaggaagctgtatgtgctgaagtacctgtttgaggtgcacttcggcctggtgacagtggatggccacctgatcaggaaggagctgcggcccccagacctggcccagagggtgcagctgtgggagcacttccagagcctgctgtggacctacagccggctgcgggagcaggagcagtgctttgctgtggaggccctggagcggctcatccacccccagctgtgtgagctgtgcatcgaggccctggagcggcacgtgatccaggccgtgaacaccagccctgagcggggcggggaggaggccctgcacgccttcctgctggtgcacagcaagctgctggccttctacagcagccacagcgccagcagcctgcggcctgctgacctgctggccctgatcctgctggtgcaggacctgtaccccagcgagagcacagcagaagatgacatccaggagacagacagcttcagcctgcctgaggagtacttcaccccagcccccagccctggggaccagagcagcggcagcaccatctggctggagggcggcaccccacccatggatgccctgcagattgctgaggacaccctgcagaccctggtgccccactgccctgtgcccagcggcccccggcgcatcttcctggatgccaacgtgaaggagagctactgccccctggtgccccacaccatgtactgcctgcccctgtggcagggcatcaacctggtgctgctgaccaggagccccagcgcccccctggccctggtgctgagccagctgatggatggcttctccatgctggagaagaagctgaaggagggccctgagcccggggccagcctgcggagccagcccctggtgggggacctgcggcagaggatggacaagtttgtgaagaacagaggagcccaggagatccagagcacctggctggagttcaaggccaaggccttcagcaagtctgagcccggcagctcctgggagctgctgcaggcctgtgggaagctgaagaggcagctgtgtgccatctaccgcctgaacttcctgaccacagcccccagcagaggaggcccccacctgccccagcacctgcaggaccaggtgcagaggctgatgagggagaagctgacagactggaaggacttcctgctggtgaagagcagaagaaacatcaccatggtgtcctacctggaggacttccctggcctggtgcacttcatctacgtggacaggaccaccggccagatggtggcccccagcctgaactgcagccagaagaccagcagcgagctgggcaagggccccctggccgcctttgtgaagaccaaggtgtggagcctcatccagctggcccggcgctacctgcagaagggctacaccaccctgctcttccaggagggggacttctactgcagctacttcctgtggtttgaaaatgacatgggctacaagctgcagatgattgaggtgcctgtgctgagtgatgacagcgtgcccatcggcatgctgggcggggactactacaggaagctgctgcgctactacagcaagaaccggcccacagaggccgtgcgctgctatgagctgctggccctgcacctgagcgtcatccccacagacctgctggtgcagcaggccggccagctggcccggcggctgtgggaggccagccgcatccccctgctgtag

SEQ ID NO: 282885 - DNA, 981 bp, Artificial Sequence
  derived and/or modified sequence
cggctgatccacccccagctgtgcgagctgtgcatcgaggccctggaacgccacgtgatccaggctgtcaatacatcaccagaaaggggcggagaggaggccctacacgcttttcttctcgtgcattccaaactgctggcattttattcaagccactcagcctccagcttgcgccctgctgatcttctagcactcatccttctcgtgcaagacttatatccaagcgagagcactgccgaagatgacattcaggaaacggatagtttcagtcttcctgaagagtactttacaccggcgcccagccctggcgatcagtcttctgggagcaccatttggcttgagggaggcacgccccccatggacgcgctccagattgctgaggacaccctccagaccctggtgccacactgtcctgtcccttccgggcctcgtagaatcttccttgatgctaacgtgaaagagagttactgcccccttgtgccccacaccatgtactgtctgcctctgtggcagggaattaacttggtgctcctcacaaggtccccaagcgcacccctggccttagtattaagtcagctgatggatggtttttccatgctggaaaaaaagctgaaggaagggcctgagccaggcgcttcgctgcgatcacagccactcgtgggggatctcagacaacggatggacaaatttgtgaagaaccgtggagcccaggagatccaatctacgtggttggaattcaaagccaaagctttctctaagagcgagccaggaagcagctgggagcttctgcaggcatgtggtaagctgaagcggcaactttgtgctatatatcgcctgaactttctgaccaccgccccctcgaggggaggacctcacctccctcaacacctgcaggatcaagttcagcgtttgatgcgcgagaagcttacagactggaaagatttccttctggtaaagagcagacgaaatattacaatgtag

SEQ ID NO: 282886 - DNA, 2004 bp, Artificial Sequence
  derived and/or modified sequence
atgaagtgcgtgctggtggccaccgagggcgccgaggtgctgttctactggactgaccaagagttcgaggaaagcttaagacttaagttcgggcagagtgaaaatgaggaagaggaacttcccgccctcgaggatcagctgagcacattactggcacccgttatcatatcttcaatgacgatgctggaaaagttgtctgacacatacacctgcttctccacagagaacggaaatttcctgtatgtcctgcacctcttcggcgagtgtctttttattgcaattaacggtgaccatacggaatctgagggggatttgagacgcaagctctacgttctcaagtacctattcgaggtgcatttcgggctggttacagtggacggccatttgatacgtaaagagctgcggcctccggacctggcccagcgagtacagctctgggaacatttccaatcactcctgtggacttattcccgactcagggagcaggagcagtgcttcgcagtggaggcgctggagcgcctaatacatccccaactctgcgagctgtgtatcgaggcccttgaacgacacgtcattcaggcagtgaacacaagtccagagcggggaggcgaagaggccctacatgcatttctgttagtgcactccaagcttctggcgttttactcatctcactctgcctcctcattgcggcccgccgacctgttagccctgattctgctggtccaggacttatacccctcagaaagcaccgcagaagatgatatccaggagacagattcattctccctgcccgaagagtattttaccccagcgccttcacccggggaccaaagttctgggagtaccatctggctggaaggaggaactccccccatggatgcgctgcagatcgcagaggacactctgcagacactggtacctcactgtcccgtgccctctggacccagaaggatttttctggatgccaatgtgaaggaatcttactgcccactggttcctcacacaatgtattgtctgcccttgtggcagggcattaatctggttctcctaacccggtcgcctagcgcgcctctcgcattggtactgagtcaattgatggatggattctctatgttggaaaagaagttgaaggagggaccagagccgggggcttccctgaggtcgcaaccgctcgtgggggatctgcgacagagaatggacaaatttgtgaagaatcgtggtgcgcaggaaatccagagtacatggctcgaatttaaagctaaggccttcagtaagtctgaaccggggtcctcctgggaactgctccaggcatgtggtaaactgaaacggcagttatgcgcgatatacaggttgaacttcctcactactgctccctctagaggcgggccccaccttcctcaacatctgcaagaccaggttcaacggctcatgcgcgaaaaactaactgactggaaggatttcctgcttgttaaaagccggcggaatatcacgatggtttcctacctggaggatttccccggactagttcactttatctacgtggatcgcactactgggcagatggtagccccttcactaaactgttcccagaaaaccagttcagaattgggaaagggcccacttgctgcttttgttaaaacaaaagtgtggagcctgatacagctcgctagacgttaccttcagaaaggctacaccactcttctttttcaggagggtgacttctattgttcatactttttatggttcgagaatgatatgggctacaaactgcaaatgattgaagtaccggttctgagcgacgattccgtcccgatagggatgctaggtggagattactaccgtaaacttttgaggtattattcgaagaaccggcctaccgaagcagtgaggtgctatgagctgcttgcattgcatctgagtgttatccccacggatctgctggtgcagcaggctgggcagctggccagaaggttatgggaggcttcgcggatccctctcttgtag

SEQ ID NO: 282887 - DNA, 981 bp, Artificial Sequence
  derived and/or modified sequence
agactcattcatccccagttgtgcgaattatgtatcgaggcactggagagacatgtgatacaagcagtgaacacctccccagagcgcggaggggaggaagcactgcacgccttccttttggtccactcaaagctccttgcgttctactccagccatagcgcgtcttcacttcggcctgccgacttgctcgccctgattcttctagtgcaggatctgtatccgtcagaaagtacggcagaggacgatattcaggagacggactcattttctcttcctgaagaatactttacccccgctcccagcccaggagatcaatccagcggcagtaccatatggctggagggagggactccccctatggacgcgctgcagattgcagaagacacgttgcagactttggtgccccactgtcccgtccccagtggtccccgacgaatctttctcgacgccaatgttaaggaatcgtattgcccactcgtgccacatacaatgtattgcctacctctttggcaagggattaatctggtgttgctgacacgttctcccagtgccccactggccctagtattgagtcaattaatggatggattctccatgctcgaaaaaaagctcaaagagggacctgaacctggagcatctctgagatcacagcccctggtcggagatctaagacaacggatggataaatttgtcaagaacagaggcgcacaggagatccaatccacgtggctggaattcaaagcaaaggccttttcaaagtctgagcccggttcctcctgggaactcttgcaggcctgtgggaaactgaagcgccagttgtgcgccatttaccggctcaatttcctgacaaccgctccatcacggggaggtccacatctgcctcagcacctccaagaccaggttcaacggttaatgagagaaaaattaactgattggaaggactttctgctggttaaaagccgccgaaacatcacgatgtag

SEQ ID NO: 282888 - DNA, 2004 bp, Artificial Sequence
  derived and/or modified sequence
atgaagtgcgtacttgtggctaccgagggggctgaagtgcttttctattggactgaccaggagtttgaagagagccttagactgaagttcggtcaatcagaaaacgaagaagaggaactaccagccctcgaggaccagcttagcacgttgttggcacctgtgataatctcctctatgactatgcttgagaaacttagcgacacctatacttgtttcagtacagagaacggaaatttcctctatgtattgcatttattcggggaatgtctgttcatagccattaatggtgatcacacggagtctgagggggacctaaggcgtaagctttacgtcctcaaataccttttcgaggtccacttcggcctcgttacagtagacggccacctgattagaaaggagctccgcccaccagacttagcccagagagtgcagctgtgggaacattttcagtctctgctatggacgtactccagattgcgtgagcaggagcagtgcttcgccgtcgaggcactcgagcgactaattcatccccaactgtgtgagctttgtatcgaggctctggaaaggcatgtgattcaggccgtcaatactagtcctgaacggggaggcgaggaagccctacacgcctttctgctcgtacattccaagcttctagcgttctattcctctcacagcgcttctagcttgcgtcctgccgaccttttggcattgatcttactggtgcaagacttgtaccccagtgaatctaccgcggaagatgatattcaggaaacagatagtttcagtctgccagaggagtactttacccccgctccttcaccgggagaccagagttctggatcaacaatatggctcgagggcggtactcccccaatggacgccctgcagatagctgaggatactctgcaaaccttggttcctcactgtcccgtcccttccggacctaggaggatctttctcgacgctaacgttaaagagtcttattgtccacttgtacctcacactatgtactgcctgccactctggcaaggaatcaacctggttctgctcacaagaagccctagcgctcccctcgccctcgttttgtcacagctcatggacggcttctccatgctagagaaaaaattgaaagagggcccagaacctggggcatcccttaggtctcagcccctggttggtgatctgaggcaacgtatggacaagttcgtgaagaatcggggtgcccaggaaatccagtccacatggcttgagttcaaagccaaggccttttcgaagtccgagccaggttcgtcctgggaactactgcaagcttgtggtaaactgaagcgacagctgtgcgccatttaccgactgaattttctgaccacggcccctagtagggggggaccccacctgcctcaacacttgcaggaccaggtccaaagactgatgagagagaaattgaccgactggaaggactttctgctggtcaaatctagaaggaacatcacaatggtcagctatcttgaggattttccaggactggtgcattttatttacgtcgaccgcacaaccggccagatggtagcaccatccctcaactgctcccagaaaacctcaagcgaacttggtaaaggcccattggccgctttcgtcaaaacaaaagtctggagccttattcagctggcacgcaggtatttacagaaggggtataccactctcctcttccaggagggggacttttactgctcttatttcctctggttcgagaatgacatgggctacaagctgcaaatgatcgaggtgccagtcttgtctgatgacagtgtcccaattggcatgctcggtggagactactaccgaaagttgttgagatattacagtaagaatcgccctaccgaggcggtgcgctgctatgaacttttggccctccatctgagcgtaattcccaccgatctgttggtgcagcaggctggacagttggctagacggctttgggaggctagcaggataccattgctctag

SEQ ID NO: 282889 - DNA, 981 bp, Artificial Sequence
  derived and/or modified sequence
agactgatccacccccagctgtgcgagctgtgcatcgaggccctggagagacacgtgatccaggccgtgaacaccagccccgagagaggcggcgaggaggccctgcacgccttcctgctggtgcacagcaagctgctggccttctacagcagccacagcgccagcagcctgagacccgccgacctgctggccctgatcctgctggtgcaggacctgtaccccagcgagagcaccgccgaggacgacatccaggagaccgacagcttcagcctgcccgaggagtacttcacccccgcccccagccccggcgaccagagcagcggcagcaccatctggctggagggcggcaccccccccatggacgccctgcagatcgccgaggacaccctgcagaccctggtgccccactgccccgtgcccagcggccccagaagaatcttcctggacgccaacgtgaaggagagctactgccccctggtgccccacaccatgtactgcctgcccctgtggcagggcatcaacctggtgctgctgaccagaagccccagcgcccccctggccctggtgctgagccagctgatggacggcttcagcatgctggagaagaagctgaaggagggccccgagcccggcgccagcctgagaagccagcccctggtgggcgacctgagacagagaatggacaagttcgtgaagaacagaggcgcccaggagatccagagcacctggctggagttcaaggccaaggccttcagcaagagcgagcccggcagcagctgggagctgctgcaggcctgcggcaagctgaagagacagctgtgcgccatctacagactgaacttcctgaccaccgcccccagcagaggcggcccccacctgccccagcacctgcaggaccaggtgcagagactgatgagagagaagctgaccgactggaaggacttcctgctggtgaagagcagaagaaacatcaccatgtag

SEQ ID NO: 282890 - DNA, 2004 bp, Artificial Sequence
  derived and/or modified sequence
atgaagtgcgtgctggtggccaccgagggcgccgaggtgctgttctactggaccgaccaggagttcgaggagagcctgagactgaagttcggccagagcgagaacgaggaggaggagctgcccgccctggaggaccagctgagcaccctgctggcccccgtgatcatcagcagcatgaccatgctggagaagctgagcgacacctacacctgcttcagcaccgagaacggcaacttcctgtacgtgctgcacctgttcggcgagtgcctgttcatcgccatcaacggcgaccacaccgagagcgagggcgacctgagaagaaagctgtacgtgctgaagtacctgttcgaggtgcacttcggcctggtgaccgtggacggccacctgatcagaaaggagctgagaccccccgacctggcccagagagtgcagctgtgggagcacttccagagcctgctgtggacctacagcagactgagagagcaggagcagtgcttcgccgtggaggccctggagagactgatccacccccagctgtgcgagctgtgcatcgaggccctggagagacacgtgatccaggccgtgaacaccagccccgagagaggcggcgaggaggccctgcacgccttcctgctggtgcacagcaagctgctggccttctacagcagccacagcgccagcagcctgagacccgccgacctgctggccctgatcctgctggtgcaggacctgtaccccagcgagagcaccgccgaggacgacatccaggagaccgacagcttcagcctgcccgaggagtacttcacccccgcccccagccccggcgaccagagcagcggcagcaccatctggctggagggcggcaccccccccatggacgccctgcagatcgccgaggacaccctgcagaccctggtgccccactgccccgtgcccagcggccccagaagaatcttcctggacgccaacgtgaaggagagctactgccccctggtgccccacaccatgtactgcctgcccctgtggcagggcatcaacctggtgctgctgaccagaagccccagcgcccccctggccctggtgctgagccagctgatggacggcttcagcatgctggagaagaagctgaaggagggccccgagcccggcgccagcctgagaagccagcccctggtgggcgacctgagacagagaatggacaagttcgtgaagaacagaggcgcccaggagatccagagcacctggctggagttcaaggccaaggccttcagcaagagcgagcccggcagcagctgggagctgctgcaggcctgcggcaagctgaagagacagctgtgcgccatctacagactgaacttcctgaccaccgcccccagcagaggcggcccccacctgccccagcacctgcaggaccaggtgcagagactgatgagagagaagctgaccgactggaaggacttcctgctggtgaagagcagaagaaacatcaccatggtgagctacctggaggacttccccggcctggtgcacttcatctacgtggacagaaccaccggccagatggtggcccccagcctgaactgcagccagaagaccagcagcgagctgggcaagggccccctggccgccttcgtgaagaccaaggtgtggagcctgatccagctggccagaagatacctgcagaagggctacaccaccctgctgttccaggagggcgacttctactgcagctacttcctgtggttcgagaacgacatgggctacaagctgcagatgatcgaggtgcccgtgctgagcgacgacagcgtgcccatcggcatgctgggcggcgactactacagaaagctgctgagatactacagcaagaacagacccaccgaggccgtgagatgctacgagctgctggccctgcacctgagcgtgatccccaccgacctgctggtgcagcaggccggccagctggccagaagactgtgggaggccagcagaatccccctgctgtag

SEQ ID NO: 282891 - protein, 257 aa, Artificial Sequence
  derived and/or modified sequence
EFIIRGGRVPSHCLHFSRSFQKKTYSKMNNPAIKRIGNHITKSPEDKREYRGLELANGIKVLLISDPTTDKSSAALDVHIGSLSDPPNIAGLSHFCEHMLFLGTKKYPKENEYSQFLSEHAGSSNAFTSGEHTNYYFDVSHEHLEGALDRFAQFFLCPLFDESCKDREVNAVDSEHEKNVMNDAWRLFQLEKATGNPKHPFSKFGTGNKYTLETRPNQEGIDVRQELLKFHSAYYSSNLMAVCVLGRESLDDLTNLV

SEQ ID NO: 282892 - DNA, 774 bp, Artificial Sequence
  derived and/or modified sequence
gagtttattatccggggaggcagggtgccgtcgcattgcctacacttttctcgctcatttcagaagaagacctactccaagatgaataatccagctataaagcggataggcaaccacatcactaagagtcccgaggacaaaagggagtataggggactagaattggccaacggcattaaagtgcttttgatcagtgatcctacaacagacaaatcctctgctgcacttgacgtgcacatcgggtccctgagtgacccacccaatatcgccggcttgagccacttctgtgagcacatgctgttcctaggtaccaaaaagtacccaaaagaaaacgaatacagccagttcctttcagagcatgccggatcctcaaacgcttttacttctggagagcacaccaactattactttgacgtgagtcacgaacacctcgaaggcgccttggatcggtttgcccagttttttctatgccctttgtttgatgagtcctgtaaggacagagaggtgaatgccgtggactcagagcatgagaaaaatgtgatgaatgatgcttggcgcctctttcagctcgaaaaagccaccggcaaccccaagcaccccttttccaaattcggcacaggtaataagtacaccctagaaacaagacccaatcaagaaggcatcgacgtgagacaagagttgctgaaattccattctgcgtactatagtagtaacttaatggctgtttgtgtgttaggccgggaatccctggacgacctgaccaaccttgtgtag

SEQ ID NO: 282893 - DNA, 772 bp, Artificial Sequence
  derived and/or modified sequence
gaattcatcatcagaggaggaagagttcccagtcattgtcttcacttctccagaagtttccaaaaaaagacttacagcaaaatgaataatccagccatcaagagaataggaaatcacattaccaagtctcctgaagacaagcgagaatatcgagggctagagctggccaatggtatcaaagtacttcttatcagtgatcccaccacggataagtcatcagcagcacttgatgtgcacataggttcattgtcggatcctccaaatattgctggcttaagtcatttttgtgaacatatgctttttttgggaacaaagaaataccctaaagaaaatgaatacagccagtttctcagtgagcatgcaggaagttcaaatgcctttactagtggagagcataccaattactattttgatgtttctcatgaacacctagaaggtgccctagacaggtttgcacagttttttctgtgccccttgttcgatgaaagttgcaaagacagagaggtgaatgcagttgattcagaacatgagaagaatgtgatgaatgatgcctggagactctttcaattggaaaaagctacagggaatcctaaacaccccttcagtaaatttgggacaggtaacaaatatactctggagactagaccaaaccaagaaggcattgatgtaagacaagagctactgaaattccattctgcttactattcatccaacttaatggctgtttgtgttttaggtcgagaatctttagatgacttgactaatctggtgg

SEQ ID NO: 282894 - DNA, 774 bp, Artificial Sequence
  derived and/or modified sequence
gagttcatcatccggggcggccgggtgcccagccactgcctgcacttcagccgctccttccagaagaagacctacagcaagatgaacaacccagccatcaagagaattggcaaccacatcaccaagagccctgaggacaagcgggagtaccggggcctggagctggccaacggcatcaaggtgctgctgatcagtgaccccaccacagacaagagcagcgctgccctggatgtgcacatcggcagcctgagtgacccccccaacattgctggcctgagccacttctgtgagcacatgctgttcctgggcaccaagaagtaccccaaggaaaatgagtacagccagttcctgtctgagcacgccggcagcagcaatgccttcaccagcggggagcacaccaactactactttgatgtgtcccatgagcacctggagggcgccctggacagatttgcccagttcttcctgtgccccctgtttgatgagagctgcaaggaccgggaggtgaatgctgtggacagcgagcacgagaagaatgtgatgaatgatgcctggaggctcttccagctggagaaggccaccggcaaccccaagcaccccttcagcaagtttggcaccggcaacaagtacaccctggagacccggcccaaccaggagggcattgatgtgcggcaggagctgctgaagttccacagcgcctactacagcagcaacctgatggctgtgtgtgtgctgggccgggagagcctggatgacctgaccaacctggtgtag

SEQ ID NO: 282895 - DNA, 774 bp, Artificial Sequence
  derived and/or modified sequence
gagttcatcatccggggcggccgggtgcccagccactgcctgcacttttcaagatcttttcagaaaaaaacctacagtaaaatgaacaacccagccatcaagaggatcgggaatcatattacaaagtcgcccgaagataagcgcgagtataggggacttgaactggctaacggcatcaaggtcttgttgatttcagatcccaccaccgataagagcagcgctgcactggatgtgcatatcggcagcttgagcgatccccccaatatagctggtttgtcccatttttgtgaacacatgctattccttggcaccaagaaatatcccaaagaaaacgagtattcgcagtttctcagcgagcacgctggctcatcaaatgcgttcacttccggggagcacacaaattactactttgatgtgagtcacgaacacctggagggagccctggaccgcttcgcccagtttttcctgtgccccttattcgacgagtcttgtaaagatcgcgaggtcaatgcagtcgacagcgaacacgaaaagaatgttatgaatgatgcgtggaggctttttcaattggaaaaggccaccggaaatccaaagcacccgtttagtaaattcgggactggaaataagtataccctggagactaggcccaatcaggaaggaatcgatgttagacaggagctgctcaaatttcattctgcctactactcgtcaaacctcatggcggtatgtgtccttggccgcgagtccctcgacgatctcaccaacctcgtatag

SEQ ID NO: 282896 - DNA, 774 bp, Artificial Sequence
  derived and/or modified sequence
gagttcattatacgtgggggtcgcgtgccctctcactgtttgcatttcagccggagctttcagaagaagacatattccaaaatgaataaccccgctatcaagcggataggtaatcacattacaaagtctcccgaagacaaacgcgagtatcggggacttgaacttgccaacgggattaaggtgctgttaataagcgatcctactactgacaagtcatccgccgcactggacgtccatatcggatctttgtccgacccccctaatattgctggcttatcccatttctgtgaacacatgttgttcctgggaacgaagaaataccctaaagagaatgaatactcacagttcctatccgaacatgccggaagtagcaacgcgtttactagcggtgagcacacaaattactacttcgatgtctcacatgagcatctggaaggcgcacttgataggtttgcccagttcttcctgtgccccctcttcgacgaaagttgcaaagacagagaagtgaatgccgttgattctgagcatgagaaaaatgtcatgaatgacgcatggcgattgtttcagctcgagaaagccacagggaacccaaaacaccccttcagcaagttcggaactgggaacaaatataccctcgagacccgccctaaccaggagggcattgacgtgcggcaggagctattaaaattccactccgcatattacagcagtaatcttatggccgtgtgtgtcctaggccgagaatcactggatgatttgacgaacctcgtgtag

SEQ ID NO: 282897 - DNA, 774 bp, Artificial Sequence
  derived and/or modified sequence
gagttcatcatcagaggcggcagagtgcccagccactgcctgcacttcagcagaagcttccagaagaagacctacagcaagatgaacaaccccgccatcaagagaatcggcaaccacatcaccaagagccccgaggacaagagagagtacagaggcctggagctggccaacggcatcaaggtgctgctgatcagcgaccccaccaccgacaagagcagcgccgccctggacgtgcacatcggcagcctgagcgacccccccaacatcgccggcctgagccacttctgcgagcacatgctgttcctgggcaccaagaagtaccccaaggagaacgagtacagccagttcctgagcgagcacgccggcagcagcaacgccttcaccagcggcgagcacaccaactactacttcgacgtgagccacgagcacctggagggcgccctggacagattcgcccagttcttcctgtgccccctgttcgacgagagctgcaaggacagagaggtgaacgccgtggacagcgagcacgagaagaacgtgatgaacgacgcctggagactgttccagctggagaaggccaccggcaaccccaagcaccccttcagcaagttcggcaccggcaacaagtacaccctggagaccagacccaaccaggagggcatcgacgtgagacaggagctgctgaagttccacagcgcctactacagcagcaacctgatggccgtgtgcgtgctgggcagagagagcctggacgacctgaccaacctggtgtag

SEQ ID NO: 282898 - protein, 1205 aa, Artificial Sequence
  derived and/or modified sequence
MANGGGGGGGSSGGGGGGGGSSLRMSSNIHANHLSLDASSSSSSSSSSSSSSSSSSSSSSVHEPKMDALIIPVTMEVPCDSRGQRMWWAFLASSMVTFFGGLFIILLWRTLKYLWTVCCHCGGKTKEAQKINNGSSQADGTLKPVDEKEEAVAAEVGWMTSVKDWAGVMISAQTLTGRVLVVLVFALSIGALVIYFIDSSNPIESCQNFYKDFTLQIDMAFNVFFLLYFGLRFIAANDKLWFWLEVNSVVDFFTVPPVFVSVYLNRSWLGLRFLRALRLIQFSEILQFLNILKTSNSIKLVNLLSIFISTWLTAAGFIHLVENSGDPWENFQNNQALTYWECVYLLMVTMSTVGYGDVYAKTTLGRLFMVFFILGGLAMFASYVPEIIELIGNRKKYGGSYSAVSGRKHIVVCGHITLESVSNFLKDFLHKDRDDVNVEIVFLHNISPNLELEALFKRHFTQVEFYQGSVLNPHDLARVKIESADACLILANKYCADPDAEDASNIMRVISIKNYHPKIRIITQMLQYHNKAHLLNIPSWNWKEGDDAICLAELKLGFIAQSCLAQGLSTMLANLFSMRSFIKIEEDTWQKYYLEGVSNEMYTEYLSSAFVGLSFPTVCELCFVKLKLLMIAIEYKSANRESRILINPGNHLKIQEGTLGFFIASDAKEVKRAFFYCKACHDDITDPKRIKKCGCKRLEDEQPSTLSPKKKQRNGGMRNSPNTSPKLMRHDPLLIPGNDQIDNMDSNVKKYDSTGMFHWCAPKEIEKVILTRSEAAMTVLSGHVVVCIFGDVSSALIGLRNLVMPLRASNFHYHELKHIVFVGSIEYLKREWETLHNFPKVSILPGTPLSRADLRAVNINLCDMCVILSANQNNIDDTSLQDKECILASLNIKSMQFDDSIGVLQANSQGFTPPGMDRSSPDNSPVHGMLRQPSITTGVNIPIITELAKPGKLPLVSVNQEKNSGTHILMITELVNDTNVQFLDQDDDDDPDTELYLTQPFACGTAFAVSVLDSLMSATYFNDNILTLIRTLVTGGATPELEALIAEENALRGGYSTPQTLANRDRCRVAQLALLDGPFADLGDGGCYGDLFCKALKTYNMLCFGIYRLRDAHLSTPSQCTKRYVITNPPYEFELVPTDLIFCLMQFDHNAGQSRASLSHSSHSSQSSSKKSSSVHSIPSTANRQNRPKSRESRDKQNRKEMVYR

SEQ ID NO: 282899 - protein, 1240 aa, Artificial Sequence
  derived and/or modified sequence
MANGGGGGGGSSGGGGGGGGSSLRMSSNIHANHLSLDASSSSSSSSSSSSSSSSSSSSSSVHEPKMDALIIPVTMEVPCDSRGQRMWWAFLASSMVTFFGGLFIILLWRTLKYLWTVCCHCGGKTKEAQKINNGSSQADGTLKPVDEKEEAVAAEVGWMTSVKDWAGVMISAQTLTGRVLVVLVFALSIGALVIYFIDSSNPIESCQNFYKDFTLQIDMAFNVFFLLYFGLRFIAANDKLWFWLEVNSVVDFFTVPPVFVSVYLNRSWLGLRFLRALRLIQFSEILQFLNILKTSNSIKLVNLLSIFISTWLTAAGFIHLVENSGDPWENFQNNQALTYWECVYLLMVTMSTVGYGDVYAKTTLGRLFMVFFILGGLAMFASYVPEIIELIGNRKKYGGSYSAVSGRKHIVVCGHITLESVSNFLKDFLHKDRDDVNVEIVFLHNISPNLELEALFKRHFTQVEFYQGSVLNPHDLARVKIESADACLILANKYCADPDAEDASNIMRVISIKNYHPKIRIITQMLQYHNKAHLLNIPSWNWKEGDDAICLAELKLGFIAQSCLAQGLSTMLANLFSMRSFIKIEEDTWQKYYLEGVSNEMYTEYLSSAFVGLSFPTVCELCFVKLKLLMIAIEYKSANRESRGRLSILINPGNHLKIQEGTLGFFIASDAKEVKRAFFYCKACHDDITDPKRIKKCGCKRPKMSIYKRMRRACCFDCGRSERDCSCMSGRVRGNVDTLERAFPLSSVSVNDCSTSFRAFEDEQPSTLSPKKKQRNGGMRNSPNTSPKLMRHDPLLIPGNDQIDNMDSNVKKYDSTGMFHWCAPKEIEKVILTRSEAAMTVLSGHVVVCIFGDVSSALIGLRNLVMPLRASNFHYHELKHIVFVGSIEYLKREWETLHNFPKVSILPGTPLSRADLRAVNINLCDMCVILSANQNNIDDTSLQDKECILASLNIKSMQFDDSIGVLQANSQGFTPPGMDRSSPDNSPVHGMLRQPSITTGVNIPIITELVNDTNVQFLDQDDDDDPDTELYLTQPFACGTAFAVSVLDSLMSATYFNDNILTLIRTLVTGGATPELEALIAEENALRGGYSTPQTLANRDRCRVAQLALLDGPFADLGDGGCYGDLFCKALKTYNMLCFGIYRLRDAHLSTPSQCTKRYVITNPPYEFELVPTDLIFCLMQFDHNAGQSRASLSHSSHSSQSSSKKSSSVHSIPSTANRQNRPKSRESRDKQKYVQEERL

SEQ ID NO: 282900 - protein, 1171 aa, Artificial Sequence
  derived and/or modified sequence
MDALIIPVTMEVPCDSRGQRMWWAFLASSMVTFFGGLFIILLWRTLKYLWTVCCHCGGKTKEAQKINNGSSQADGTLKPVDEKEEAVAAEVGWMTSVKDWAGVMISAQTLTGRVLVVLVFALSIGALVIYFIDSSNPIESCQNFYKDFTLQIDMAFNVFFLLYFGLRFIAANDKLWFWLEVNSVVDFFTVPPVFVSVYLNRSWLGLRFLRALRLIQFSEILQFLNILKTSNSIKLVNLLSIFISTWLTAAGFIHLVENSGDPWENFQNNQALTYWECVYLLMVTMSTVGYGDVYAKTTLGRLFMVFFILGGLAMFASYVPEIIELIGNRKKYGGSYSAVSGRKHIVVCGHITLESVSNFLKDFLHKDRDDVNVEIVFLHNISPNLELEALFKRHFTQVEFYQGSVLNPHDLARVKIESADACLILANKYCADPDAEDASNIMRVISIKNYHPKIRIITQMLQYHNKAHLLNIPSWNWKEGDDAICLAELKLGFIAQSCLAQGLSTMLANLFSMRSFIKIEEDTWQKYYLEGVSNEMYTEYLSSAFVGLSFPTVCELCFVKLKLLMIAIEYKSANRESRILINPGNHLKIQEGTLGFFIASDAKEVKRAFFYCKACHDDITDPKRIKKCGCKRPKMSIYKRMRRACCFDCGRSERDCSCMSGRVRGNVDTLERAFPLSSVSVNDCSTSFRAFEDEQPSTLSPKKKQRNGGMRNSPNTSPKLMRHDPLLIPGNDQIDNMDSNVKKYDSTGMFHWCAPKEIEKVILTRSEAAMTVLSGHVVVCIFGDVSSALIGLRNLVMPLRASNFHYHELKHIVFVGSIEYLKREWETLHNFPKVSILPGTPLSRADLRAVNINLCDMCVILSANQNNIDDTSLQDKECILASLNIKSMQFDDSIGVLQANSQGFTPPGMDRSSPDNSPVHGMLRQPSITTGVNIPIITELVNDTNVQFLDQDDDDDPDTELYLTQPFACGTAFAVSVLDSLMSATYFNDNILTLIRTLVTGGATPELEALIAEENALRGGYSTPQTLANRDRCRVAQLALLDGPFADLGDGGCYGDLFCKALKTYNMLCFGIYRLRDAHLSTPSQCTKRYVITNPPYEFELVPTDLIFCLMQFDHNAGQSRASLSHSSHSSQSSSKKSSSVHSIPSTANRQNRPKSRESRDKQNRKEMVYR

SEQ ID NO: 282901 - protein, 1225 aa, Artificial Sequence
  derived and/or modified sequence
PKMDALIIPVTMEVPCDSRGQRMWWAFLASSMVTFFGGLFIILLWRTLKYLWTVCCHCGGKTKEAQKINNGSSQADGTLKPVDEKEEAVAAEVGWMTSVKDWAGVMISAQTLTGRVLVVLVFALSIGALVIYFIDSSNPIESCQNFYKDFTLQIDMAFNVFFLLYFGLRFIAANDKLWFWLEVNSVVDFFTVPPVFVSVYLNRSWLGLRFLRALRLIQFSEILQFLNILKTSNSIKLVNLLSIFISTWLTAAGFIHLVENSGDPWENFQNNQALTYWECVYLLMVTMSTVGYGDVYAKTTLGRLFMVFFILGGLAMFASYVPEIIELIGNRKKYGGSYSAVSGRKHIVVCGHITLESVSNFLKDFLHKDRDDVNVEIVFLHNISPNLELEALFKRHFTQVEFYQGSVLNPHDLARVKIESADACLILANKYCADPDAEDASNIMRVISIKNYHPKIRIITQMLQYHNKAHLLNIPSWNWKEGDDAICLAELKLGFIAQSCLAQGLSTMLANLFSMRSFIKIEEDTWQKYYLEGVSNEMYTEYLSSAFVGLSFPTVCELCFVKLKLLMIAIEYKSANRESRILINPGNHLKIQEGTLGFFIASDAKEVKRAFFYCKACHDDITDPKRIKKCGCKRPKMSIYKRMRRACCFDCGRSERDCSCMSGRVRGNVDTLERAFPLSSVSVNDCSTSFRAFEDEQPSTLSPKKKQRNGGMRNSPNTSPKLMRHDPLLIPGNDQIDNMDSNVKKYDSTGMFHWCAPKEIEKVILTRSEAAMTVLSGHVVVCIFGDVSSALIGLRNLVMPLRASNFHYHELKHIVFVGSIEYLKREWETLHNFPKVSILPGTPLSRADLRAVNINLCDMCVILSANQNNIDDTSLQDKECILASLNIKSMQFDDSIGVLQANSQGFTPPGMDRSSPDNSPVHGMLRQPSITTGVNIPIITELVNDTNVQFLDQDDDDDPDTELYLTQPFACGTAFAVSVLDSLMSATYFNDNILTLIRTLVTGGATPELEALIAEENALRGGYSTPQTLANRDRCRVAQLALLDGPFADLGDGGCYGDLFCKALKTYNMLCFGIYRLRDAHLSTPSQCTKRYVITNPPYEFELVPTDLIFCLMQFDHNAGQSRASLSHSSHSSQSSSKKSSSVHSIPSTANRQNRPKSRESRDKQNATRMNRMGQEKKWFTDEPDNAYPRNIQIKPMSTHMANQINQYKSTSSLIPPIREVEDEC

SEQ ID NO: 282902 - DNA, 3516 bp, Artificial Sequence
  derived and/or modified sequence
atggacgccctgatcatacccgttaccatggaggtgccttgcgactctagagggcaacgaatgtggtgggccttcctcgcttcctcgatggtgacatttttcgggggattgttcataatcctgctgtggaggacccttaaatacctgtggacggtttgttgtcactgcggcgggaagaccaaggaggctcaaaagatcaataacggaagtagccaggccgacgggaccctcaaacccgtagacgaaaaagaggaagctgtggctgccgaggttggctggatgacctccgtaaaagactgggccggagtgatgatctctgctcagactctgaccggccgggtacttgtggttttggtcttcgccctcagcattggcgccctggtaatatatttcatagattctagtaatcccatcgagagctgccagaacttttacaaagattttacattacaaatcgatatggctttcaatgtcttctttctgctatacttcgggctgaggtttatagcagccaacgataaattgtggttttggctcgaagtcaactcagtggtagatttctttactgtgccaccagtgtttgtctctgtgtatttgaaccgatcatggttaggcctccgctttttgcgtgctctgagattaatacagttttctgagattctccagttccttaatattcttaaaacctctaacagcattaaattggtgaatctgttgtcgatctttataagcacttggcttaccgccgccgggtttatacatcttgttgagaacagtggggacccctgggaaaatttccagaataatcaggctcttacatactgggagtgtgtctacttgttgatggtcaccatgtccaccgtgggatatggagatgtgtacgcgaagactacgctcggacgcctgtttatggttttcttcatcttgggcggcctcgccatgtttgcttcttacgtgccggaaatcatcgaattgatcggaaatcgcaaaaagtatggaggctcgtatagcgctgtgtccggacgtaaacacattgtagtgtgcggtcatataacgctggagagtgtgtctaattttttaaaagacttcctgcacaaggacagagatgacgtcaacgtggagattgtgtttctgcataatataagtccgaacctcgaactggaggcccttttcaagaggcactttacccaggtcgagttttaccaaggcagcgttctcaaccctcatgacttggctcgggtaaaaatcgagtctgctgatgcctgtctgatcctcgccaataaatactgtgccgaccctgatgccgaagatgcttctaatatcatgagagtgataagtatcaaaaactatcaccctaaaatcagaataataacgcagatgctgcagtaccataacaaggcccacctgcttaatatcccaagctggaattggaaagagggggatgacgcaatctgtcttgccgagctaaagctgggtttcattgcccagtcttgtctcgcccaagggttaagcaccatgttggccaatttgttctccatgcgtagctttattaagatcgaagaggatacctggcagaaatactacctggaaggcgtctcaaatgaaatgtatacagagtatctgagctcagccttcgtcggactgagcttccctacggtatgcgagttatgcttcgttaaattaaagctgctcatgattgctattgagtataagtcagctaacagggagtcccggatcttgatcaatccgggtaatcatttgaagatccaggaaggcactctcgggttcttcattgcaagcgatgccaaagaggtcaaacgtgcctttttctactgtaaggcatgccacgatgatataacagatccaaagagaatcaagaagtgcggctgtaaacgcccgaagatgtctatttacaagaggatgaggagggcctgttgtttcgactgcgggagatctgagagggattgtagctgtatgtcgggcagagtccgcggtaacgtcgatacgttggagagagccttccctctgagttccgtgtccgtcaatgactgttctactagttttagggctttcgaggatgaacagcctagcaccctttctccaaaaaagaagcagaggaatggtgggatgcggaatagccccaatacaagtcctaagctaatgcgacacgatccattactcatcccgggcaatgaccagatcgataacatggactcgaatgtcaaaaagtacgattcaacgggcatgtttcactggtgcgccccgaaggagatcgaaaaggttattcttactaggtcggaggccgccatgaccgtgctcagcggccacgtcgtagtgtgtatctttggcgatgtaagcagcgcactgatcggcctgcggaacttggtgatgccgttgcgcgcctccaattttcactatcatgagttaaaacacatcgtgtttgtgggaagtatcgaatacctcaaaagggagtgggagaccttacacaattttccaaaagtctccattttgcctggcacccccctgtcccgggctgacctcagggctgtaaatattaatctttgtgatatgtgtgtgatcctctccgccaatcaaaataatattgacgacacaagcctccaggataaagaatgcattctggcctcgctcaatatcaaatcaatgcagtttgatgacagtataggcgtcctacaggccaatagtcaaggcttcactccaccaggaatggacagaagctccccagacaactcaccagtgcatgggatgctacggcagcccagcatcaccacaggagtcaatattccaatcataacggagcttgtcaatgacactaatgtgcagtttctcgatcaagatgacgacgacgatccagataccgagctataccttacacaaccctttgcctgtgggaccgcattcgccgtctcggtgctcgacagcctcatgtctgccacttattttaatgacaatatcctgacgctcattaggacgcttgttaccggaggggccacccctgagttagaggccttaatcgccgaagagaacgcattaagaggcggctactcgaccccccaaacacttgcgaacagggacaggtgccgcgtggctcagctggccctgctggacggcccctttgctgacctgggcgatggaggttgctatggagatttgttctgtaaagcactcaagacttacaacatgctgtgtttcggaatctacaggctcagagatgcgcatttatcaacaccctctcaatgtactaaacgctatgtaatcacaaaccccccatacgagtttgagctcgtgcccaccgacctgatcttttgtctgatgcagttcgatcacaacgccggacagagtcgcgcatccctgtctcactcctcccactcgtcgcagtcgtctagtaaaaaatcttcttcagtgcactctatcccttcaacggctaatcggcaaaatagacccaagtcaagggagtcccgggataaacagaaccgcaaggaaatggtgtacaggtag

SEQ ID NO: 282903 - DNA, 3678 bp, Artificial Sequence
  derived and/or modified sequence
cccaaaatggacgctctgattataccagtcacaatggaagtgccttgcgatagcagaggccagcggatgtggtgggctttcctggccagctctatggtgacctttttcggaggcttatttataattcttttatggaggaccttgaagtacctatggacagtgtgttgtcactgcggaggcaagacaaaggaggcccagaaaatcaataatggcagcagtcaagctgacggcactctgaagcccgtggacgagaaagaggaagcagttgcagccgaagtaggctggatgaccagcgtgaaagactgggccggggtgatgatctctgctcaaacgcttactggcagagtgctggtggtactcgtcttcgccctctccattggcgctctcgtgatttattttattgattcatcaaatcctatagagtcttgtcagaacttttacaaggacttcacgttacagatcgatatggccttcaacgtgtttttcctcctctacttcggtctgcgatttattgccgcgaatgataagctgtggttctggctcgaggtgaattccgttgtggactttttcactgtgccccccgtatttgtcagcgtttatctgaaccggtcttggttgggtctgcgtttcctgagagccctgcgtctgatacagttctcggaaatccttcagttcctaaacattctaaagacctctaattcgataaagctcgtcaatttgctgtctatctttatcagcacatggctgacagccgctgggttcatccacctggttgagaacagcggagacccttgggagaactttcagaacaaccaggccctgacatattgggaatgtgtctaccttctcatggtgaccatgagcacagtgggctatggggacgtttacgccaagaccacactcgggcgtctttttatggtgttcttcatcctgggaggcctcgctatgttcgcctcttacgttcccgagattattgaactcatcggaaatagaaagaagtacggcgggagttatagcgccgtgagtggcaggaaacacatcgttgtgtgtggacacataacactggagagcgtctcaaatttcctgaaggacttcctgcacaaagaccgggacgatgtaaacgtagaaatcgtgttcttgcacaacatttcacctaacttagaactggaagcactgttcaaaagacacttcacccaggtggaattttaccagggatcagtcctgaatccgcatgatctcgcacgtgtgaaaatagaatctgctgacgcatgcctcatactcgcaaataaatactgcgctgatccggacgccgaggatgccagtaatataatgagggtgattagtataaagaattatcacccaaaaattaggattattacacagatgctccagtatcacaacaaggcccaccttttaaatatcccgtcgtggaactggaaggagggcgacgacgcaatttgcctggccgagctgaaacttggatttattgctcagagctgtcttgcccagggtctctcaacaatgctggcaaacttattttcgatgcggagcttcatcaagatagaggaggacacttggcagaaatattacttggagggcgtctcaaatgagatgtacaccgagtacctctccagcgcttttgtgggattgtcatttcccacagtgtgcgaactttgcttcgtgaaacttaaacttttaatgatcgccattgagtataaatcggccaaccgcgagtcgcgaatcctgatcaatccgggtaaccatctcaaaattcaagaaggcactctgggcttctttatcgcatccgatgccaaggaagtgaaacgtgcattcttttactgcaaagcatgtcatgacgacattaccgacccgaagaggattaagaagtgcgggtgtaagcgtccaaaaatgagcatatacaaaagaatgcggcgggcctgctgttttgactgcggcaggagcgaacgagattgctcttgcatgtcaggtagagtgcgcggcaacgtggacacgctggagagggcctttcctctgtcgagcgtgtccgttaacgattgcagcactagcttccgagcgtttgaggacgaacagccgtctacattatccccaaagaagaaacaaaggaacggcggcatgcggaatagccccaacacaagccctaaactcatgagacacgaccccctcctgattcctggaaatgaccagattgacaacatggattcaaacgtcaagaaatacgattccaccggtatgtttcattggtgtgcgcccaaggagatcgaaaaagtcatcctgacacggtccgaggccgccatgaccgtactcagcgggcacgtggtggtctgtatttttggagacgtgagtagtgcgctcattgggctgcgaaatctcgtcatgcccctgagagcaagcaactttcactatcacgagctgaagcacattgtttttgtgggatctattgaatatttgaaaagagaatgggagaccctgcacaacttcccgaaagtatccatacttccaggcacaccattgtctcgcgcagacctccgggcagtgaacattaatctgtgtgacatgtgtgtcatcctgagcgccaaccaaaataatattgatgatacttctctgcaagacaaggagtgtatactcgcttcgctgaatatcaagtccatgcagttcgacgactccataggggtattacaggccaacagtcaaggttttaccccccccggtatggacagaagcagtcctgataatagtccggtgcatggtatgctgcggcagccttctataacaacgggcgttaacattcccatcatcacagaactcgtaaacgatacaaacgtgcaattcctggaccaggacgatgatgacgatccagacactgagctttatttaacccagccttttgcctgtggcacagccttcgccgtttcagtgctagacagcctgatgtcagccacttattttaacgacaatatccttaccttaattcgaaccctggtcacagggggagccacacctgagctggaggcactgatcgcggaggaaaacgcacttcgtgggggatactccactcctcaaacattggctaacagagatagatgtagagttgcacagctggctttgcttgacggaccttttgctgatctgggtgacgggggctgttatggcgacctattttgtaaagctctcaagacctataatatgctttgcttcggtatctatcgtctgagggacgcgcacctttcaacaccctcccagtgtactaagaggtacgtgattacaaatcctccttacgaatttgaattagtccctacggacctcatcttctgcctgatgcagtttgaccacaatgctggccaatcccgggcttccttatctcactcctcacactctagccagtctagttcaaaaaagtctagtagcgttcactctattccttccactgcaaacagacagaatcgacccaagtcccgcgaaagccgagataaacaaaatgctacacgcatgaatcgcatgggacaggagaagaaatggttcaccgatgaaccagacaatgcttatccgaggaatatccaaattaaacccatgtctacccacatggccaatcagattaaccaatacaagagcacaagttctttaatccctccgataagagaggtagaagatgagtgctag

SEQ ID NO: 282904 - DNA, 3630 bp, Artificial Sequence
  derived and/or modified sequence
tctaacattcacgcaaaccacttgtccctcgatgcctcatcttcatcatctagctcaagttcatcgtcatcctcaagctcgagctcttctagtagctcaagtgtgcacgagccgaaaatggatgccttaatcataccagtgaccatggaggttccttgtgacagtcgagggcagcgcatgtggtgggcatttctcgcttcctcaatggttacttttttcggggggctgttcatcattttgctctggagaaccctgaagtatctgtggacggtttgctgccactgcgggggaaaaaccaaagaggcgcagaagattaataatggctcaagccaggctgacggaaccctgaagcccgtggatgaaaaagaagaggcggtggccgccgaggttggttggatgacttcagtgaaagattgggcaggtgtgatgatctccgctcagactctgacaggaagagtgttagttgttctggtttttgcattgagcattggagctttggtaatatattttatcgatagcagcaatcctatcgaaagctgtcagaatttctataaggattttaccctccagattgacatggccttcaacgtgttctttctgctgtatttcggcctgaggttcatcgctgccaacgacaagctctggttctggctagaggtgaattccgtcgttgacttctttaccgtcccgcccgtgtttgtgtcggtctacctcaatagaagctggctggggttgcggtttcttagggcgctgcgcctgatccagttctccgagattctgcagttcttaaatattctaaaaacttccaattcgatcaagttggtgaatctacttagtatattcattagtacttggttgaccgcagctggatttatacatttggtcgagaattctggtgatccctgggaaaactttcagaacaaccaggcgctgacctactgggagtgcgtgtacctcctgatggtgactatgagcactgtaggatacggagatgtgtacgcgaaaactactctcggcaggctattcatggtctttttcatccttggcggcctggccatgttcgcctcttacgtgccagagatcatcgagctgatcggcaaccgcaagaaatatggggggtcttattcagccgttagcggccgaaagcatatcgttgtgtgtggccacatcactctcgagagcgtttctaattttctgaaggattttctgcacaaggatagagatgatgtaaatgttgagatcgtttttctgcacaacatcagccccaatttggaacttgaagcattgtttaagaggcacttcacacaggtagagttctaccaggggtctgttctaaatccacacgacttggcgcgggtgaaaatagaatctgcagacgcatgtctcatcctcgcaaataagtattgtgcagaccctgacgccgaagacgctagcaacataatgcgggtgatctctataaaaaactaccaccccaagataaggattattactcagatgttgcagtaccacaacaaagcccacttgttaaacatcccatcatggaactggaaggaaggtgacgacgcaatttgccttgccgaactcaaactggggtttatcgcgcagagttgcttagcccagggcctctccaccatgttggccaacctgttcagcatgagatcattcattaagatcgaagaggacacttggcaaaaatattatctggagggagtgagcaatgagatgtacaccgagtacttgtcttccgctttcgtgggtctcagcttcccaacagtttgcgagctgtgctttgtaaaactcaagctcttaatgatcgccattgaatacaagtctgcaaaccgtgagtctcggatactgattaatccgggcaaccacctgaagatccaggagggaacactgggctttttcatcgcatctgacgccaaagaggtgaaaagggcttttttctactgtaaggcatgccacgatgatataacagaccccaagcgaattaagaagtgcggctgcaaacgacccaaaatgtcaatatacaagagaatgagacgagcttgctgctttgattgtggaaggtctgagcgcgactgtagctgcatgtctggtagagtaaggggtaatgtcgatacattggaacgagcttttccactgtcctcagtgagcgtcaatgattgttcgactagtttcagagcgtttgaagatgagcaaccctccaccctgagtcctaaaaaaaaacagcgtaatggagggatgaggaactcgccaaatacgtccccaaagctgatgcgccacgacccacttctgattcctggcaacgaccagatcgacaatatggacagcaatgttaagaagtacgattctacagggatgtttcactggtgcgccccgaaagagattgagaaagttatcctgacaaggtcggaggccgcgatgacagtgctgtccgggcacgtggtggtgtgcatcttcggtgatgtctcttccgccctcatcggactcaggaatctcgtcatgcccttgcgagcctcaaattttcactatcacgagttgaaacacatcgttttcgttggctcaatcgagtatcttaaacgggaatgggagacacttcataatttccctaaggtgagcattctaccaggaactcccttaagcagggccgacctgcgggccgtcaatatcaacctgtgcgacatgtgcgtcatcctaagcgcaaaccagaataatatcgatgatacctctctccaggataaagagtgcattctcgcgtcattgaatatcaaaagcatgcagttcgacgattctatcggagtgctgcaggccaatagtcaagggttcacgcctccgggcatggatagaagttcgccagataatagcccagtccatggtatgctcaggcaaccttccattacgacaggcgtgaacatacccataatcaccgagctggtgaacgacactaacgtgcaattcttagaccaggatgacgacgacgaccccgacaccgaattgtatctaacgcagcctttcgcctgcggcacggctttcgcggtatccgtgttggacagtctgatgagtgccacttattttaatgacaacatacttactctcattcggaccctggtgactgggggggcaaccccagagctggaagctcttatcgccgaggagaatgcattgcgcggagggtactcaaccccccagactcttgctaaccgtgatcggtgcagggtggcccagctggccctgttggacggccctttcgctgatctgggggacggcggctgttacggtgatctcttctgtaaggccctgaagacctacaatatgctctgtttcggtatctaccgcttgcgagacgcgcatttatcaactccatcacagtgtactaagcgctatgtcatcaccaaccctccatacgaatttgagctggtccctaccgacttgatcttctgcctgatgcagtttgaccataacgccggacagtcaagagcctcactgagtcattcatctcattcaagccaaagcagcagtaagaagagctcaagcgttcactcaattccaagtactgccaataggcaaaacagaccgaagagtcgagagtcgcgggataagcagaagaaagagatggtctatagatag

SEQ ID NO: 282905 - DNA, 3516 bp, Artificial Sequence
  derived and/or modified sequence
atggatgccctgatcatccctgtgaccatggaggtgccctgtgacagccggggccagaggatgtggtgggccttcctggccagctccatggtgaccttcttcggcggcctcttcatcatcctgctgtggaggaccctgaagtacctgtggacagtgtgctgccactgcggcggcaagaccaaggaggcccagaagatcaacaacggcagcagccaggctgatggcaccctgaagcctgtggatgagaaggaggaggccgtggccgctgaggtgggctggatgacctctgtgaaggactgggccggcgtgatgatcagcgcccagaccctgaccggccgggtgctggtggtgctggtgtttgccctgagcatcggggccctggtgatctacttcatcgacagcagcaaccccatcgagagctgccagaacttctacaaggacttcaccctgcagattgacatggccttcaacgtgttcttcctgctgtacttcggcctgcgcttcatcgccgccaatgacaagctgtggttctggctggaggtgaacagcgtggtggacttcttcaccgtgccccctgtgtttgtgtctgtgtacctgaacagatcctggctgggcctgcgcttcctgcgggccctgcggctcatccagttcagcgagatcctgcagttcctgaacatcctgaagaccagcaacagcatcaagctggtgaacctgctgagcatcttcatcagcacctggctgacagctgctggcttcatccacctggtggagaacagcggggacccctgggagaacttccagaacaaccaggccctgacctactgggagtgtgtgtacctgctgatggtgaccatgagcacagtgggctatggagatgtgtatgccaagaccaccctgggccgcctcttcatggtgttcttcatcctgggcggcctggccatgtttgccagctatgtgcctgagatcatcgagctgattggcaacaggaagaagtatggaggcagctacagcgctgtgtctggcaggaagcacatcgtggtgtgtggccacatcaccctggagagcgtgagcaacttcctgaaggacttcctgcacaaggacagagatgatgtgaatgtggagatcgtgttcctgcacaacatcagccccaacctggagctggaggccctcttcaagaggcacttcacccaggtggagttctaccagggctctgtgctgaacccccatgacctggcccgggtgaagattgagagcgcagatgcctgcctgatcctggccaacaagtactgtgccgaccctgatgctgaagatgccagcaacatcatgagggtcatcagcatcaagaactaccaccccaagatccgcatcatcacccagatgctgcagtaccacaacaaggcccacctgctgaacatccccagctggaactggaaggagggagatgatgccatctgcctggccgagctgaagctgggcttcatcgcccagagctgcctggcccagggcctgagcaccatgctggccaacctcttctccatgaggagcttcatcaagattgaggaggacacctggcagaagtactacctggagggcgtgtccaatgagatgtacacagagtacctgagcagcgcctttgtgggcctgtccttccccaccgtgtgtgagctgtgctttgtgaagctgaagctgctgatgattgccatcgagtacaagagcgccaaccgggagagccgcatcctgatcaaccctggcaaccacctgaagatccaggagggcaccctgggcttcttcatcgccagtgatgccaaggaggtgaagagggccttcttctactgcaaggcctgccatgatgacatcacagaccccaagaggatcaagaagtgtggctgcaagaggcccaagatgagcatctacaagaggatgaggcgggcctgctgctttgactgtggccgctctgagcgggactgcagctgcatgagcggccgggtgagaggaaatgtggacaccctggagcgggccttccccctgagctctgtgtctgtgaatgactgcagcaccagcttccgggcctttgaagatgagcagcccagcaccctgagccccaagaagaagcagagaaatggaggcatgaggaacagccccaacaccagccccaagctgatgagacatgaccccctgctgatccctggaaatgaccagattgacaacatggacagcaatgtgaagaagtatgacagcacaggcatgttccactggtgtgcccccaaggagattgagaaggtgatcctgaccaggtctgaggccgccatgacagtgctgagcggccacgtggtggtgtgcatctttggagatgtgtcctctgccctgattggcctgaggaacctggtgatgcccctgcgggccagcaacttccactaccacgagctgaagcacatcgtgtttgtgggcagcattgagtacctgaagcgggagtgggagaccctgcacaacttccccaaggtgtccatcctgcccggcacccccctgagcagagctgacctgcgggctgtgaacatcaacctgtgtgacatgtgtgtgatcctgagcgccaaccagaacaacattgatgacaccagcctgcaggacaaggagtgcatcctggccagcctgaacatcaagtccatgcagtttgatgacagcattggagtgctgcaggccaacagccagggcttcaccccacctggcatggacaggagcagcccagacaacagccctgtgcacggcatgctgcggcagcccagcatcaccaccggggtgaacatccccatcatcacagagctggtgaatgacaccaacgtgcagttcctggaccaggatgatgatgatgatcctgacacagagctgtacctgacccagccctttgcctgtggcacagcctttgctgtgtctgtgctggacagcctgatgtctgccacctacttcaatgacaacatcctgaccctcatccgcaccctggtgactggaggagccaccccagagctggaggccctgattgctgaggagaatgccctgcggggcggctacagcaccccccagaccctggccaacagagaccgctgccgggtggcccagctggccctgctggatggcccctttgctgacctgggagatggcggctgctacggggacctcttctgcaaggccctgaagacctacaacatgctgtgcttcggcatctaccgcctgagagatgcccacctgagcacccccagccagtgcaccaagcgctacgtgatcaccaaccccccctatgaatttgagctggtgcccacagacctgatcttctgcctgatgcagtttgaccacaatgccggccagagccgggccagcctgagccacagcagccacagcagccagagcagcagcaagaagagcagctctgtgcacagcatccccagcacagccaaccggcagaaccggcccaagagccgggagagccgggacaagcagaacaggaaggagatggtgtacagatag

SEQ ID NO: 282906 - DNA, 3678 bp, Artificial Sequence
  derived and/or modified sequence
cccaagatggatgccctgatcatccctgtgaccatggaggtgccctgtgacagccggggccagaggatgtggtgggccttcctggccagctccatggtgaccttcttcggcggcctcttcatcatcctgctgtggaggaccctgaagtacctgtggacagtgtgctgccactgcggcggcaagaccaaggaggcccagaagatcaacaacggcagcagccaggctgatggcaccctgaagcctgtggatgagaaggaggaggccgtggccgctgaggtgggctggatgacctctgtgaaggactgggccggcgtgatgatcagcgcccagaccctgaccggccgggtgctggtggtgctggtgtttgccctgagcatcggggccctggtgatctacttcatcgacagcagcaaccccatcgagagctgccagaacttctacaaggacttcaccctgcagattgacatggccttcaacgtgttcttcctgctgtacttcggcctgcgcttcatcgccgccaatgacaagctgtggttctggctggaggtgaacagcgtggtggacttcttcaccgtgccccctgtgtttgtgtctgtgtacctgaacagatcctggctgggcctgcgcttcctgcgggccctgcggctcatccagttcagcgagatcctgcagttcctgaacatcctgaagaccagcaacagcatcaagctggtgaacctgctgagcatcttcatcagcacctggctgacagctgctggcttcatccacctggtggagaacagcggggacccctgggagaacttccagaacaaccaggccctgacctactgggagtgtgtgtacctgctgatggtgaccatgagcacagtgggctatggagatgtgtatgccaagaccaccctgggccgcctcttcatggtgttcttcatcctgggcggcctggccatgtttgccagctatgtgcctgagatcatcgagctgattggcaacaggaagaagtatggaggcagctacagcgctgtgtctggcaggaagcacatcgtggtgtgtggccacatcaccctggagagcgtgagcaacttcctgaaggacttcctgcacaaggacagagatgatgtgaatgtggagatcgtgttcctgcacaacatcagccccaacctggagctggaggccctcttcaagaggcacttcacccaggtggagttctaccagggctctgtgctgaacccccatgacctggcccgggtgaagattgagagcgcagatgcctgcctgatcctggccaacaagtactgtgccgaccctgatgctgaagatgccagcaacatcatgagggtcatcagcatcaagaactaccaccccaagatccgcatcatcacccagatgctgcagtaccacaacaaggcccacctgctgaacatccccagctggaactggaaggagggagatgatgccatctgcctggccgagctgaagctgggcttcatcgcccagagctgcctggcccagggcctgagcaccatgctggccaacctcttctccatgaggagcttcatcaagattgaggaggacacctggcagaagtactacctggagggcgtgtccaatgagatgtacacagagtacctgagcagcgcctttgtgggcctgtccttccccaccgtgtgtgagctgtgctttgtgaagctgaagctgctgatgattgccatcgagtacaagagcgccaaccgggagagccgcatcctgatcaaccctggcaaccacctgaagatccaggagggcaccctgggcttcttcatcgccagtgatgccaaggaggtgaagagggccttcttctactgcaaggcctgccatgatgacatcacagaccccaagaggatcaagaagtgtggctgcaagaggcccaagatgagcatctacaagaggatgaggcgggcctgctgctttgactgtggccgctctgagcgggactgcagctgcatgagcggccgggtgagaggaaatgtggacaccctggagcgggccttccccctgagctctgtgtctgtgaatgactgcagcaccagcttccgggcctttgaagatgagcagcccagcaccctgagccccaagaagaagcagagaaatggaggcatgaggaacagccccaacaccagccccaagctgatgagacatgaccccctgctgatccctggaaatgaccagattgacaacatggacagcaatgtgaagaagtatgacagcacaggcatgttccactggtgtgcccccaaggagattgagaaggtgatcctgaccaggtctgaggccgccatgacagtgctgagcggccacgtggtggtgtgcatctttggagatgtgtcctctgccctgattggcctgaggaacctggtgatgcccctgcgggccagcaacttccactaccacgagctgaagcacatcgtgtttgtgggcagcattgagtacctgaagcgggagtgggagaccctgcacaacttccccaaggtgtccatcctgcccggcacccccctgagcagagctgacctgcgggctgtgaacatcaacctgtgtgacatgtgtgtgatcctgagcgccaaccagaacaacattgatgacaccagcctgcaggacaaggagtgcatcctggccagcctgaacatcaagtccatgcagtttgatgacagcattggagtgctgcaggccaacagccagggcttcaccccacctggcatggacaggagcagcccagacaacagccctgtgcacggcatgctgcggcagcccagcatcaccaccggggtgaacatccccatcatcacagagctggtgaatgacaccaacgtgcagttcctggaccaggatgatgatgatgatcctgacacagagctgtacctgacccagccctttgcctgtggcacagcctttgctgtgtctgtgctggacagcctgatgtctgccacctacttcaatgacaacatcctgaccctcatccgcaccctggtgactggaggagccaccccagagctggaggccctgattgctgaggagaatgccctgcggggcggctacagcaccccccagaccctggccaacagagaccgctgccgggtggcccagctggccctgctggatggcccctttgctgacctgggagatggcggctgctacggggacctcttctgcaaggccctgaagacctacaacatgctgtgcttcggcatctaccgcctgagagatgcccacctgagcacccccagccagtgcaccaagcgctacgtgatcaccaaccccccctatgaatttgagctggtgcccacagacctgatcttctgcctgatgcagtttgaccacaatgccggccagagccgggccagcctgagccacagcagccacagcagccagagcagcagcaagaagagcagctctgtgcacagcatccccagcacagccaaccggcagaaccggcccaagagccgggagagccgggacaagcagaatgccaccaggatgaacaggatgggccaggagaagaagtggttcacagatgagccagacaatgcctaccccaggaacatccagatcaagcccatgagcacccacatggccaaccagatcaaccagtacaagagcaccagcagcctcatcccccccatccgggaggtggaggatgagtgctag

SEQ ID NO: 282907 - DNA, 3630 bp, Artificial Sequence
  derived and/or modified sequence
agcaacatccacgccaaccacctgagcctggatgccagcagcagcagcagcagcagcagcagcagcagcagcagcagcagcagcagcagcagcagcagctctgtgcatgagcccaagatggatgccctgatcatccctgtgaccatggaggtgccctgtgacagccggggccagaggatgtggtgggccttcctggccagctccatggtgaccttctttggaggcctcttcatcatcctgctgtggaggaccctgaagtacctgtggacagtgtgctgccactgcggcggcaagaccaaggaggcccagaagatcaacaacggcagcagccaggctgatggcaccctgaagcctgtggatgagaaggaggaggccgtggccgctgaggtgggctggatgacctctgtgaaggactgggccggcgtgatgatcagcgcccagaccctgaccggccgggtgctggtggtgctggtgtttgccctgagcattggagccctggtgatctacttcatcgacagcagcaaccccatcgagagctgccagaacttctacaaggacttcaccctgcagattgacatggccttcaacgtgttcttcctgctgtacttcggcctgcgcttcatcgccgccaatgacaagctgtggttctggctggaggtgaacagcgtggtggacttcttcaccgtgccccctgtgtttgtgtctgtgtacctgaacagatcctggctgggcctgcgcttcctgcgggccctgcggctcatccagttcagcgagatcctgcagttcctgaacatcctgaagaccagcaacagcatcaagctggtgaacctgctgagcatcttcatcagcacctggctgacagctgctggcttcatccacctggtggagaacagcggggacccctgggagaacttccagaacaaccaggccctgacctactgggagtgtgtgtacctgctgatggtgaccatgagcacagtgggctatggagatgtgtatgccaagaccaccctgggccgcctcttcatggtgttcttcatcctgggcggcctggccatgtttgccagctatgtgcctgagatcatcgagctgattggcaacaggaagaagtatggaggcagctacagcgctgtgtctggcaggaagcacatcgtggtgtgtggccacatcaccctggagagcgtgagcaacttcctgaaggacttcctgcacaaggacagagatgatgtgaatgtggagatcgtgttcctgcacaacatcagccccaacctggagctggaggccctcttcaagaggcacttcacccaggtggagttctaccagggctctgtgctgaacccccatgacctggcccgggtgaagattgaatctgcagatgcctgcctgatcctggccaacaagtactgtgccgaccctgatgctgaagatgccagcaacatcatgagggtcatcagcatcaagaactaccaccccaagatccgcatcatcacccagatgctgcagtaccacaacaaggcccacctgctgaacatccccagctggaactggaaggagggagatgatgccatctgcctggccgagctgaagctgggcttcatcgcccagagctgcctggcccagggcctgagcaccatgctggccaacctcttctccatgaggagcttcatcaagattgaggaggacacctggcagaagtactacctggagggcgtgtccaatgagatgtacacagagtacctgagcagcgcctttgtgggcctgtccttccccaccgtgtgtgagctgtgctttgtgaagctgaagctgctgatgattgccatcgagtacaagagcgccaaccgggagagccgcatcctgatcaaccctggcaaccacctgaagatccaggagggcaccctgggcttcttcatcgccagtgatgccaaggaggtgaagagggccttcttctactgcaaggcctgccatgatgacatcacagaccccaagaggatcaagaagtgtggctgcaagaggcccaagatgagcatctacaagaggatgagaagagcctgctgctttgactgtggccgctctgagcgggactgcagctgcatgagcggccgggtgagaggaaatgtggacaccctggagcgggccttccccctgagctctgtgtctgtgaatgactgcagcaccagcttccgggcctttgaagatgagcagcccagcaccctgagccccaagaagaagcagagaaatggaggcatgaggaacagccccaacaccagccccaagctgatgagacatgaccccctgctgatccctggaaatgaccagattgacaacatggacagcaatgtgaagaagtatgacagcacaggcatgttccactggtgtgcccccaaggagattgagaaggtgatcctgaccaggtctgaggccgccatgacagtgctgagcggccacgtggtggtgtgcatctttggagatgtgagcagcgccctgattggcctgaggaacctggtgatgcccctgcgggccagcaacttccactaccacgagctgaagcacatcgtgtttgtgggcagcattgagtacctgaagcgggagtgggagaccctgcacaacttccccaaggtgtccatcctgcccggcacccccctgagcagagctgacctgcgggctgtgaacatcaacctgtgtgacatgtgtgtgatcctgagcgccaaccagaacaacattgatgacaccagcctgcaggacaaggagtgcatcctggccagcctgaacatcaagtccatgcagtttgatgacagcattggagtgctgcaggccaacagccagggcttcaccccacctggcatggacaggagcagcccagacaacagccctgtgcacggcatgctgcggcagcccagcatcaccactggagtgaacatccccatcatcacagagctggtgaatgacaccaacgtgcagttcctggaccaggatgatgatgatgatcctgacacagagctgtacctgacccagccctttgcctgtggcacagcctttgctgtgtctgtgctggacagcctgatgtctgccacctacttcaatgacaacatcctgaccctcatccgcaccctggtgactggaggagccaccccagagctggaggccctgattgctgaagaaaatgccctgcggggcggctacagcaccccccagaccctggccaacagagaccgctgccgggtggcccagctggccctgctggatggcccctttgctgacctgggagatggcggctgctatggagacctcttctgcaaggccctgaagacctacaacatgctgtgcttcggcatctaccgcctgagagatgcccacctgagcacccccagccagtgcaccaagagatatgtgatcaccaaccccccctatgaatttgagctggtgcccacagacctgatcttctgcctgatgcagtttgaccacaatgccggccagagccgggccagcctgagccacagcagccacagcagccagagcagcagcaagaagagcagctctgtgcacagcatccccagcacagccaaccggcagaaccggcccaagagccgggagagccgggacaagcagaagaaggagatggtgtacagatag

SEQ ID NO: 282908 - DNA, 3516 bp, Artificial Sequence
  derived and/or modified sequence
atggacgccctgatcatccccgtgaccatggaggtgccctgcgactcccggggacagcggatgtggtgggccttcttggccagcagtatggtgaccttctttggaggactgtttataattctcctgtggcgtacactcaaatacctttggactgtctgctgtcactgcggaggcaagaccaaagaagcccagaagattaacaatgggagctcccaggctgatggcacgctcaagcccgtggatgagaaagaagaggcagtcgcagctgaagttggctggatgactagcgttaaggactgggctggggtgatgattagtgcgcagacactaaccggccgggtgctcgtagtccttgtcttcgcgctctccatcggtgcattggtgatctacttcatcgactcatccaaccctattgagagttgtcagaacttctataaggattttaccctccaaatcgatatggccttcaacgtctttttcctgctttattttggcttgagattcattgccgccaatgataaactttggttctggctagaagtcaattccgtggttgactttttcacggtacccccagtcttcgtgagcgtttatttaaaccgctcctggctaggacttaggttcctccgtgcacttaggctcatccagtttagcgagattctgcagttcctgaacatcttaaagacaagtaacagtatcaaacttgttaacctcctgagcatttttatctccacatggctgaccgcagccgggtttattcatctggtggagaacagcggcgatccatgggagaacttccagaataaccaagctcttacctactgggagtgcgtctacctgctgatggtgacaatgtccaccgtcggctacggtgacgtctatgcgaagacaacactaggaagactgttcatggttttcttcattctcggcggtctggcaatgttcgcctcctatgtcccagaaatcatcgaattaataggtaaccgcaagaaatacggaggaagttactccgcagtgagtggccgcaaacatattgtcgtgtgcggccacatcactcttgaatccgtgtcaaatttcttgaaggattttctccacaaagatcgggacgacgtgaacgtggagatcgtatttttgcacaacatttcacccaacttagaactggaggcgttgttcaagcgtcatttcacacaggtcgagttctatcaggggtctgtcctgaatccacatgatcttgcgagagtgaagattgaaagtgctgacgcctgtctgattctggcgaacaagtattgtgcagatcctgatgcagaagacgcttctaacatcatgagggtcatctctatcaaaaattatcacccaaaaattcgcatcatcacccagatgctccagtaccacaacaaggcccacctgctgaatatcccctcttggaattggaaagagggcgatgatgctatatgtctggcggagttgaagttagggttcattgcccagtcttgcctcgcccagggtctgagtacgatgttggccaatcttttctccatgcggtctttcattaaaatcgaagaagatacgtggcagaagtattatctggagggagtgagtaatgagatgtacacagaatacttgagctcggccttcgtgggactgagcttccctaccgtgtgcgaactgtgtttcgtgaagctcaaattgttgatgatcgccattgagtacaaaagcgccaacagagaaagcagaattcttattaaccctgggaaccatctgaagattcaggaaggaactctcgggttctttatcgccagcgatgctaaggaagtaaagcgtgccttcttctattgcaaggcctgtcacgacgatattacggatcccaagcgtatcaagaagtgtgggtgtaagagacctaagatgtcaatttataaaagaatgcggcgcgcatgttgcttcgactgcgggagatctgaaagagattgcagctgtatgtctggacgtgtgagaggaaatgtggacacacttgagcgcgcctttcctctcagttctgtttcagtgaacgattgtagcactagctttagggcattcgaggacgagcaacctagcaccctgagccccaagaagaaacagcggaacggtggcatgcgtaatagccccaatacctcacctaagttgatgcgccacgatcctttattaattcctggcaatgaccagatcgacaatatggattccaatgtgaagaaatacgactcaaccgggatgttccactggtgtgcaccgaaagaaattgagaaggtcattctaacacgaagtgaagctgctatgactgtgctatccggacacgtggtggtgtgtatttttggtgacgtgagtagcgctttaatcggactgcgtaatctcgtcatgcccctccgggcctcaaactttcactatcacgagctcaagcacatcgtcttcgtggggagcatagaatacctaaagcgcgagtgggagactttacataattttcccaaagtgagcatcttgcctgggaccccactaagtcgtgccgacttgcgagctgtgaatatcaacctttgtgacatgtgcgtcatcctgtcagcaaatcagaataacattgacgacacaagcctccaggataaggagtgcattctggcatcgctcaacatcaagtccatgcagttcgacgacagcattggggttcttcaagctaattcccagggcttcacaccccccggtatggaccgctcctcccctgacaacagcccggtgcatgggatgttaagacaaccgtccattactacaggtgtcaacatccctatcatcactgagcttgtgaacgacaccaacgtccagtttctggatcaagacgacgatgacgatcctgatacagaattgtatttaacacagccattcgcctgtggaactgcatttgcagtgtcagtgctggactctctgatgtccgccacttatttcaatgacaacatcctgacactgattcgaacgcttgtcacagggggcgctacgccagaactggaggcccttattgccgaagaaaacgccctgcgagggggctactccacccctcagacgctcgcaaatcgtgatcgatgcagggtcgcccagctagccctgcttgatgggccattcgcagaccttggcgacggggggtgctacggtgacctcttctgcaaggccctcaagacgtacaatatgctgtgtttcggcatctaccggctccgcgacgcccatctttcaacaccatctcagtgcactaaacgttacgtcatcaccaacccgccttacgaatttgagttggtgccaacagatcttatcttctgcctgatgcaatttgaccataacgcagggcagagcagagccagcttaagtcatagcagccattccagtcaatctagttccaagaaatcgagctctgtccacagcatcccaagcactgcaaatcgccagaatcggccgaagagccgtgagagtcgagataagcagaaccggaaggaaatggtttatagatag

SEQ ID NO: 282909 - DNA, 3678 bp, Artificial Sequence
  derived and/or modified sequence
cccaagatggacgccctgatcatccccgtgaccatggaggtgccctgtgatagccggggccagcggatgtggtgggcattcctcgcatcttcgatggtgacattcttcgggggcctgtttattattctgctgtggcgaactcttaaatatttatggaccgtctgctgtcactgtggcggtaagacaaaagaagctcagaaaatcaataatgggtcaagccaggctgatggtactctcaaacctgtggacgagaaggaggaagctgttgccgctgaagtgggctggatgacttctgtcaaagattgggcgggggttatgatatctgcccagacattgaccggcagggtgctggtcgttttggtctttgccttgtcaatcggtgcgctggtcatttactttattgacagttccaatccaatcgaaagctgtcagaatttctataaggactttactctccagatagacatggcatttaacgtgtttttcctgctgtactttggcctcagatttatcgccgccaatgacaagttgtggttctggctggaggtaaattctgtggtcgattttttcactgtgcctcccgtgttcgtatccgtctacctgaacaggtcgtggcttggactgagattcctgcgcgccttaagattgatacaattctccgaaatcctgcagttcctgaacattctgaaaacgtctaactcgataaagctcgtgaatctgctgagcatcttcattagtacctggttgactgccgccggatttatccacctcgtggaaaacagcggggacccgtgggagaacttccaaaataaccaggctcttacatattgggaatgcgtttaccttctgatggttaccatgtctactgttggatatggcgatgtgtacgccaagacaaccctgggcaggctctttatggtgtttttcatcttggggggactagcaatgtttgcctcatacgttcctgagatcatagagctaatcggcaacaggaagaagtacggcggatcatacagcgctgtatcaggacgcaagcatattgtagtgtgtggacacattaccttggagtccgtctcgaattttctcaaggacttcttgcacaaggatcgagacgacgtcaacgtcgagatcgtgtttctccacaacatatctcccaaccttgagcttgaagcattgtttaagaggcatttcacacaggtagagttctaccagggatccgtgctgaatccacatgatctggccagggtgaagatcgaaagcgctgatgcttgccttattctcgccaataaatattgtgcggaccctgacgccgaagatgcatcaaatatcatgcgcgtgatctccatcaaaaattaccatcctaaaatccgaattatcacccagatgctgcagtatcataacaaggcccatctactgaatatccctagttggaattggaaggaaggtgacgatgccatctgtttagccgaactgaaactggggtttatagcccagtcctgcctcgcccaggggctaagcactatgctcgctaatctctttagcatgcggagtttcatcaaaatagaagaagacacttggcaaaagtactacttagaaggtgtatcaaatgaaatgtatactgaatatctcagcagtgctttcgtaggcctctcattcccaaccgtttgcgaactgtgtttcgtcaaattgaagctcctgatgattgcaatagagtataagtctgctaatagggaatcccgtatactcatcaatcccggtaaccacctcaagatacaggagggtactttgggattctttattgcgagtgatgctaaagaagtgaaaagggcattcttctactgtaaggcttgccacgacgatattaccgaccccaagcggatcaaaaagtgtggatgcaaaaggcccaagatgagcatctataagcgtatgagacgagcctgttgttttgattgtggacgtagcgagagggattgctcttgtatgagcgggagggtgagaggaaatgtggatacccttgaacgagcttttcctttaagttccgtgtcagtcaacgactgtagcacttcctttcgcgcgttcgaggacgaacagcccagtactctgagccccaagaagaagcagcggaacgggggcatgcgtaatagtcccaataccagcccaaagcttatgcgtcatgacccccttctcattccaggaaatgatcagatcgacaatatggattcgaacgtgaagaaatacgactccacaggaatgttccactggtgtgccccaaaggaaatcgagaaagtaattctgactcgcagcgaggccgccatgacagtgctgagtggacatgtcgtggtttgtattttcggggatgtttcgtctgccctcattgggctgaggaacctggttatgcctctgcgtgcctccaacttccattatcatgagctcaagcacatagtgtttgttgggtctattgaatatctgaaacgggagtgggagaccctgcacaacttccctaaggtgtctatactccccggcacccctttgagccgggctgatctccgggcagtaaatatcaacctgtgcgacatgtgtgtgatcctttcagccaaccagaataatattgacgataccagcttgcaagacaaggagtgcattcttgcgtccctaaacatcaagagcatgcagtttgacgatagtattggggttctccaggcaaactcgcaggggttcacaccccccggcatggaccgatcctcacccgataactcccccgtccacgggatgctgagacagccctcgatcactactggtgtgaacataccgattattacagagttggtgaacgataccaatgtgcagttcctagaccaagacgatgacgacgatcctgatacagagctgtatctgacgcagccatttgcttgtggcactgccttcgctgtaagtgtgctagactccttgatgtccgcaacatacttcaacgacaacattttgaccctaatcagaacgctggttacgggtggggcaacgcccgagcttgaggccttgattgcggaggagaacgctcttaggggcggctactccacaccccagaccctcgctaatcgggatcgatgtcgggtggcccagctcgccctcctggacggtcccttcgcagacctcggcgacggaggatgttatggtgatttattctgtaaagcattgaagacttacaacatgctgtgctttggaatctaccgactgagggacgcgcacttgtctaccccaagccagtgcacgaagcgatacgtgattacgaaccccccctacgagttcgagctggtcccaaccgatctaatcttctgtctgatgcagtttgatcacaacgccggacaatcccgagcctcgctgagccattcatcccatagcagccagtcttcctctaagaaatcctctagcgttcactcgattccttctacagccaacaggcaaaacagaccgaagtcccgggagtccagagataaacagaatgctactcgcatgaaccgcatgggccaggagaaaaaatggttcacggacgagcctgacaacgcctatcccagaaatattcagataaagcctatgtccacacacatggcgaaccaaataaaccagtacaaatctacctctagtctaatccccccaattagagaagttgaggacgagtgctag

SEQ ID NO: 282910 - DNA, 3630 bp, Artificial Sequence
  derived and/or modified sequence
agcaacatccacgccaaccacctgagcctggacgccagcagcagcagttcttctagcagctcaagctctagctcatcctctagcagctcctcaagctcatccgtgcatgaacccaaaatggatgctctgatcatcccggtgacaatggaagtgccttgtgacagccgaggtcagaggatgtggtgggcctttcttgcctctagtatggtcacattctttggcgggctgtttatcatcctcctgtggaggacccttaagtatttgtggacagtctgctgccactgtggcggcaaaactaaagaggctcaaaagatcaataacggcagctcccaagcggatgggacactgaagccagtcgacgagaaggaggaagcagtggctgctgaagtggggtggatgacttctgtaaaggattgggccggcgttatgattagcgctcagactctgacaggtcgggtgctggtcgttttggtttttgcactctctatcggcgccctggtcatatatttcatcgatagttcaaaccccatcgaaagttgtcagaatttttacaaagacttcaccctccagattgacatggcttttaatgtgttcttcctactctatttcggcctccgctttatcgctgcaaacgacaagttatggttctggcttgaagtgaactcggtcgttgattttttcacagtgccacccgtctttgtctcagtgtacctcaacagatcctggctagggctgcgttttttacgcgccctgcggttaattcaattctctgagatcctgcagtttctcaacattttgaagacctctaactccattaagctggtaaatctcttgtccatcttcatctcaacctggctcacagccgcgggtttcattcacctggtcgagaactctggagacccgtgggaaaacttccagaacaatcaggcactgacatattgggagtgcgtctacctgctgatggtgacgatgagtaccgtgggctatggggatgtttatgccaaaactaccttgggacgtctctttatggtgttctttattttaggcgggcttgccatgttcgcctcttatgttcctgagatcatcgagctgatcggaaacaggaagaaatacgggggctcttattcagccgtgtccgggcggaaacacatcgtggtgtgcggccacataacgctcgagtctgtgagtaatttcctgaaggacttccttcataaggatcgcgacgatgtgaacgtggagatcgtgttcctccacaacattagtccgaaccttgaattagaggcgctgttcaagaggcattttacccaggtggagttctatcaggggtctgtgttgaatccccacgacttagctcgagtgaagatcgaatccgccgatgcatgtctaatactcgcaaacaagtattgtgcagatcccgacgccgaagatgcttctaatatcatgcgcgtcataagtatcaagaactaccacccgaaaatacgtattataacccaaatgctccagtaccacaataaggctcacctgctgaatataccctcatggaactggaaggagggcgacgacgcaatatgtctcgcggagctcaaactgggatttattgcccaatcgtgtctggcccaaggcctctctaccatgttagccaacttgttctctatgcgctccttcatcaagatcgaggaagacacctggcagaaatactaccttgagggcgtctccaacgagatgtacacagaatacctcagctccgccttcgtggggctgtccttccctactgtgtgcgagctgtgttttgtgaagctaaagttgctcatgatagcaatcgagtacaagagtgctaatcgcgagtcacgcattctcattaaccctggaaaccatctaaagatccaggagggcacattgggattttttatagcctctgatgccaaagaagtaaaaagagctttcttctactgtaaagcctgtcacgacgatatcaccgaccccaaaaggattaaaaagtgcggatgcaaaagaccaaagatgagtatatacaagaggatgcggagagcatgctgcttcgattgtgggagaagcgagagggactgcagttgtatgtcaggcagagttcgagggaatgtggacacccttgaacgggcctttccactaagctccgtctccgtgaacgactgttctacaagcttcagagcattcgaagacgaacaaccttccacactcagccccaagaaaaagcagcggaacggcggtatgcggaattctcccaacacaagccctaaactaatgcgacacgatcctctgttgatcccaggcaacgaccagatcgataatatggactccaatgttaagaaatatgacagtacaggcatgtttcactggtgtgcaccaaaagagatagagaaggtgattctgactcggtcagaggccgccatgacagtgctcagcggccatgtagtggtttgtatctttggagatgtgtcatcagctctgatcggtctaaggaacctagtgatgccgctgagggctagcaacttccactatcacgaactgaaacacattgtgtttgtcggaagtattgagtatttgaagcgcgagtgggagaccctgcacaactttcccaaggtcagtattctgcctggcactcctctcagcagagcagacctcagagcggtgaacatcaacctctgcgatatgtgcgtcatcctttctgccaaccaaaacaatattgatgacacctctctccaggataaagaatgcatactggcatctctaaacataaagtctatgcagttcgacgacagtattggggtcctccaggctaacagccagggcttcaccccccccggtatggacaggagttccccagataactctccagtgcatggaatgttacgtcaaccaagcattaccaccggggttaatattcctatcataacagagctcgtgaacgacaccaacgtccagtttttggatcaggacgacgacgatgatccagataccgagttgtacctaacccagcctttcgcgtgtggcactgccttcgctgtctcggttcttgacagcctcatgtctgccacctattttaatgacaacattctgacactcattagaactcttgtcactggaggcgcaacccccgagctggaggctctgatagcggaagagaacgctctccgaggaggatattccactccacagacattagctaatcgggataggtgccgcgtcgcccaactggcgctccttgatgggccctttgctgatcttggggatggaggatgttacggagatctgttttgtaaggcgctgaaaacctacaacatgttatgtttcggcatctacagacttcgtgacgcacatttgtctaccccctcacagtgcacaaaacgctacgtaataaccaatccaccctacgaatttgaactggtgcccactgacctgattttttgcctgatgcagttcgaccacaatgccggccaatctcgcgctagcctgagccatagcagccacagctctcagtcctcctctaagaaatcttctagtgtgcacagcatcccatctacggccaaccgccagaatagacctaaatctagggagagcagggacaaacagaagaaggaaatggtgtaccggtag

SEQ ID NO: 282911 - DNA, 3788 bp, Artificial Sequence
  derived and/or modified sequence
atggatgcgctcatcatcccggtgaccatggaggtgccgtgcgacagccggggccaacgcatgtggtgggctttcctggcctcctccatggtgactttcttcgggggcctcttcatcatcttgctctggcggacgctcaagtacctgtggaccgtgtgctgccactgcgggggcaagacgaaggaggcccagaagattaacaatggctcaagccaggcggatggcactctcaaaccagtggatgaaaaagaggaggcagtggccgccgaggtcggctggatgacctccgtgaaggactgggcgggggtgatgatatccgcccagacactgactggcagagtcctggttgtcttagtctttgctctcagcatcggtgcacttgtaatatacttcatagattcatcaaacccaatagaatcctgccagaatttctacaaagatttcacattacagatcgacatggctttcaacgtgttcttccttctctacttcggcttgcggtttattgcagccaacgataaattgtggttctggctggaagtgaactctgtagtggatttcttcacggtgccccccgtgtttgtgtctgtgtacttaaacagaagttggcttggtttgagatttttaagagctctgagactgatacagttttcagaaattttgcagtttctgaatattcttaaaacaagtaattccatcaagctggtgaatctgctctccatatttatcagcacgtggctgactgcagccgggttcatccatttggtggagaattcaggggacccatgggaaaatttccaaaacaaccaggctctcacctactgggaatgtgtctatttactcatggtcacaatgtccaccgttggttatggggatgtttatgcaaaaaccacacttgggcgcctcttcatggtcttcttcatcctcgggggactggccatgtttgccagctacgtccctgaaatcatagagttaataggaaaccgcaagaaatacgggggctcctatagtgcggttagtggaagaaagcacattgtggtctgcggacacatcactctggagagtgtttccaacttcctgaaggactttctgcacaaggaccgggatgacgtcaatgtggagatcgtttttcttcacaacatctcccccaacctggagcttgaagctctgttcaaacgacattttactcaggtggaattttatcagggttccgtcctcaatccacatgatcttgcaagagtcaagatagagtcagcagatgcatgcctgatccttgccaacaagtactgcgctgacccggatgcggaggatgcctcgaatatcatgagagtaatctccataaagaactaccatccgaagataagaatcatcactcaaatgctgcagtatcacaacaaggcccatctgctaaacatcccgagctggaattggaaagaaggtgatgacgcaatctgcctcgcagagttgaagttgggcttcatagcccagagctgcctggctcaaggcctctccaccatgcttgccaacctcttctccatgaggtcattcataaagattgaggaagacacatggcagaaatactacttggaaggagtctcaaatgaaatgtacacagaatatctctccagtgccttcgtgggtctgtccttccctactgtttgtgagctgtgttttgtgaagctcaagctcctaatgatagccattgagtacaagtctgccaaccgagagagccgtatattaattaatcctggaaaccatcttaagatccaagaaggtactttaggatttttcatcgcaagtgatgccaaagaagttaaaagggcatttttttactgcaaggcctgtcatgatgacatcacagatcccaaaagaataaaaaaatgtggctgcaaacggcccaagatgtccatctacaagagaatgagacgggcatgttgttttgattgcggacgttctgagcgtgactgctcatgcatgtcaggccgtgtgcgtggtaacgtggacacccttgagagagccttcccactttcttctgtctctgttaatgattgctccaccagtttccgtgcctttgaagatgagcagccgtcaacactatcaccaaaaaaaaagcaacggaatggaggcatgcggaactcacccaacacctcgcctaagctgatgaggcatgaccccttgttaattcctggcaatgatcagattgacaacatggactccaatgtgaagaagtacgactctactgggatgtttcactggtgtgcacccaaggagatagagaaagtcatcctgactcgaagtgaagctgccatgaccgtcctgagtggccatgtcgtggtctgcatctttggcgacgtcagctcagccctgatcggcctccggaacctggtgatgccgctccgtgccagcaactttcattaccatgagctcaagcacattgtgtttgtgggctctattgagtacctcaagcgggaatgggagacgcttcataacttccccaaagtgtccatattgcctggtacgccattaagtcgggctgatttaagggctgtcaacatcaacctctgtgacatgtgcgttatcctgtcagccaatcagaataatattgatgatacttcgctgcaggacaaggaatgcatcttggcgtcactcaacatcaaatctatgcagtttgatgacagcatcggagtcttgcaggctaattcccaagggttcacacctccaggaatggatagatcctctccagataacagcccagtgcacgggatgttacgtcaaccatccatcacaactggggtcaacatccccatcatcactgaactagtgaacgatactaatgttcagtttttggaccaagacgatgatgatgaccctgatacagaactgtacctcacgcagccctttgcctgtgggacagcatttgccgtcagtgtcctggactcactcatgagcgcgacgtacttcaatgacaatatcctcaccctgatacggaccctggtgaccggaggagccacgccggagctggaggctctgattgctgaggaaaacgcccttagaggtggctacagcaccccgcagacactggccaatagggaccgctgccgcgtggcccagttagctctgctcgatgggccatttgcggacttaggggatggtggttgttatggtgatctgttctgcaaagctctgaaaacatataatatgctttgttttggaatttaccggctgagagatgctcacctcagcacccccagtcagtgcacaaagaggtatgtcatcaccaacccgccctatgagtttgagctcgtgccgacggacctgatcttctgcttaatgcagtttgaccacaatgccggccagtcccgggccagcctgtcccattcctcccactcgtcgcagtcctccagcaagaagagctcctctgttcactccatcccatccacagcaaaccgacagaaccggcccaagtccagggagtcccgggacaaacagaacagaaaagaaatggtttacagatgaaccggataatgcctatcccagaaacattcaaatcaagcccatgagtacccacatggctaaccagatcaaccaatataaatccacaagcagcttgattccaccaatcagagaagttgaagatgaatgttgactcccaggagaccagaactatttttttaaagcctgacaaacttcataaatggtgatgtgacttttcttcttacatgctgaatcactggtggaaacgttaggataagcaagaattgccagaaaataaagtagacagatctttc

SEQ ID NO: 282912 - DNA, 3820 bp, Artificial Sequence
  derived and/or modified sequence
cccaagatggatgcgctcatcatcccggtgaccatggaggtgccgtgcgacagccggggccaacgcatgtggtgggctttcctggcctcctccatggtgactttcttcgggggcctcttcatcatcttgctctggcggacgctcaagtacctgtggaccgtgtgctgccactgcgggggcaagacgaaggaggcccagaagattaacaatggctcaagccaggcggatggcactctcaaaccagtggatgaaaaagaggaggcagtggccgccgaggtcggctggatgacctccgtgaaggactgggcgggggtgatgatatccgcccagacactgactggcagagtcctggttgtcttagtctttgctctcagcatcggtgcacttgtaatatacttcatagattcatcaaacccaatagaatcctgccagaatttctacaaagatttcacattacagatcgacatggctttcaacgtgttcttccttctctacttcggcttgcggtttattgcagccaacgataaattgtggttctggctggaagtgaactctgtagtggatttcttcacggtgccccccgtgtttgtgtctgtgtacttaaacagaagttggcttggtttgagatttttaagagctctgagactgatacagttttcagaaattttgcagtttctgaatattcttaaaacaagtaattccatcaagctggtgaatctgctctccatatttatcagcacgtggctgactgcagccgggttcatccatttggtggagaattcaggggacccatgggaaaatttccaaaacaaccaggctctcacctactgggaatgtgtctatttactcatggtcacaatgtccaccgttggttatggggatgtttatgcaaaaaccacacttgggcgcctcttcatggtcttcttcatcctcgggggactggccatgtttgccagctacgtccctgaaatcatagagttaataggaaaccgcaagaaatacgggggctcctatagtgcggttagtggaagaaagcacattgtggtctgcggacacatcactctggagagtgtttccaacttcctgaaggactttctgcacaaggaccgggatgacgtcaatgtggagatcgtttttcttcacaacatctcccccaacctggagcttgaagctctgttcaaacgacattttactcaggtggaattttatcagggttccgtcctcaatccacatgatcttgcaagagtcaagatagagtcagcagatgcatgcctgatccttgccaacaagtactgcgctgacccggatgcggaggatgcctcgaatatcatgagagtaatctccataaagaactaccatccgaagataagaatcatcactcaaatgctgcagtatcacaacaaggcccatctgctaaacatcccgagctggaattggaaagaaggtgatgacgcaatctgcctcgcagagttgaagttgggcttcatagcccagagctgcctggctcaaggcctctccaccatgcttgccaacctcttctccatgaggtcattcataaagattgaggaagacacatggcagaaatactacttggaaggagtctcaaatgaaatgtacacagaatatctctccagtgccttcgtgggtctgtccttccctactgtttgtgagctgtgttttgtgaagctcaagctcctaatgatagccattgagtacaagtctgccaaccgagagagccgtatattaattaatcctggaaaccatcttaagatccaagaaggtactttaggatttttcatcgcaagtgatgccaaagaagttaaaagggcatttttttactgcaaggcctgtcatgatgacatcacagatcccaaaagaataaaaaaatgtggctgcaaacggcccaagatgtccatctacaagagaatgagacgggcatgttgttttgattgcggacgttctgagcgtgactgctcatgcatgtcaggccgtgtgcgtggtaacgtggacacccttgagagagccttcccactttcttctgtctctgttaatgattgctccaccagtttccgtgcctttgaagatgagcagccgtcaacactatcaccaaaaaaaaagcaacggaatggaggcatgcggaactcacccaacacctcgcctaagctgatgaggcatgaccccttgttaattcctggcaatgatcagattgacaacatggactccaatgtgaagaagtacgactctactgggatgtttcactggtgtgcacccaaggagatagagaaagtcatcctgactcgaagtgaagctgccatgaccgtcctgagtggccatgtcgtggtctgcatctttggcgacgtcagctcagccctgatcggcctccggaacctggtgatgccgctccgtgccagcaactttcattaccatgagctcaagcacattgtgtttgtgggctctattgagtacctcaagcgggaatgggagacgcttcataacttccccaaagtgtccatattgcctggtacgccattaagtcgggctgatttaagggctgtcaacatcaacctctgtgacatgtgcgttatcctgtcagccaatcagaataatattgatgatacttcgctgcaggacaaggaatgcatcttggcgtcactcaacatcaaatctatgcagtttgatgacagcatcggagtcttgcaggctaattcccaagggttcacacctccaggaatggatagatcctctccagataacagcccagtgcacgggatgttacgtcaaccatccatcacaactggggtcaacatccccatcatcactgaactagtgaacgatactaatgttcagtttttggaccaagacgatgatgatgaccctgatacagaactgtacctcacgcagccctttgcctgtgggacagcatttgccgtcagtgtcctggactcactcatgagcgcgacgtacttcaatgacaatatcctcaccctgatacggaccctggtgaccggaggagccacgccggagctggaggctctgattgctgaggaaaacgcccttagaggtggctacagcaccccgcagacactggccaatagggaccgctgccgcgtggcccagttagctctgctcgatgggccatttgcggacttaggggatggtggttgttatggtgatctgttctgcaaagctctgaaaacatataatatgctttgttttggaatttaccggctgagagatgctcacctcagcacccccagtcagtgcacaaagaggtatgtcatcaccaacccgccctatgagtttgagctcgtgccgacggacctgatcttctgcttaatgcagtttgaccacaatgccggccagtcccgggccagcctgtcccattcctcccactcgtcgcagtcctccagcaagaagagctcctctgttcactccatcccatccacagcaaaccgacagaaccggcccaagtccagggagtcccgggacaaacagaatgcaacaaggatgaatagaatgggccaagaaaagaaatggtttacagatgaaccggataatgcctatcccagaaacattcaaatcaagcccatgagtacccacatggctaaccagatcaaccaatataaatccacaagcagcttgattccaccaatcagagaagttgaagatgaatgttgactcccaggagaccagaactatttttttaaagcctgacaaacttcataaatggtgatgtgacttttcttcttacatgctgaatcactggtggaaacgttaggataagcaagaattgccagaaaataaagtagacagatctttc

SEQ ID NO: 282913 - DNA, 3902 bp, Artificial Sequence
  derived and/or modified sequence
agcaatatccacgcgaaccatctcagcctagacgcgtcctcctcctcctcctcctcctcttcctcttcttcttcttcctcctcctcttcctcctcgtcctcggtccacgagcccaagatggatgcgctcatcatcccggtgaccatggaggtgccgtgcgacagccggggccaacgcatgtggtgggctttcctggcctcctccatggtgactttcttcgggggcctcttcatcatcttgctctggcggacgctcaagtacctgtggaccgtgtgctgccactgcgggggcaagacgaaggaggcccagaagattaacaatggctcaagccaggcggatggcactctcaaaccagtggatgaaaaagaggaggcagtggccgccgaggtcggctggatgacctccgtgaaggactgggcgggggtgatgatatccgcccagacactgactggcagagtcctggttgtcttagtctttgctctcagcatcggtgcacttgtaatatacttcatagattcatcaaacccaatagaatcctgccagaatttctacaaagatttcacattacagatcgacatggctttcaacgtgttcttccttctctacttcggcttgcggtttattgcagccaacgataaattgtggttctggctggaagtgaactctgtagtggatttcttcacggtgccccccgtgtttgtgtctgtgtacttaaacagaagttggcttggtttgagatttttaagagctctgagactgatacagttttcagaaattttgcagtttctgaatattcttaaaacaagtaattccatcaagctggtgaatctgctctccatatttatcagcacgtggctgactgcagccgggttcatccatttggtggagaattcaggggacccatgggaaaatttccaaaacaaccaggctctcacctactgggaatgtgtctatttactcatggtcacaatgtccaccgttggttatggggatgtttatgcaaaaaccacacttgggcgcctcttcatggtcttcttcatcctcgggggactggccatgtttgccagctacgtccctgaaatcatagagttaataggaaaccgcaagaaatacgggggctcctatagtgcggttagtggaagaaagcacattgtggtctgcggacacatcactctggagagtgtttccaacttcctgaaggactttctgcacaaggaccgggatgacgtcaatgtggagatcgtttttcttcacaacatctcccccaacctggagcttgaagctctgttcaaacgacattttactcaggtggaattttatcagggttccgtcctcaatccacatgatcttgcaagagtcaagatagagtcagcagatgcatgcctgatccttgccaacaagtactgcgctgacccggatgcggaggatgcctcgaatatcatgagagtaatctccataaagaactaccatccgaagataagaatcatcactcaaatgctgcagtatcacaacaaggcccatctgctaaacatcccgagctggaattggaaagaaggtgatgacgcaatctgcctcgcagagttgaagttgggcttcatagcccagagctgcctggctcaaggcctctccaccatgcttgccaacctcttctccatgaggtcattcataaagattgaggaagacacatggcagaaatactacttggaaggagtctcaaatgaaatgtacacagaatatctctccagtgccttcgtgggtctgtccttccctactgtttgtgagctgtgttttgtgaagctcaagctcctaatgatagccattgagtacaagtctgccaaccgagagagccgtatattaattaatcctggaaaccatcttaagatccaagaaggtactttaggatttttcatcgcaagtgatgccaaagaagttaaaagggcatttttttactgcaaggcctgtcatgatgacatcacagatcccaaaagaataaaaaaatgtggctgcaaacggcccaagatgtccatctacaagagaatgagacgggcatgttgttttgattgcggacgttctgagcgtgactgctcatgcatgtcaggccgtgtgcgtggtaacgtggacacccttgagagagccttcccactttcttctgtctctgttaatgattgctccaccagtttccgtgcctttgaagatgagcagccgtcaacactatcaccaaaaaaaaagcaacggaatggaggcatgcggaactcacccaacacctcgcctaagctgatgaggcatgaccccttgttaattcctggcaatgatcagattgacaacatggactccaatgtgaagaagtacgactctactgggatgtttcactggtgtgcacccaaggagatagagaaagtcatcctgactcgaagtgaagctgccatgaccgtcctgagtggccatgtcgtggtctgcatctttggcgacgtcagctcagccctgatcggcctccggaacctggtgatgccgctccgtgccagcaactttcattaccatgagctcaagcacattgtgtttgtgggctctattgagtacctcaagcgggaatgggagacgcttcataacttccccaaagtgtccatattgcctggtacgccattaagtcgggctgatttaagggctgtcaacatcaacctctgtgacatgtgcgttatcctgtcagccaatcagaataatattgatgatacttcgctgcaggacaaggaatgcatcttggcgtcactcaacatcaaatctatgcagtttgatgacagcatcggagtcttgcaggctaattcccaagggttcacacctccaggaatggatagatcctctccagataacagcccagtgcacgggatgttacgtcaaccatccatcacaactggggtcaacatccccatcatcactgaactagtgaacgatactaatgttcagtttttggaccaagacgatgatgatgaccctgatacagaactgtacctcacgcagccctttgcctgtgggacagcatttgccgtcagtgtcctggactcactcatgagcgcgacgtacttcaatgacaatatcctcaccctgatacggaccctggtgaccggaggagccacgccggagctggaggctctgattgctgaggaaaacgcccttagaggtggctacagcaccccgcagacactggccaatagggaccgctgccgcgtggcccagttagctctgctcgatgggccatttgcggacttaggggatggtggttgttatggtgatctgttctgcaaagctctgaaaacatataatatgctttgttttggaatttaccggctgagagatgctcacctcagcacccccagtcagtgcacaaagaggtatgtcatcaccaacccgccctatgagtttgagctcgtgccgacggacctgatcttctgcttaatgcagtttgaccacaatgccggccagtcccgggccagcctgtcccattcctcccactcgtcgcagtcctccagcaagaagagctcctctgttcactccatcccatccacagcaaaccgacagaaccggcccaagtccagggagtcccgggacaaacagaaaaaagaaatggtttacagatgaaccggataatgcctatcccagaaacattcaaatcaagcccatgagtacccacatggctaaccagatcaaccaatataaatccacaagcagcttgattccaccaatcagagaagttgaagatgaatgttgactcccaggagaccagaactatttttttaaagcctgacaaacttcataaatggtgatgtgacttttcttcttacatgctgaatcactggtggaaacgttaggataagcaagaattgccagaaaataaagtagacagatctttc

SEQ ID NO: 282914 - DNA, 3516 bp, Artificial Sequence
  derived and/or modified sequence
atggatgccttgattatccctgtgaccatggaagtcccttgcgacagcagaggccagcgcatgtggtgggcgttcttggcttctagcatggtgactttttttggagggttatttataattctgttgtggcgaactcttaagtacctgtggacagtgtgctgtcattgtggcggtaaaacgaaagaggcgcaaaagatcaacaatgggagcagccaagctgatggcaccctgaagcctgtggatgaaaaagaggaagcggtagctgccgaagtgggttggatgacctccgtcaaagactgggccggagtgatgattagtgcccagacactaaccgggagagtgcttgtggtcctggtctttgccctgagtatcggcgcactggtcatatattttatcgatagctccaatccaattgagagttgccagaatttctataaggatttcacactgcagatcgacatggccttcaacgtttttttcctgctatattttggcctgcgcttcatcgctgctaatgataagttgtggttctggctcgaggtgaactctgtggtggactttttcactgtaccaccagttttcgtttccgtgtacttgaatcgcagttggcttggcctgcgtttcctgcgggcactaaggcttatccagttttccgaaattctgcagttcctgaatatcttgaagacaagcaactcaatcaagcttgttaatcttctgagcatctttatctccacctggttaaccgctgcaggcttcatccatctggtggagaactcgggagatccgtgggaaaacttccagaataatcaagctttgacttattgggagtgtgtttatctgctcatggtgactatgagtacagtggggtatggagacgtttacgcaaaaaccaccctgggccgtcttttcatggtctttttcatccttggcggtctggcaatgttcgcaagctacgtgcctgagattatcgagttgattggcaatagaaaaaagtatgggggaagctatagcgccgtgagcggcaggaagcacatcgtggtgtgtggacacataactctcgagtcagtgagtaatttcctgaaagattttcttcataaagatagggatgatgtcaatgtggaaattgtgttcctgcataacattagtcccaacttggagctcgaagcactctttaaacgccattttacccaggtcgaattttaccaggggtcagttttaaatccacatgatttggcccgagtcaaaattgagagtgctgacgcatgccttattctggcgaataagtactgcgctgatccagatgcagaggatgcatcaaatatcatgagggtgatctctattaaaaattaccatcctaaaatacggattatcacccagatgctgcagtaccacaacaaggcccacctgcttaatatcccctcatggaattggaaggagggagacgacgctatatgtttggccgagctcaagctggggttcatcgcccagagttgtctggcacagggcctgtcaacgatgctcgccaatttattctctatgaggagctttatcaagatcgaagaagacacctggcagaagtattatctggaaggggtgtcgaacgaaatgtacacagagtacctgtccagcgcattcgtgggactgtcttttcccactgtgtgcgaactgtgttttgtgaaactcaagctcttgatgattgctatcgagtataaaagcgctaatcgggaatcgcgaatcctcatcaatccaggcaatcaccttaagatccaggagggtacccttggcttcttcattgcctccgacgctaaagaagttaaacgagctttcttttattgtaaagcctgccacgacgatattaccgatccaaagaggattaagaaatgcgggtgtaagcggccaaagatgtctatttataagaggatgagacgagcgtgttgtttcgactgtgggaggtcagaacgtgattgttcttgcatgagcgggagggtgcggggtaacgtcgataccctcgaaagagctttccctctgtcaagcgtctcagtaaacgactgctcgacctcattccgggcattcgaggatgagcaacctagcaccctgtcgcctaaaaagaaacagaggaatgggggaatgcgtaactcaccgaacacttccccgaagctgatgcgtcacgatcccctactaatccctgggaatgaccagatcgacaatatggacagcaacgtgaagaagtacgattctacgggaatgtttcattggtgcgcccctaaagaaatcgagaaggttatactgacgcgctcagaggccgctatgacagtgctgagtggccatgttgtggtctgcatttttggcgacgtatcatctgctcttatagggcttcggaacctggtgatgcctctgagagccagcaacttccattatcacgagcttaaacatatcgtgtttgtaggctccatcgagtacttgaaacgggagtgggagactcttcacaattttcccaaggtctcaatactgccaggaactcctctgagtcgcgcagatctgagagccgttaacatcaacctctgcgacatgtgtgtgatcctatcagctaaccaaaataacatcgatgatacatcgctgcaggacaaagagtgtatcctggcttctttaaatataaaatctatgcagtttgatgattctattggtgtgcttcaggccaactcgcaaggattcaccccccctggcatggaccggtcctcgcccgataattctcctgtccatggcatgctgagacaaccatccatcacaaccggagttaacattccaatcatcaccgagctcgttaacgacaccaacgtgcagttcctagatcaggacgatgacgacgatcccgacaccgagctatacttgacacagccattcgcttgcggcactgccttcgcagtgtctgtcttagactctctgatgagcgcaacatactttaatgataatatactcaccctgattcgaactctggtaacagggggagccacccctgaattggaggctctcatcgctgaagaaaacgccctgcggggaggttactccactcctcaaaccctggcaaaccgggaccggtgtcgggtggcccagctggctctgctcgatggcccatttgccgacctcggagacggaggctgttacggggacctgttctgcaaagccctgaaaacttataatatgctttgttttggtatatataggttgcgcgatgcgcatctctctacaccctctcagtgtaccaagcggtatgtgattactaaccctccatatgagtttgagcttgtccctaccgacctcatattttgtttgatgcagttcgatcataatgcaggacagtctagagcgagcctgtctcactcgagccacagctctcagtcttcaagtaaaaaatcgagctccgttcactcgatacccagtaccgcaaaccgacagaatcgcccaaagtcaagagagagcagggataagcagaatcgcaaggagatggtgtaccgatag

SEQ ID NO: 282915 - DNA, 3678 bp, Artificial Sequence
  derived and/or modified sequence
ccaaaaatggacgctctgatcattcctgtgacaatggaggtaccgtgcgattctagagggcaacgcatgtggtgggcctttctcgcaagcagtatggtaacgttctttggtggtctgttcataatcctcttgtggcggacactgaagtatctttggactgtatgctgtcattgcggcggtaagacaaaggaagctcaaaagataaacaatggctccagtcaagccgacggaaccctgaaaccggtcgacgaaaaagaagaggccgtggctgccgaggtgggatggatgacatctgtgaaagactgggccggagtaatgatctctgcccagactctcacgggaagggtactggtggtcctggtgtttgcactgtcaataggggctttggttatatatttcatcgattcctccaatccaatagagtcctgccagaatttctataaagatttcactctccagatcgatatggccttcaacgttttctttttgctgtatttcggcctgcggttcattgctgcaaatgataagctgtggttttggctggaagttaattctgtagtagacttcttcactgtgccccctgtctttgtgtctgtttatctgaacagatcctggttgggactgcggtttctgagggccttgaggctgattcaattctctgagatcttacaatttctgaatatcttaaaaactagcaactccattaaactcgtaaatctactgtccatctttatctccacatggctgaccgccgcaggatttatccatcttgtggagaatagtggagacccctgggagaattttcagaataatcaagccctcacctattgggaatgcgtctatctcttaatggtgacgatgtccactgtcggatacggcgacgtgtacgccaaaaccactttgggcagactttttatggtgttttttattctggggggattggccatgttcgctagctacgttccggagataattgagctcattggaaaccgcaagaagtatggaggttcttacagcgcagtctccggacgtaagcacatcgtggtgtgcggacatattacgctagagtccgtgagcaactttctgaaagattttctacataaggatcgcgatgatgtaaacgttgaaatcgtgttccttcacaatatcagccctaatctagagctggaggctttattcaaacgccattttacacaagttgagttttatcaaggcagtgtgctcaatccccatgacctggccagagtcaaaatcgaaagcgcggatgcttgcctgatcctcgctaataagtactgcgccgatcccgacgctgaggatgcctccaatataatgagagtgatttcaatcaagaactaccaccctaaaatacgcatcattactcagatgctgcagtatcataataaagcccacctactgaatatcccaagctggaactggaaagagggagatgatgctatctgcctcgctgaacttaagctaggctttatcgctcagagttgtctggcgcagggtttgtccacaatgctggccaaccttttttctatgagaagctttattaagattgaagaagatacctggcaaaaatactatctcgagggtgtgtccaatgagatgtacactgagtacctctcgagtgccttcgtcggtcttagcttccccacggtttgcgagctgtgcttcgtaaagctgaaactgctcatgatcgctattgaatacaagtctgctaaccgcgagtcaagaatcctcatcaatccgggaaatcacctgaaaatccaggaagggaccctcggtttttttattgcgagtgatgccaaagaagttaagcgggctttcttctactgcaaagcctgtcacgacgacatcactgaccccaagaggatcaagaaatgtggttgcaaacgcccaaagatgagcatatacaaaaggatgagacgcgcttgttgtttcgattgtggacgatcagagagggactgtagctgtatgtccgggcgagtgagagggaacgtcgataccctagagcgcgcattccccctcagctccgtgagtgtgaacgactgttcaacctcttttcgtgcatttgaggatgagcagcctagcacactatctcccaaaaaaaagcagcggaacggaggcatgagaaactctcctaatacctctcctaagcttatgagacatgatcccttactcattcctggtaacgatcaaattgataacatggattcaaacgtgaaaaaatatgactccacaggcatgttccactggtgcgccccaaaggaaatagagaaagtgatcctgacaaggagcgaggctgccatgactgtcctttctggccacgtcgtcgtctgtatttttggagacgtgtcctcggccctcattggcctgcgcaatttggttatgccactgcgcgcatctaatttccactaccatgagctcaagcacatcgtattcgtgggctccattgagtacctaaagagggagtgggagacgctacacaactttcctaaggtttccatcctgcccggtacccctctcagtagagccgacctgcgggcagtcaacatcaatctgtgtgatatgtgtgtcatcctgtctgcgaatcagaataacatcgatgacacctccctacaggataaagaatgcatcctagcctctctgaatatcaagtccatgcaattcgacgactccataggcgtcctccaagccaattcacaaggatttaccccacctgggatggatcggtcatctcccgacaattcgccagtccacggcatgctgagacagccttcaatcactaccggagtcaatattcctattatcacagaactcgtgaacgacactaatgtccaatttctggaccaagatgatgatgatgatcctgacaccgagttgtatctcacccaaccattcgcctgtggcactgcatttgcggtgtccgtactggactcactaatgtctgccacatatttcaacgataacatcctgactctcatccgaacgctggtgacaggaggcgctaccccagagttggaggcactgatcgcagaagaaaatgcgctgcgaggaggctatagcaccccacagaccctggctaacagggacaggtgtcgggtggctcaactggccctgttggatgggccttttgctgacctgggagatggaggttgttatggcgatttgttctgcaaagcactgaaaacttataacatgctgtgcttcggaatctaccggcttcgtgatgcacatctatccacaccgtctcagtgcaccaaaaggtacgtgatcacaaatcccccttatgagtttgaactggtgcctactgacctcatcttctgcctgatgcagtttgaccacaatgccggacagtctagggcatcgctttcacattctagccactctagccagagttcgtctaaaaaaagttcaagtgtgcacagcatcccgagtacagcgaaccgacagaatcggcctaaatcccgtgagtctcgggataaacagaatgccactcggatgaatagaatgggacaggaaaagaaatggttcaccgatgagccggacaacgcgtacccccgtaatatccagatcaagcccatgtccactcacatggctaaccagatcaaccaatataagtccacgtcttctctcatccctcccatccgtgaagttgaagacgagtgttag

SEQ ID NO: 282916 - DNA, 3630 bp, Artificial Sequence
  derived and/or modified sequence
tctaatatccatgcaaaccacttgagcttggatgccagctcttcaagttcttcttcctccagctcatcttccagctcctctagcagctccagtagctcaagcgttcatgaacctaagatggatgctctgattatccctgttactatggaagtcccatgcgactcgcgtggtcagcggatgtggtgggcctttctggcctcatctatggtgacgtttttcggcggactgtttatcatactcctgtggaggacactcaagtatttatggaccgtgtgttgccactgcggcggaaaaaccaaggaggcccagaaaatcaacaacggaagtagccaggccgatggcaccctgaaaccagttgatgaaaaagaggaggccgttgcagccgaagttgggtggatgacctcggtcaaggactgggccggagtcatgatttctgctcagactctgactggcagagttctcgtcgttttggtgttcgctttaagcattggagcattggttatttacttcattgacagctcaaaccctatagagtcctgtcagaatttttacaaagactttaccttgcagatcgacatggcatttaacgtgttcttcctgttgtacttcgggttaagatttattgctgccaacgacaagctttggttttggctggaagtcaatagtgtggtggattttttcaccgtccccccagtgtttgtgagcgtgtacctcaacaggagctggttaggactccggtttctgcgggcattacgcctcatacagttcagtgaaatactgcaattcctgaacatcttaaagacatcgaattccatcaagctggtgaatctcctgtccatcttcatctctacatggctaacggccgctggcttcattcacctcgtggagaattcgggagacccctgggagaatttccagaacaaccaagcgctgacttattgggaatgtgtatatttactcatggtgacgatgtcaactgtcggctatggagacgtgtacgctaaaactacactgggcagattatttatggtgttctttatcttgggcggattagcgatgttcgcatcttatgtccctgagattattgagctgatcgggaacaggaaaaaatatggaggtagctattccgcagtgtcaggcagaaaacacatcgtggtgtgtgggcacatcacactcgagtcagtgagcaacttcctgaaggacttccttcacaaggatagggacgacgtcaacgtagaaatcgtgttccttcacaacatctctcctaatttagaattagaagcactgttcaagcggcactttacacaagtggagttctaccaggggagtgtgctgaatcctcatgatctcgccagggtcaaaatcgagtccgcagacgcttgcctcattcttgccaataaatactgcgctgacccagatgccgaagacgccagcaatataatgcgtgtgatctcaataaagaattatcaccctaaaatacgtattattacacagatgcttcagtatcataacaaagcacatctcctcaatatcccttcatggaattggaaggagggcgatgacgcaatctgtctggctgagctcaagctgggattcatagcacagagctgtctggcccagggccttagcacaatgctcgccaatctcttttccatgagaagtttcatcaaaattgaggaggacacctggcaaaagtactacctggagggcgttagcaatgagatgtataccgagtaccttagctctgcattcgtcggtctgtcttttcctaccgtttgtgaactgtgttttgtcaaattaaagcttcttatgatcgccatcgaatacaaatctgcaaatcgagagagccgaatattaattaatcctggtaaccatcttaagatccaggaagggaccttgggattttttatcgcctccgacgccaaggaggtgaaaagggccttcttctactgtaaagcttgccacgacgatattactgatccgaagcgtatcaagaaatgcggctgcaaaagacccaagatgtcaatctacaaaagaatgagacgggcatgttgctttgactgcggcagatcagagagggattgctcatgtatgtccggcagagtcagagggaatgtggatacactggaacgcgcttttccactgtctagtgtgtccgtgaatgactgctctacaagtttccgagccttcgaagacgaacagccttctacattgtcccccaaaaaaaagcagcgtaacgggggtatgcgcaattcccccaacacaagccccaagctgatgcggcacgatcccctgttgataccaggcaatgatcagatcgataacatggatagcaacgtgaagaaatatgattccacaggcatgttccactggtgcgccccaaaggaaattgagaaagtgatactaacccgaagcgaagcggcaatgaccgtgctttcaggacacgtggttgtatgtatctttggggacgtctcgagcgctctaatcgggcttcggaatctggtgatgccgcttcgtgcctctaatttccactaccatgaactaaaacacatcgtgttcgtggggtctattgagtacctgaaacgggagtgggaaactttgcacaactttcccaaggtctccattttgcccggaacaccattgtcgcgcgcagatctgcgagcagtcaatatcaacctgtgtgacatgtgcgtgatactgagtgcaaatcaaaacaatatcgatgatacatcactccaagacaaggaatgtatcttggcctcactgaatatcaagagcatgcaatttgatgattctatcggcgttctccaggcaaattctcagggcttcacacccccaggcatggataggagttcaccagacaatagtcccgtgcacggcatgctccggcagccaagcattacaacaggagttaacattccgatcattaccgagttagttaacgacaccaacgtacagttcttagatcaggacgacgacgatgaccccgatacggaactttacttgactcagcctttcgcttgtggaaccgcctttgcagtgagcgtactggatagtctgatgtctgccacttatttcaacgacaacatccttaccctgatcaggacattggtaaccggcggtgccaccccagagctggaagcgcttattgcagaagaaaacgcactccggggaggatactccaccccccaaactctcgccaatcgtgaccgatgtcgggtggcccagctggctctgttggatggtccctttgccgatcttggagatggcggatgctacggcgacctattctgtaaggcactgaagacctataatatgctgtgcttcggaatctatagactgcgcgacgctcatctgtcaaccccctctcagtgcacaaagcggtacgtgataactaacccaccgtacgaattcgagttagtgccgacagatttaatcttctgtctgatgcagtttgaccacaatgctggacaatcccgggcttcactctcccatagtagtcacagctcccaaagctcctctaaaaagagcagtagtgttcactctatccctagcactgcaaatagacagaataggccaaagtctagagagtcccgtgacaagcagaaaaaagaaatggtttatcggtag

SEQ ID NO: 282917 - DNA, 3516 bp, Artificial Sequence
  derived and/or modified sequence
atggacgccctgatcatccccgtgaccatggaggtgccctgcgacagcagaggccagagaatgtggtgggccttcctggccagcagcatggtgaccttcttcggcggcctgttcatcatcctgctgtggagaaccctgaagtacctgtggaccgtgtgctgccactgcggcggcaagaccaaggaggcccagaagatcaacaacggcagcagccaggccgacggcaccctgaagcccgtggacgagaaggaggaggccgtggccgccgaggtgggctggatgaccagcgtgaaggactgggccggcgtgatgatcagcgcccagaccctgaccggcagagtgctggtggtgctggtgttcgccctgagcatcggcgccctggtgatctacttcatcgacagcagcaaccccatcgagagctgccagaacttctacaaggacttcaccctgcagatcgacatggccttcaacgtgttcttcctgctgtacttcggcctgagattcatcgccgccaacgacaagctgtggttctggctggaggtgaacagcgtggtggacttcttcaccgtgccccccgtgttcgtgagcgtgtacctgaacagaagctggctgggcctgagattcctgagagccctgagactgatccagttcagcgagatcctgcagttcctgaacatcctgaagaccagcaacagcatcaagctggtgaacctgctgagcatcttcatcagcacctggctgaccgccgccggcttcatccacctggtggagaacagcggcgacccctgggagaacttccagaacaaccaggccctgacctactgggagtgcgtgtacctgctgatggtgaccatgagcaccgtgggctacggcgacgtgtacgccaagaccaccctgggcagactgttcatggtgttcttcatcctgggcggcctggccatgttcgccagctacgtgcccgagatcatcgagctgatcggcaacagaaagaagtacggcggcagctacagcgccgtgagcggcagaaagcacatcgtggtgtgcggccacatcaccctggagagcgtgagcaacttcctgaaggacttcctgcacaaggacagagacgacgtgaacgtggagatcgtgttcctgcacaacatcagccccaacctggagctggaggccctgttcaagagacacttcacccaggtggagttctaccagggcagcgtgctgaacccccacgacctggccagagtgaagatcgagagcgccgacgcctgcctgatcctggccaacaagtactgcgccgaccccgacgccgaggacgccagcaacatcatgagagtgatcagcatcaagaactaccaccccaagatcagaatcatcacccagatgctgcagtaccacaacaaggcccacctgctgaacatccccagctggaactggaaggagggcgacgacgccatctgcctggccgagctgaagctgggcttcatcgcccagagctgcctggcccagggcctgagcaccatgctggccaacctgttcagcatgagaagcttcatcaagatcgaggaggacacctggcagaagtactacctggagggcgtgagcaacgagatgtacaccgagtacctgagcagcgccttcgtgggcctgagcttccccaccgtgtgcgagctgtgcttcgtgaagctgaagctgctgatgatcgccatcgagtacaagagcgccaacagagagagcagaatcctgatcaaccccggcaaccacctgaagatccaggagggcaccctgggcttcttcatcgccagcgacgccaaggaggtgaagagagccttcttctactgcaaggcctgccacgacgacatcaccgaccccaagagaatcaagaagtgcggctgcaagagacccaagatgagcatctacaagagaatgagaagagcctgctgcttcgactgcggcagaagcgagagagactgcagctgcatgagcggcagagtgagaggcaacgtggacaccctggagagagccttccccctgagcagcgtgagcgtgaacgactgcagcaccagcttcagagccttcgaggacgagcagcccagcaccctgagccccaagaagaagcagagaaacggcggcatgagaaacagccccaacaccagccccaagctgatgagacacgaccccctgctgatccccggcaacgaccagatcgacaacatggacagcaacgtgaagaagtacgacagcaccggcatgttccactggtgcgcccccaaggagatcgagaaggtgatcctgaccagaagcgaggccgccatgaccgtgctgagcggccacgtggtggtgtgcatcttcggcgacgtgagcagcgccctgatcggcctgagaaacctggtgatgcccctgagagccagcaacttccactaccacgagctgaagcacatcgtgttcgtgggcagcatcgagtacctgaagagagagtgggagaccctgcacaacttccccaaggtgagcatcctgcccggcacccccctgagcagagccgacctgagagccgtgaacatcaacctgtgcgacatgtgcgtgatcctgagcgccaaccagaacaacatcgacgacaccagcctgcaggacaaggagtgcatcctggccagcctgaacatcaagagcatgcagttcgacgacagcatcggcgtgctgcaggccaacagccagggcttcaccccccccggcatggacagaagcagccccgacaacagccccgtgcacggcatgctgagacagcccagcatcaccaccggcgtgaacatccccatcatcaccgagctggtgaacgacaccaacgtgcagttcctggaccaggacgacgacgacgaccccgacaccgagctgtacctgacccagcccttcgcctgcggcaccgccttcgccgtgagcgtgctggacagcctgatgagcgccacctacttcaacgacaacatcctgaccctgatcagaaccctggtgaccggcggcgccacccccgagctggaggccctgatcgccgaggagaacgccctgagaggcggctacagcaccccccagaccctggccaacagagacagatgcagagtggcccagctggccctgctggacggccccttcgccgacctgggcgacggcggctgctacggcgacctgttctgcaaggccctgaagacctacaacatgctgtgcttcggcatctacagactgagagacgcccacctgagcacccccagccagtgcaccaagagatacgtgatcaccaaccccccctacgagttcgagctggtgcccaccgacctgatcttctgcctgatgcagttcgaccacaacgccggccagagcagagccagcctgagccacagcagccacagcagccagagcagcagcaagaagagcagcagcgtgcacagcatccccagcaccgccaacagacagaacagacccaagagcagagagagcagagacaagcagaacagaaaggagatggtgtacagatag

SEQ ID NO: 282918 - DNA, 3678 bp, Artificial Sequence
  derived and/or modified sequence
cccaagatggacgccctgatcatccccgtgaccatggaggtgccctgcgacagcagaggccagagaatgtggtgggccttcctggccagcagcatggtgaccttcttcggcggcctgttcatcatcctgctgtggagaaccctgaagtacctgtggaccgtgtgctgccactgcggcggcaagaccaaggaggcccagaagatcaacaacggcagcagccaggccgacggcaccctgaagcccgtggacgagaaggaggaggccgtggccgccgaggtgggctggatgaccagcgtgaaggactgggccggcgtgatgatcagcgcccagaccctgaccggcagagtgctggtggtgctggtgttcgccctgagcatcggcgccctggtgatctacttcatcgacagcagcaaccccatcgagagctgccagaacttctacaaggacttcaccctgcagatcgacatggccttcaacgtgttcttcctgctgtacttcggcctgagattcatcgccgccaacgacaagctgtggttctggctggaggtgaacagcgtggtggacttcttcaccgtgccccccgtgttcgtgagcgtgtacctgaacagaagctggctgggcctgagattcctgagagccctgagactgatccagttcagcgagatcctgcagttcctgaacatcctgaagaccagcaacagcatcaagctggtgaacctgctgagcatcttcatcagcacctggctgaccgccgccggcttcatccacctggtggagaacagcggcgacccctgggagaacttccagaacaaccaggccctgacctactgggagtgcgtgtacctgctgatggtgaccatgagcaccgtgggctacggcgacgtgtacgccaagaccaccctgggcagactgttcatggtgttcttcatcctgggcggcctggccatgttcgccagctacgtgcccgagatcatcgagctgatcggcaacagaaagaagtacggcggcagctacagcgccgtgagcggcagaaagcacatcgtggtgtgcggccacatcaccctggagagcgtgagcaacttcctgaaggacttcctgcacaaggacagagacgacgtgaacgtggagatcgtgttcctgcacaacatcagccccaacctggagctggaggccctgttcaagagacacttcacccaggtggagttctaccagggcagcgtgctgaacccccacgacctggccagagtgaagatcgagagcgccgacgcctgcctgatcctggccaacaagtactgcgccgaccccgacgccgaggacgccagcaacatcatgagagtgatcagcatcaagaactaccaccccaagatcagaatcatcacccagatgctgcagtaccacaacaaggcccacctgctgaacatccccagctggaactggaaggagggcgacgacgccatctgcctggccgagctgaagctgggcttcatcgcccagagctgcctggcccagggcctgagcaccatgctggccaacctgttcagcatgagaagcttcatcaagatcgaggaggacacctggcagaagtactacctggagggcgtgagcaacgagatgtacaccgagtacctgagcagcgccttcgtgggcctgagcttccccaccgtgtgcgagctgtgcttcgtgaagctgaagctgctgatgatcgccatcgagtacaagagcgccaacagagagagcagaatcctgatcaaccccggcaaccacctgaagatccaggagggcaccctgggcttcttcatcgccagcgacgccaaggaggtgaagagagccttcttctactgcaaggcctgccacgacgacatcaccgaccccaagagaatcaagaagtgcggctgcaagagacccaagatgagcatctacaagagaatgagaagagcctgctgcttcgactgcggcagaagcgagagagactgcagctgcatgagcggcagagtgagaggcaacgtggacaccctggagagagccttccccctgagcagcgtgagcgtgaacgactgcagcaccagcttcagagccttcgaggacgagcagcccagcaccctgagccccaagaagaagcagagaaacggcggcatgagaaacagccccaacaccagccccaagctgatgagacacgaccccctgctgatccccggcaacgaccagatcgacaacatggacagcaacgtgaagaagtacgacagcaccggcatgttccactggtgcgcccccaaggagatcgagaaggtgatcctgaccagaagcgaggccgccatgaccgtgctgagcggccacgtggtggtgtgcatcttcggcgacgtgagcagcgccctgatcggcctgagaaacctggtgatgcccctgagagccagcaacttccactaccacgagctgaagcacatcgtgttcgtgggcagcatcgagtacctgaagagagagtgggagaccctgcacaacttccccaaggtgagcatcctgcccggcacccccctgagcagagccgacctgagagccgtgaacatcaacctgtgcgacatgtgcgtgatcctgagcgccaaccagaacaacatcgacgacaccagcctgcaggacaaggagtgcatcctggccagcctgaacatcaagagcatgcagttcgacgacagcatcggcgtgctgcaggccaacagccagggcttcaccccccccggcatggacagaagcagccccgacaacagccccgtgcacggcatgctgagacagcccagcatcaccaccggcgtgaacatccccatcatcaccgagctggtgaacgacaccaacgtgcagttcctggaccaggacgacgacgacgaccccgacaccgagctgtacctgacccagcccttcgcctgcggcaccgccttcgccgtgagcgtgctggacagcctgatgagcgccacctacttcaacgacaacatcctgaccctgatcagaaccctggtgaccggcggcgccacccccgagctggaggccctgatcgccgaggagaacgccctgagaggcggctacagcaccccccagaccctggccaacagagacagatgcagagtggcccagctggccctgctggacggccccttcgccgacctgggcgacggcggctgctacggcgacctgttctgcaaggccctgaagacctacaacatgctgtgcttcggcatctacagactgagagacgcccacctgagcacccccagccagtgcaccaagagatacgtgatcaccaaccccccctacgagttcgagctggtgcccaccgacctgatcttctgcctgatgcagttcgaccacaacgccggccagagcagagccagcctgagccacagcagccacagcagccagagcagcagcaagaagagcagcagcgtgcacagcatccccagcaccgccaacagacagaacagacccaagagcagagagagcagagacaagcagaacgccaccagaatgaacagaatgggccaggagaagaagtggttcaccgacgagcccgacaacgcctaccccagaaacatccagatcaagcccatgagcacccacatggccaaccagatcaaccagtacaagagcaccagcagcctgatcccccccatcagagaggtggaggacgagtgctag

SEQ ID NO: 282919 - DNA, 3630 bp, Artificial Sequence
  derived and/or modified sequence
agcaacatccacgccaaccacctgagcctggacgccagcagcagcagcagcagcagcagcagcagcagcagcagcagcagcagcagcagcagcagcagcagcgtgcacgagcccaagatggacgccctgatcatccccgtgaccatggaggtgccctgcgacagcagaggccagagaatgtggtgggccttcctggccagcagcatggtgaccttcttcggcggcctgttcatcatcctgctgtggagaaccctgaagtacctgtggaccgtgtgctgccactgcggcggcaagaccaaggaggcccagaagatcaacaacggcagcagccaggccgacggcaccctgaagcccgtggacgagaaggaggaggccgtggccgccgaggtgggctggatgaccagcgtgaaggactgggccggcgtgatgatcagcgcccagaccctgaccggcagagtgctggtggtgctggtgttcgccctgagcatcggcgccctggtgatctacttcatcgacagcagcaaccccatcgagagctgccagaacttctacaaggacttcaccctgcagatcgacatggccttcaacgtgttcttcctgctgtacttcggcctgagattcatcgccgccaacgacaagctgtggttctggctggaggtgaacagcgtggtggacttcttcaccgtgccccccgtgttcgtgagcgtgtacctgaacagaagctggctgggcctgagattcctgagagccctgagactgatccagttcagcgagatcctgcagttcctgaacatcctgaagaccagcaacagcatcaagctggtgaacctgctgagcatcttcatcagcacctggctgaccgccgccggcttcatccacctggtggagaacagcggcgacccctgggagaacttccagaacaaccaggccctgacctactgggagtgcgtgtacctgctgatggtgaccatgagcaccgtgggctacggcgacgtgtacgccaagaccaccctgggcagactgttcatggtgttcttcatcctgggcggcctggccatgttcgccagctacgtgcccgagatcatcgagctgatcggcaacagaaagaagtacggcggcagctacagcgccgtgagcggcagaaagcacatcgtggtgtgcggccacatcaccctggagagcgtgagcaacttcctgaaggacttcctgcacaaggacagagacgacgtgaacgtggagatcgtgttcctgcacaacatcagccccaacctggagctggaggccctgttcaagagacacttcacccaggtggagttctaccagggcagcgtgctgaacccccacgacctggccagagtgaagatcgagagcgccgacgcctgcctgatcctggccaacaagtactgcgccgaccccgacgccgaggacgccagcaacatcatgagagtgatcagcatcaagaactaccaccccaagatcagaatcatcacccagatgctgcagtaccacaacaaggcccacctgctgaacatccccagctggaactggaaggagggcgacgacgccatctgcctggccgagctgaagctgggcttcatcgcccagagctgcctggcccagggcctgagcaccatgctggccaacctgttcagcatgagaagcttcatcaagatcgaggaggacacctggcagaagtactacctggagggcgtgagcaacgagatgtacaccgagtacctgagcagcgccttcgtgggcctgagcttccccaccgtgtgcgagctgtgcttcgtgaagctgaagctgctgatgatcgccatcgagtacaagagcgccaacagagagagcagaatcctgatcaaccccggcaaccacctgaagatccaggagggcaccctgggcttcttcatcgccagcgacgccaaggaggtgaagagagccttcttctactgcaaggcctgccacgacgacatcaccgaccccaagagaatcaagaagtgcggctgcaagagacccaagatgagcatctacaagagaatgagaagagcctgctgcttcgactgcggcagaagcgagagagactgcagctgcatgagcggcagagtgagaggcaacgtggacaccctggagagagccttccccctgagcagcgtgagcgtgaacgactgcagcaccagcttcagagccttcgaggacgagcagcccagcaccctgagccccaagaagaagcagagaaacggcggcatgagaaacagccccaacaccagccccaagctgatgagacacgaccccctgctgatccccggcaacgaccagatcgacaacatggacagcaacgtgaagaagtacgacagcaccggcatgttccactggtgcgcccccaaggagatcgagaaggtgatcctgaccagaagcgaggccgccatgaccgtgctgagcggccacgtggtggtgtgcatcttcggcgacgtgagcagcgccctgatcggcctgagaaacctggtgatgcccctgagagccagcaacttccactaccacgagctgaagcacatcgtgttcgtgggcagcatcgagtacctgaagagagagtgggagaccctgcacaacttccccaaggtgagcatcctgcccggcacccccctgagcagagccgacctgagagccgtgaacatcaacctgtgcgacatgtgcgtgatcctgagcgccaaccagaacaacatcgacgacaccagcctgcaggacaaggagtgcatcctggccagcctgaacatcaagagcatgcagttcgacgacagcatcggcgtgctgcaggccaacagccagggcttcaccccccccggcatggacagaagcagccccgacaacagccccgtgcacggcatgctgagacagcccagcatcaccaccggcgtgaacatccccatcatcaccgagctggtgaacgacaccaacgtgcagttcctggaccaggacgacgacgacgaccccgacaccgagctgtacctgacccagcccttcgcctgcggcaccgccttcgccgtgagcgtgctggacagcctgatgagcgccacctacttcaacgacaacatcctgaccctgatcagaaccctggtgaccggcggcgccacccccgagctggaggccctgatcgccgaggagaacgccctgagaggcggctacagcaccccccagaccctggccaacagagacagatgcagagtggcccagctggccctgctggacggccccttcgccgacctgggcgacggcggctgctacggcgacctgttctgcaaggccctgaagacctacaacatgctgtgcttcggcatctacagactgagagacgcccacctgagcacccccagccagtgcaccaagagatacgtgatcaccaaccccccctacgagttcgagctggtgcccaccgacctgatcttctgcctgatgcagttcgaccacaacgccggccagagcagagccagcctgagccacagcagccacagcagccagagcagcagcaagaagagcagcagcgtgcacagcatccccagcaccgccaacagacagaacagacccaagagcagagagagcagagacaagcagaagaaggagatggtgtacagatag

SEQ ID NO: 282920 - protein, 1182 aa, Artificial Sequence
  derived and/or modified sequence
  misc_feature (1)..(1): Xaa can be any naturally occurring amino acid
XSSSSSSSSSSVHEPKMDALIIPVTMEVPCDSRGQRMWWAFLASSMVTFFGGLFIILLWRTLKYLWTVCCHCGGKTKEAQKINNGSSQADGTLKPVDEKEEAVAAEVGWMTSVKDWAGVMISAQTLTGRVLVVLVFALSIGALVIYFIDSSNPIESCQNFYKDFTLQIDMAFNVFFLLYFGLRFIAANDKLWFWLEVNSVVDFFTVPPVFVSVYLNRSWLGLRFLRALRLIQFSEILQFLNILKTSNSIKLVNLLSIFISTWLTAAGFIHLVENSGDPWENFQNNQALTYWECVYLLMVTMSTVGYGDVYAKTTLGRLFMVFFILGGLAMFASYVPEIIELIGNRKKYGGSYSAVSGRKHIVVCGHITLESVSNFLKDFLHKDRDDVNVEIVFLHNISPNLELEALFKRHFTQVEFYQGSVLNPHDLARVKIESADACLILANKYCADPDAEDASNIMRVISIKNYHPKIRIITQMLQYHNKAHLLNIPSWNWKEGDDAICLAELKLGFIAQSCLAQGLSTMLANLFSMRSFIKIEEDTWQKYYLEGVSNEMYTEYLSSAFVGLSFPTVCELCFVKLKLLMIAIEYKSANRESRILINPGNHLKIQEGTLGFFIASDAKEVKRAFFYCKACHDDITDPKRIKKCGCKRLEDEQPSTLSPKKKQRNGGMRNSPNTSPKLMRHDPLLIPGNDQIDNMDSNVKKYDSTGMFHWCAPKEIEKVILTRSEAAMTVLSGHVVVCIFGDVSSALIGLRNLVMPLRASNFHYHELKHIVFVGSIEYLKREWETLHNFPKVSILPGTPLSRADLRAVNINLCDMCVILSANQNNIDDTSLQDKECILASLNIKSMQFDDSIGVLQANSQGFTPPGMDRSSPDNSPVHGMLRQPSITTGVNIPIITELVNDTNVQFLDQDDDDDPDTELYLTQPFACGTAFAVSVLDSLMSATYFNDNILTLIRTLVTGGATPELEALIAEENALRGGYSTPQTLANRDRCRVAQLALLDGPFADLGDGGCYGDLFCKALKTYNMLCFGIYRLRDAHLSTPSQCTKRYVITNPPYEFELVPTDLIFCLMQFDHNAGQSRASLSHSSHSSQSSSKKSSSVHSIPSTANRQNRPKSRESRDKQNATRMNRMGQAEKKWFTDEPDNAYPRNIQIKPMSTHMANQINQYKSTSSLIPPIREVEDEC

SEQ ID NO: 282921 - protein, 1167 aa, Artificial Sequence
  derived and/or modified sequence
PKMDALIIPVTMEVPCDSRGQRMWWAFLASSMVTFFGGLFIILLWRTLKYLWTVCCHCGGKTKEAQKINNGSSQADGTLKPVDEKEEAVAAEVGWMTSVKDWAGVMISAQTLTGRVLVVLVFALSIGALVIYFIDSSNPIESCQNFYKDFTLQIDMAFNVFFLLYFGLRFIAANDKLWFWLEVNSVVDFFTVPPVFVSVYLNRSWLGLRFLRALRLIQFSEILQFLNILKTSNSIKLVNLLSIFISTWLTAAGFIHLVENSGDPWENFQNNQALTYWECVYLLMVTMSTVGYGDVYAKTTLGRLFMVFFILGGLAMFASYVPEIIELIGNRKKYGGSYSAVSGRKHIVVCGHITLESVSNFLKDFLHKDRDDVNVEIVFLHNISPNLELEALFKRHFTQVEFYQGSVLNPHDLARVKIESADACLILANKYCADPDAEDASNIMRVISIKNYHPKIRIITQMLQYHNKAHLLNIPSWNWKEGDDAICLAELKLGFIAQSCLAQGLSTMLANLFSMRSFIKIEEDTWQKYYLEGVSNEMYTEYLSSAFVGLSFPTVCELCFVKLKLLMIAIEYKSANRESRILINPGNHLKIQEGTLGFFIASDAKEVKRAFFYCKACHDDITDPKRIKKCGCKRLEDEQPSTLSPKKKQRNGGMRNSPNTSPKLMRHDPLLIPGNDQIDNMDSNVKKYDSTGMFHWCAPKEIEKVILTRSEAAMTVLSGHVVVCIFGDVSSALIGLRNLVMPLRASNFHYHELKHIVFVGSIEYLKREWETLHNFPKVSILPGTPLSRADLRAVNINLCDMCVILSANQNNIDDTSLQDKECILASLNIKSMQFDDSIGVLQANSQGFTPPGMDRSSPDNSPVHGMLRQPSITTGVNIPIITELVNDTNVQFLDQDDDDDPDTELYLTQPFACGTAFAVSVLDSLMSATYFNDNILTLIRTLVTGGATPELEALIAEENALRGGYSTPQTLANRDRCRVAQLALLDGPFADLGDGGCYGDLFCKALKTYNMLCFGIYRLRDAHLSTPSQCTKRYVITNPPYEFELVPTDLIFCLMQFDHNAGQSRASLSHSSHSSQSSSKKSSSVHSIPSTANRQNRPKSRESRDKQNATRMNRMGQEKKWFTDEPDNAYPRNIQIKPMSTHMANQINQYKSTSSLIPPIREVEDEC

SEQ ID NO: 282922 - DNA, 3549 bp, Artificial Sequence
  derived and/or modified sequence
tgaagtagctcctcttcatcaagttcctcctccgtccacgaacccaagatggatgctctcattatccctgtgacaatggaagtgccatgcgacagccgcggacaacggatgtggtgggctttcctcgctagctccatggtgacgttcttcggcggactgtttatcatcctgctatggcgaacattgaagtacttgtggaccgtttgctgtcactgtgggggaaaaacaaaggaagcccagaagatcaataatggcagttcacaagctgatggtacacttaaaccagtggacgaaaaagaagaagccgtggcagcagaagtgggatggatgacatcggtcaaggattgggccggcgtcatgatcagtgcgcagaccctgaccggccgcgtgctggtggtgctggttttcgccttgagcattggggcgctggtgatttatttcattgatagctccaaccctattgaatcctgccagaatttttacaaagactttaccctgcagattgatatggcattcaacgttttttttcttctctatttcgggctccgctttattgctgcaaacgacaaactgtggttctggttggaggtgaattcagtcgtcgatttcttcacagtgccaccagttttcgtgtccgtttacctgaatcggtcttggctcggcctgcgctttctgcgggcactgcggctgattcagttttctgagatcctgcagttcctaaacatccttaagaccagcaacagcatcaagctagtgaatctgctttctatttttatcagcacctggctgacagccgccgggttcatccatctggtggaaaactccggagacccatgggagaacttccagaataaccaggcactgacttactgggagtgcgtgtatctgctgatggtgaccatgagcaccgtgggctacggtgatgtgtacgccaagacaacccttgggcggctatttatggtctttttcatactgggcggcctggctatgtttgcatcatatgtccccgagatcatcgagctgatcggtaacaggaagaaatatggcgggtcctattcagctgtgtctggacggaaacacatcgtcgtttgcgggcatatcactctggaatccgtgtctaatttcctcaaagatttcctccacaaagatcgggatgatgtgaacgtggagatcgtgtttctgcacaacatcagtcctaacctcgaactggaggccctgttcaaacgacacttcacccaagtggaattctaccaaggcagcgtcctgaatcctcacgaccttgcccgggtgaagattgagtccgctgatgcttgtttgattttggcaaataagtactgtgcagacccagatgcggaagacgccagcaatatcatgcgggtcatctctatcaaaaactatcatcccaagattaggattatcacacaaatgctgcagtatcataacaaagctcacctgctgaatataccctcctggaattggaaagagggggatgatgccatttgccttgcagagctgaaacttggtttcatcgcacagtcttgcctggcccaaggccttagtaccatgctcgctaatctgtttagtatgagaagtttcatcaaaatcgaagaggatacatggcaaaagtattacctagaaggagtgtccaatgagatgtacacagaatatctatcgagcgcatttgtagggctctcctttcccacagtctgtgagctgtgtttcgtgaaactgaagctgctgatgatcgccattgagtacaagtccgccaatcgtgagtcacgaatactgattaatcccgggaatcacttaaagatccaggaaggcacgttgggcttctttatcgccagcgacgccaaagaggtgaaaagagcctttttttactgcaaagcctgccatgatgacatcacagacccaaaacgcatcaagaaatgtgggtgtaagcgtctcgaagatgagcaaccttctacactcagccccaaaaagaaacagagaaatgggggcatgcgcaacagtccgaatacctcccccaaactgatgcggcacgaccctctgttgattcccggtaacgatcaaatcgataatatggattctaatgtaaagaaatacgacagtaccgggatgtttcactggtgtgctccaaaagaaattgaaaaagtcatcctcactcgttcggaggccgctatgaccgtgctgagtggacacgtggttgtgtgtatcttcggagacgtgtcaagcgcactgattggcttacgtaacctggtcatgccactgcgcgcaagcaacttccactatcacgagctgaaacatatcgtgttcgtcgggtccatagaatatttgaaaagggaatgggagaccttgcataatttccccaaagtgagcatcctaccaggcacacccctaagcagggcagacctcagggcagtcaacattaacctgtgtgacatgtgcgtaattctctccgctaaccagaataatatcgatgacacgtcactgcaggacaaggagtgcatcctggcttctctgaatatcaagtcaatgcaatttgatgacagcatcggagtgctgcaggctaactcccagggcttcacacctcctgggatggatcgatccagtccagacaactcacctgtgcacggcatgctgcgccagccttcaataacaacgggcgttaatatccctatcatcaccgagctagttaacgacaccaacgtacaatttcttgaccaagacgatgacgacgaccctgacacagaactatatctgacacagccattcgcatgcgggactgccttcgccgtttccgtgctagactccctcatgtctgccacgtacttcaacgacaacatactcaccctcatccgaaccctggtcactgggggggctactccagagctcgaagcactgattgctgaagagaatgctctgcgcggaggttactccacacctcagactctcgcgaatagggaccggtgtcgcgtggcccagctggccctgctggacgggcctttcgctgatcttggggacggtggatgttacggggacctgttttgcaaggctctgaagacctataatatgctctgcttcgggatctaccggctgcgtgatgcacatttgtccactccaagccagtgtacaaaacggtatgtcatcacaaaccccccctatgagtttgaattggtacccactgatctcatcttctgtctgatgcagttcgaccataatgcaggtcaaagtagggcctcactgtctcatagctcacatagttctcaaagctccagcaagaagagctcctctgttcattcaataccttccaccgctaatcggcagaatcgccctaagagccgtgagagccgagacaaacagaacgcaacgcggatgaaccggatggggcaggccgaaaaaaagtggttcactgacgagcccgacaacgcatacccgaggaacatccagatcaaaccaatgtcgactcatatggcaaatcagatcaaccagtataagtctacatcatctcttatcccacctatcagagaagtggaagatgagtgctag

SEQ ID NO: 282923 - DNA, 3504 bp, Artificial Sequence
  derived and/or modified sequence
cctaaaatggatgcgctgattattcccgtcactatggaggtgccttgcgatagtcggggccagcgcatgtggtgggcttttctggcaagcagtatggttacctttttcggaggcctgtttattatcctgctgtggaggactctgaaatacctgtggacagtgtgctgccactgtgggggcaaaactaaagaagctcagaagattaataacggctcttcccaagccgacggtaccctcaagcccgtggacgaaaaagaggaggccgttgccgcggaggttggctggatgacctctgtgaaggattgggccggggtgatgattagcgcccagacactgacaggccgcgtcttggtcgttctcgtgttcgccctttctattggggccctggtcatttacttcatcgattcctctaatcccatcgagtcttgccagaatttctacaaggattttactcttcagattgacatggctttcaatgtgttcttcttactgtactttggcctgcggttcatagccgctaacgataagctctggttttggttggaggtcaactctgtagtggacttcttcacagtgccacccgtttttgttagcgtgtatctcaataggtcatggctgggcctgaggtttctgcgcgcactgagactgattcagttttcagaaattttacaatttctgaacatcttgaagactagtaattccataaaactggtcaacctgttgagcatattcataagcacctggctgaccgccgcaggttttatccatttagtggagaactccggtgacccatgggaaaactttcagaacaatcaagcccttacttactgggagtgtgtgtacctcctaatggtgaccatgtctacagtgggctatggggatgtgtatgctaagactacgttaggccgactgtttatggttttctttatcttaggaggcttagccatgttcgcatcgtacgtgcctgaaattatagaactcataggcaatcgtaaaaagtacggtgggtcttactctgccgtgagcggacgaaaacatatcgttgtgtgcggacacatcactctggagagcgtttctaacttcctcaaggacttcctgcacaaagacagagatgatgtgaatgtggagatcgtgtttctacacaacattagtcccaacctcgaactagaagccctgttcaagagacatttcactcaggttgagttttatcaaggctctgttctcaatcctcacgaccttgcaagagtgaagatcgagagcgccgatgcatgcttaatattagctaacaagtactgcgccgaccctgatgcagaggatgcctctaatattatgagggtgatttcaattaagaactatcatcccaaaattcgtattatcacgcaaatgcttcagtaccataacaaagcgcatctcctgaatataccaagttggaattggaaagagggcgatgacgcaatatgcctggcagagctgaaattaggcttcattgctcaatcatgcctggcccaggggctgagcacaatgttggcaaatttatttagtatgagatcattcatcaaaatagaggaggatacctggcagaaatattatctggagggggtctccaatgaaatgtatactgaatacctgagctctgcttttgtgggcctgtccttccccacggtttgcgagctgtgttttgtgaaactgaagctcctgatgatcgctatcgagtacaagtctgccaatagggaatctagaattctcatcaaccctggaaatcacttgaagatacaagaaggaacacttgggttcttcatagcttccgacgcgaaggaggttaaacgtgcattcttttattgcaaagcctgccacgatgatatcactgaccctaaaagaatcaagaaatgtgggtgtaagagacttgaggatgaacagccctcaaccttaagtccgaaaaaaaagcaaaggaatggcgggatgaggaatagcccgaatacaagccccaaacttatgcgccacgacccactgttgattccaggcaacgaccagattgataacatggacagtaacgtgaaaaagtacgactctactggtatgttccattggtgtgcgcctaaggaaatcgagaaggtgattctgaccaggtcagaggccgccatgacagtcctatcaggccacgtggtggtgtgtatcttcggcgatgtttcctcggctctcatcggtcttaggaacctcgtcatgccactccgcgccagcaacttccactatcacgagttgaaacacatcgtttttgtaggctctatcgagtatctgaagcgtgaatgggagacactgcataattttcctaaggtctcgatcttgcccgggacaccattaagtcgagccgacttgagggctgtcaacatcaacctatgcgacatgtgtgtgatattgagcgcgaatcagaacaatatagacgatacatccctgcaagacaaggaatgcattttggcctcactcaacatcaaaagtatgcaattcgatgactcgattggcgtgttgcaggcaaattcccagggctttaccccacccggtatggacaggtccagcccggacaattccccagtccacggcatgctgcggcaaccttcaatcactacaggcgtcaacatcccaatcatcacagagctagttaacgacactaacgtgcagttcttggaccaagacgacgacgatgacccggacaccgaactctacctaacacagccattcgcttgcggaactgccttcgccgtgagtgtccttgattcactgatgagtgctacctatttcaacgataacattctcacactgattaggacgttggttacgggaggggctacccctgagttggaagcccttattgccgaggaaaacgccctgagagggggatatagcacaccccagactcttgctaatcgggaccggtgcagagtagcccagctcgccctgctagatgggcctttcgcggatctcggagatggtggctgctacggggacctgttctgcaaagcgctgaagacttataacatgctctgcttcggaatttacaggctgcgcgacgcccacctctcaactccctctcagtgcactaaaagatacgtgattactaaccccccctacgagttcgagctggttccgacagacctcattttctgcctgatgcagttcgaccacaacgcaggacagagtcgtgcatccctgtcccattctagtcattcctcacagagctcttcaaagaagagctctagcgtacactccattccctctactgccaatcgccagaacagacccaagtccagagagtcccgcgacaaacagaatgcaaccaggatgaaccgaatggggcaagaaaaaaagtggttcacagacgaaccagacaatgcataccccagaaacatccagatcaagcccatgtcaacacatatggcaaatcagattaaccagtacaagagcacatcgtctctgatccctccaatccgggaggtcgaggatgagtgctag

SEQ ID NO: 282924 - DNA, 3549 bp, Artificial Sequence
  derived and/or modified sequence
tgaagcagcagcagcagcagcagcagcagctctgtgcatgagcccaagatggatgccctgatcatccctgtgaccatggaggtgccctgtgacagccggggccagaggatgtggtgggccttcctggccagctccatggtgaccttcttcggcggcctcttcatcatcctgctgtggaggaccctgaagtacctgtggacagtgtgctgccactgcggcggcaagaccaaggaggcccagaagatcaacaacggcagcagccaggctgatggcaccctgaagcctgtggatgagaaggaggaggccgtggccgctgaggtgggctggatgacctctgtgaaggactgggccggcgtgatgatcagcgcccagaccctgaccggccgggtgctggtggtgctggtgtttgccctgagcatcggggccctggtgatctacttcatcgacagcagcaaccccatcgagagctgccagaacttctacaaggacttcaccctgcagattgacatggccttcaacgtgttcttcctgctgtacttcggcctgcgcttcatcgccgccaatgacaagctgtggttctggctggaggtgaacagcgtggtggacttcttcaccgtgccccctgtgtttgtgtctgtgtacctgaacagatcctggctgggcctgcgcttcctgcgggccctgcggctcatccagttcagcgagatcctgcagttcctgaacatcctgaagaccagcaacagcatcaagctggtgaacctgctgagcatcttcatcagcacctggctgacagctgctggcttcatccacctggtggagaacagcggggacccctgggagaacttccagaacaaccaggccctgacctactgggagtgtgtgtacctgctgatggtgaccatgagcacagtgggctatggagatgtgtatgccaagaccaccctgggccgcctcttcatggtgttcttcatcctgggcggcctggccatgtttgccagctatgtgcctgagatcatcgagctgattggcaacaggaagaagtatggaggcagctacagcgctgtgtctggcaggaagcacatcgtggtgtgtggccacatcaccctggagagcgtgagcaacttcctgaaggacttcctgcacaaggacagagatgatgtgaatgtggagatcgtgttcctgcacaacatcagccccaacctggagctggaggccctcttcaagaggcacttcacccaggtggagttctaccagggctctgtgctgaacccccatgacctggcccgggtgaagattgagagcgcagatgcctgcctgatcctggccaacaagtactgtgccgaccctgatgctgaagatgccagcaacatcatgagggtcatcagcatcaagaactaccaccccaagatccgcatcatcacccagatgctgcagtaccacaacaaggcccacctgctgaacatccccagctggaactggaaggagggagatgatgccatctgcctggccgagctgaagctgggcttcatcgcccagagctgcctggcccagggcctgagcaccatgctggccaacctcttctccatgaggagcttcatcaagattgaggaggacacctggcagaagtactacctggagggcgtgtccaatgagatgtacacagagtacctgagcagcgcctttgtgggcctgtccttccccaccgtgtgtgagctgtgctttgtgaagctgaagctgctgatgattgccatcgagtacaagagcgccaaccgggagagccgcatcctgatcaaccctggcaaccacctgaagatccaggagggcaccctgggcttcttcatcgccagtgatgccaaggaggtgaagagggccttcttctactgcaaggcctgccatgatgacatcacagaccccaagaggatcaagaagtgtggctgcaagaggctggaggatgagcagcccagcaccctgagccccaagaagaagcagagaaatggaggcatgaggaacagccccaacaccagccccaagctgatgagacatgaccccctgctgatccctggaaatgaccagattgacaacatggacagcaatgtgaagaagtatgacagcacaggcatgttccactggtgtgcccccaaggagattgagaaggtgatcctgaccaggtctgaggccgccatgacagtgctgagcggccacgtggtggtgtgcatctttggagatgtgtcctctgccctgattggcctgaggaacctggtgatgcccctgcgggccagcaacttccactaccacgagctgaagcacatcgtgtttgtgggcagcattgagtacctgaagcgggagtgggagaccctgcacaacttccccaaggtgtccatcctgcccggcacccccctgagcagagctgacctgcgggctgtgaacatcaacctgtgtgacatgtgtgtgatcctgagcgccaaccagaacaacattgatgacaccagcctgcaggacaaggagtgcatcctggccagcctgaacatcaagtccatgcagtttgatgacagcattggagtgctgcaggccaacagccagggcttcaccccacctggcatggacaggagcagcccagacaacagccctgtgcacggcatgctgcggcagcccagcatcaccaccggggtgaacatccccatcatcacagagctggtgaatgacaccaacgtgcagttcctggaccaggatgatgatgatgatcctgacacagagctgtacctgacccagccctttgcctgtggcacagcctttgctgtgtctgtgctggacagcctgatgtctgccacctacttcaatgacaacatcctgaccctcatccgcaccctggtgactggaggagccaccccagagctggaggccctgattgctgaggagaatgccctgcggggcggctacagcaccccccagaccctggccaacagagaccgctgccgggtggcccagctggccctgctggatggcccctttgctgacctgggagatggcggctgctacggggacctcttctgcaaggccctgaagacctacaacatgctgtgcttcggcatctaccgcctgagagatgcccacctgagcacccccagccagtgcaccaagcgctacgtgatcaccaaccccccctatgaatttgagctggtgcccacagacctgatcttctgcctgatgcagtttgaccacaatgccggccagagccgggccagcctgagccacagcagccacagcagccagagcagcagcaagaagagcagctctgtgcacagcatccccagcacagccaaccggcagaaccggcccaagagccgggagagccgggacaagcagaatgccaccaggatgaacaggatgggccaggccgagaagaagtggttcacagatgagccagacaatgcctaccccaggaacatccagatcaagcccatgagcacccacatggccaaccagatcaaccagtacaagagcaccagcagcctcatcccccccatccgggaggtggaggatgaatgttag

SEQ ID NO: 282925 - DNA, 3504 bp, Artificial Sequence
  derived and/or modified sequence
cccaagatggatgccctgatcatccctgtgaccatggaggtgccctgtgacagccggggccagaggatgtggtgggccttcctggccagctccatggtgaccttcttcggcggcctcttcatcatcctgctgtggaggaccctgaagtacctgtggacagtgtgctgccactgcggcggcaagaccaaggaggcccagaagatcaacaacggcagcagccaggctgatggcaccctgaagcctgtggatgagaaggaggaggccgtggccgctgaggtgggctggatgacctctgtgaaggactgggccggcgtgatgatcagcgcccagaccctgaccggccgggtgctggtggtgctggtgtttgccctgagcatcggggccctggtgatctacttcatcgacagcagcaaccccatcgagagctgccagaacttctacaaggacttcaccctgcagattgacatggccttcaacgtgttcttcctgctgtacttcggcctgcgcttcatcgccgccaatgacaagctgtggttctggctggaggtgaacagcgtggtggacttcttcaccgtgccccctgtgtttgtgtctgtgtacctgaacagatcctggctgggcctgcgcttcctgcgggccctgcggctcatccagttcagcgagatcctgcagttcctgaacatcctgaagaccagcaacagcatcaagctggtgaacctgctgagcatcttcatcagcacctggctgacagctgctggcttcatccacctggtggagaacagcggggacccctgggagaacttccagaacaaccaggccctgacctactgggagtgtgtgtacctgctgatggtgaccatgagcacagtgggctatggagatgtgtatgccaagaccaccctgggccgcctcttcatggtgttcttcatcctgggcggcctggccatgtttgccagctatgtgcctgagatcatcgagctgattggcaacaggaagaagtatggaggcagctacagcgctgtgtctggcaggaagcacatcgtggtgtgtggccacatcaccctggagagcgtgagcaacttcctgaaggacttcctgcacaaggacagagatgatgtgaatgtggagatcgtgttcctgcacaacatcagccccaacctggagctggaggccctcttcaagaggcacttcacccaggtggagttctaccagggctctgtgctgaacccccatgacctggcccgggtgaagattgagagcgcagatgcctgcctgatcctggccaacaagtactgtgccgaccctgatgctgaagatgccagcaacatcatgagggtcatcagcatcaagaactaccaccccaagatccgcatcatcacccagatgctgcagtaccacaacaaggcccacctgctgaacatccccagctggaactggaaggagggagatgatgccatctgcctggccgagctgaagctgggcttcatcgcccagagctgcctggcccagggcctgagcaccatgctggccaacctcttctccatgaggagcttcatcaagattgaggaggacacctggcagaagtactacctggagggcgtgtccaatgagatgtacacagagtacctgagcagcgcctttgtgggcctgtccttccccaccgtgtgtgagctgtgctttgtgaagctgaagctgctgatgattgccatcgagtacaagagcgccaaccgggagagccgcatcctgatcaaccctggcaaccacctgaagatccaggagggcaccctgggcttcttcatcgccagtgatgccaaggaggtgaagagggccttcttctactgcaaggcctgccatgatgacatcacagaccccaagaggatcaagaagtgtggctgcaagaggctggaggatgagcagcccagcaccctgagccccaagaagaagcagagaaatggaggcatgaggaacagccccaacaccagccccaagctgatgagacatgaccccctgctgatccctggaaatgaccagattgacaacatggacagcaatgtgaagaagtatgacagcacaggcatgttccactggtgtgcccccaaggagattgagaaggtgatcctgaccaggtctgaggccgccatgacagtgctgagcggccacgtggtggtgtgcatctttggagatgtgtcctctgccctgattggcctgaggaacctggtgatgcccctgcgggccagcaacttccactaccacgagctgaagcacatcgtgtttgtgggcagcattgagtacctgaagcgggagtgggagaccctgcacaacttccccaaggtgtccatcctgcccggcacccccctgagcagagctgacctgcgggctgtgaacatcaacctgtgtgacatgtgtgtgatcctgagcgccaaccagaacaacattgatgacaccagcctgcaggacaaggagtgcatcctggccagcctgaacatcaagtccatgcagtttgatgacagcattggagtgctgcaggccaacagccagggcttcaccccacctggcatggacaggagcagcccagacaacagccctgtgcacggcatgctgcggcagcccagcatcaccaccggggtgaacatccccatcatcacagagctggtgaatgacaccaacgtgcagttcctggaccaggatgatgatgatgatcctgacacagagctgtacctgacccagccctttgcctgtggcacagcctttgctgtgtctgtgctggacagcctgatgtctgccacctacttcaatgacaacatcctgaccctcatccgcaccctggtgactggaggagccaccccagagctggaggccctgattgctgaggagaatgccctgcggggcggctacagcaccccccagaccctggccaacagagaccgctgccgggtggcccagctggccctgctggatggcccctttgctgacctgggagatggcggctgctacggggacctcttctgcaaggccctgaagacctacaacatgctgtgcttcggcatctaccgcctgagagatgcccacctgagcacccccagccagtgcaccaagcgctacgtgatcaccaaccccccctatgaatttgagctggtgcccacagacctgatcttctgcctgatgcagtttgaccacaatgccggccagagccgggccagcctgagccacagcagccacagcagccagagcagcagcaagaagagcagctctgtgcacagcatccccagcacagccaaccggcagaaccggcccaagagccgggagagccgggacaagcagaatgccaccaggatgaacaggatgggccaggagaagaagtggttcacagatgagccagacaatgcctaccccaggaacatccagatcaagcccatgagcacccacatggccaaccagatcaaccagtacaagagcaccagcagcctcatcccccccatccgggaggtggaggatgagtgctag

SEQ ID NO: 282926 - DNA, 3549 bp, Artificial Sequence
  derived and/or modified sequence
tgaagcagcagcagcagcagcagcagcagcagcgtgcacgagcccaaaatggacgccttaatcattcctgtcactatggaagtgccctgcgattcgcgcggtcagcgcatgtggtgggctttcttggcttcctccatggtcactttttttgggggtctgtttatcattctcttgtggcgcaccctcaaatacctctggactgtatgttgccactgcggcggcaagaccaaagaagctcagaagatcaataatggatcaagccaagccgatgggaccctgaagcctgtggatgagaaagaggaagctgtggctgcagaggtgggatggatgactagtgtgaaagactgggcgggcgtaatgatatcagcacaaactctcactggaagagttctggtcgtgctggtgtttgccctgtccatcggcgccttggtgatttattttatcgactcaagtaacccaatcgagtcatgccaaaatttctataaagacttcacactgcagatcgacatggctttcaatgtgttctttctgctatacttcggcctgcggtttatcgcagctaacgataaactatggttctggcttgaagtgaattccgtggttgattttttcacagtgccgccagtattcgtgtctgtgtatctgaaccgctcctggctgggcctgcggttcttaagagccctccggctcattcagttttccgaaattctgcagttcctgaatatcctgaagaccagtaacagcattaaactcgttaacctgctgagcatctttatttcaacatggctcacagcagctgggttcattcatctggtggagaacagcggcgacccatgggagaactttcaaaacaaccaggcactgacctattgggaatgtgtatatctcctgatggtgactatgtctactgtagggtacggcgacgtctacgccaagaccactttgggccggttgttcatggtgttctttattctgggcggtctcgccatgtttgcttcctatgtgccagaaatcatcgagctgatcggcaacagaaagaaatacggaggcagctactcggccgtgtcgggtcgtaagcacatcgttgtgtgtggtcatataaccctcgaatcggtgtccaacttcctgaaagatttcctacataaagaccgggacgacgtcaatgtcgagatcgtgttcctgcacaacatcagtccgaatctggagctcgaggcactgttcaaacgccatttcacgcaggtggaattctatcaaggaagtgttcttaacccacacgacctggcgcgcgtgaagattgaatccgccgacgcctgcctgattctagctaataagtactgcgccgacccggatgctgaagacgcctctaatattatgcgtgtcatcagcatcaagaattatcatcccaaaatccggatcattacacaaatgctgcaatatcataataaggcccatttacttaacatcccttcttggaattggaaggaaggcgacgacgctatctgtctggccgagctcaagttgggtttcatcgctcagagttgcctcgcccaaggcttgagtaccatgcttgccaacctgttttcaatgaggtcctttatcaaaatagaggaggacacgtggcagaagtactatctcgagggagtcagtaatgagatgtacaccgagtacctctcttcagcatttgtaggcttgtcattccctacagtgtgcgaactgtgctttgtgaaactcaagctgctgatgattgctattgaatataagagcgctaacagggaatctcgcattctgatcaacccagggaaccacctcaagatacaggaaggaactctcggttttttcatagccagtgacgcgaaggaggtgaagcgcgcatttttctactgcaaagcctgccatgacgacatcacggatcccaagcgcatcaaaaagtgcgggtgcaagcggctcgaagatgaacagccatcgacactgagtcccaagaagaaacagcgcaatggggggatgaggaacagccctaacacttcacctaagcttatgaggcacgaccccctgttgatacccgggaacgatcagatagataatatggattccaacgtcaagaaatacgactccacaggaatgttccattggtgcgcccccaaagagatcgagaaagtgatcctgacacggtctgaagctgctatgacggttctgtcagggcatgtcgttgtttgcatcttcggagacgtctcctctgcacttatcggtctgaggaacttggtcatgcctctgagggccagcaatttccactatcacgagctgaaacacatcgtcttcgtgggtagtatcgagtatctcaagagggaatgggaaaccttacacaatttccctaaagtgtccatcttacctggaactccattaagcagagccgacctgagggccgtcaacatcaacctttgcgacatgtgtgtgatcctaagcgctaaccagaataatatcgacgacaccagtctccaggacaaggagtgcattctggcctctctgaacataaagtccatgcagttcgacgacagtatcggtgtactccaggccaactcccagggattcactccccctgggatggaccgctcatctccagacaatagcccagtgcatggcatgcttaggcagcctagcattaccacgggcgtgaacattccaattattacagaactggtcaatgatacaaatgtgcagttcctggaccaagacgatgatgacgaccctgacaccgagctgtacctgacccagcctttcgcctgcggaactgctttcgccgtaagcgtcctggatagtcttatgagcgccacctattttaacgataacatcttaactctcatcaggactttggttacaggaggcgctactcctgagctggaggctttgattgccgaagagaacgccttgcgcgggggttatagcactccgcaaactctggctaacagggaccgctgcagagtggcccaactggctttgcttgacgggccctttgccgatttaggagatggaggttgctatggcgatttgttttgtaaggccctgaagacctataacatgctgtgtttcggcatctacagacttagagatgctcatctgtcaacaccctctcaatgcactaaaagatacgtaatcacgaaccctccttacgagttcgagctggtgccgacagatctaattttctgcctgatgcaattcgaccacaacgcaggccagtcccgggcctccctgagccacagcagccactctagccagtcttcctctaagaagtcaagttcagtgcactcaatcccaagcacggccaatagacagaatcgaccgaagtcacgcgaatccagagacaagcagaacgccacccggatgaataggatggggcaggccgagaaaaaatggtttacggatgagccagataatgcttacccccgaaacatccagattaagcccatgtccacccacatggcaaaccagatcaatcagtacaagtctacttcgagcctgatcccccctattcgcgaagtggaagacgaatgttag

SEQ ID NO: 282927 - DNA, 3504 bp, Artificial Sequence
  derived and/or modified sequence
cccaagatggacgccctgatcatccccgtgaccatggaggtgccctgtgactctagggggcagagaatgtggtgggcgttcctggcctcaagcatggtcactttctttggcggcttgtttatcatcctcctctggagaaccttaaagtacctgtggaccgtgtgctgccactgcggcggcaagaccaaagaggcccagaaaatcaataacgggagctctcaggctgatggcacgctgaagcctgtcgacgagaaagaggaggcagttgccgctgaggtggggtggatgaccagcgtcaaggactgggctggcgtgatgatcagcgcccagactctcactggcagggtgctggtggtgttagtgttcgcactcagcattggtgccttggtcatttattttatcgacagctctaatcccatagagtcatgtcaaaacttctataaggacttcacactccagattgatatggccttcaacgtgttttttctactctatttcggtttacggtttattgccgccaacgacaaactgtggttctggttagaagtcaattcagtagtggattttttcactgtaccaccagtgttcgtgtcagtttatctgaaccgcagctggctgggtctgaggtttctgagggccctacggctgattcagttcagcgagatcctccagttcctcaacattcttaagaccagcaactctattaagcttgttaacttactttccattttcatttctacctggctcactgccgctggatttatccatctagtggaaaatagtggggacccctgggagaatttccagaacaaccaagcattgacatattgggaatgcgtctatctgctcatggtgactatgtccaccgtcgggtatggtgacgtgtacgccaagacaacgctgggaaggttgttcatggtcttttttattctcggcggtttagccatgtttgcgagctatgtgcccgagattatcgagctgattgggaatcgcaaaaagtatggcggctcctactctgccgtgtccggtaggaaacatatcgtggtatgtggacacattaccttggaatcagtgagtaattttctgaaggactttcttcacaaggacagggatgacgtaaacgtcgaaatcgtcttcctgcataatatttctcccaacctggagctggaagcactgttcaaaagacatttcactcaagttgaattctatcaaggcagcgttctcaatccccatgatcttgctcgggtgaaaatagaatcagcggacgcctgtctaattctggccaacaaatactgtgcagatcctgatgccgaggacgcatctaatataatgagggtcatcagcattaaaaactatcacccgaagattaggattattacgcagatgcttcagtatcataataaagcccacctcctgaacattccatcatggaactggaaggaaggtgatgatgctatctgtctagcagagctcaagctcggtttcatcgctcagtcttgcctggcccagggactcagcaccatgttggcaaatctgttctctatgaggagttttataaaaattgaagaggacacctggcagaagtactacctggaaggggtttcgaacgagatgtataccgaatatctctcaagcgctttcgtagggctgagttttcccaccgtgtgtgagttgtgctttgtgaaattgaaactactgatgatagccatcgagtacaaatcagctaatagagagagtcgtatcctcattaatcccggcaaccacttaaaaattcaggagggcactctgggtttcttcatagcgagcgacgcgaaggaggttaagcgcgccttcttttactgcaaagcttgtcacgacgacattacagatcccaaaaggatcaagaagtgcggttgcaagcgccttgaggacgagcaaccctcaaccttatcacccaaaaagaagcagaggaacggcggcatgagaaacagccccaacacctcacccaaacttatgcgccatgaccctctgctgatccccggcaatgaccagattgacaacatggattctaatgtgaagaaatatgactcaaccggcatgtttcattggtgcgcgcctaaagagatagagaaagtgattctgaccagaagcgaggccgccatgaccgtgttatcaggccacgtggtcgtttgcatattcggcgacgtgtcctcggccctgattggtctcaggaacctggttatgccgctgagagcatccaactttcactaccatgagcttaagcatatcgtgttcgtgggctctatcgaatatctgaaacgagagtgggagacgctccacaacttcccgaaagtgagcattctgcccggaactccgttgtctagggccgaccttagagccgtgaacattaatctgtgcgatatgtgcgtcattctctccgcgaaccagaataacatagatgatacctccctacaagataaagagtgtatccttgccagcctgaatatcaaaagcatgcaatttgacgactcgataggagtgctgcaggccaatagtcagggcttcacccccccaggaatggaccggagttccccagacaactcccctgtgcatgggatgctcaggcaaccatcaatcactaccggggtgaacatcccaatcatcaccgagctagtgaatgataccaacgtgcaattcctggatcaggacgatgacgatgaccccgatactgagctgtatctcacacagcccttcgcgtgtggcacggcctttgctgtgtctgtgctggattccctgatgtccgcaacatattttaatgataacatcttgacgctcataaggacacttgtgaccggcggtgccacacctgaacttgaggcattaatagctgaagagaacgccttgaggggcggttactccaccccccagaccctggccaacagagaccgatgcagggtggcccagctggcactcctagatgggccttttgcagatttgggagacggaggctgttacggggatcttttttgtaaagccctcaagacttataacatgctgtgttttggtatctatcgcttaagagatgcgcatctgtccacacccagtcaatgtaccaaaaggtacgtcattaccaatcccccctacgaatttgagctggtgcctactgaccttatattctgtctgatgcagttcgaccataatgctggtcagtcccgagcaagcctcagccactcaagccattcatctcagtcctcaagtaaaaagtcaagtagcgtgcacagtatcccgtctaccgctaaccgccaaaaccgccccaaatcccgtgagtctagagataagcagaatgctacccggatgaaccggatgggtcaggaaaaaaaatggttcactgacgagcctgataacgcttacccacggaatattcaaataaaacccatgagtactcacatggcgaaccagattaaccaatataagtctacatcttcccttatcccccccattagagaagtcgaggatgagtgctag

SEQ ID NO: 282928 - DNA, 3690 bp, Artificial Sequence
  derived and/or modified sequence
cttcttcctcctcctcttcctcctcgtcctcggtccacgagcccaagatggatgcgctcatcatcccggtgaccatggaggtgccgtgcgacagccggggccaacgcatgtggtgggctttcctggcctcctccatggtgactttcttcgggggcctcttcatcatcttgctctggcggacgctcaagtacctgtggaccgtgtgctgccactgcgggggcaagacgaaggaggcccagaagattaacaatggctcaagccaggcggatggcactctcaaaccagtggatgaaaaagaggaggcagtggccgccgaggtcggctggatgacctccgtgaaggactgggcgggggtgatgatatccgcccagacactgactggcagagtcctggttgtcttagtctttgctctcagcatcggtgcacttgtaatatacttcatagattcatcaaacccaatagaatcctgccagaatttctacaaagatttcacattacagatcgacatggctttcaacgtgttcttccttctctacttcggcttgcggtttattgcagccaacgataaattgtggttctggctggaagtgaactctgtagtggatttcttcacggtgccccccgtgtttgtgtctgtgtacttaaacagaagttggcttggtttgagatttttaagagctctgagactgatacagttttcagaaattttgcagtttctgaatattcttaaaacaagtaattccatcaagctggtgaatctgctctccatatttatcagcacgtggctgactgcagccgggttcatccatttggtggagaattcaggggacccatgggaaaatttccaaaacaaccaggctctcacctactgggaatgtgtctatttactcatggtcacaatgtccaccgttggttatggggatgtttatgcaaaaaccacacttgggcgcctcttcatggtcttcttcatcctcgggggactggccatgtttgccagctacgtccctgaaatcatagagttaataggaaaccgcaagaaatacgggggctcctatagtgcggttagtggaagaaagcacattgtggtctgcggacacatcactctggagagtgtttccaacttcctgaaggactttctgcacaaggaccgggatgacgtcaatgtggagatcgtttttcttcacaacatctcccccaacctggagcttgaagctctgttcaaacgacattttactcaggtggaattttatcagggttccgtcctcaatccacatgatcttgcaagagtcaagatagagtcagcagatgcatgcctgatccttgccaacaagtactgcgctgacccggatgcggaggatgcctcgaatatcatgagagtaatctccataaagaactaccatccgaagataagaatcatcactcaaatgctgcagtatcacaacaaggcccatctgctaaacatcccgagctggaattggaaagaaggtgatgacgcaatctgcctcgcagagttgaagttgggcttcatagcccagagctgcctggctcaaggcctctccaccatgcttgccaacctcttctccatgaggtcattcataaagattgaggaagacacatggcagaaatactacttggaaggagtctcaaatgaaatgtacacagaatatctctccagtgccttcgtgggtctgtccttccctactgtttgtgagctgtgttttgtgaagctcaagctcctaatgatagccattgagtacaagtctgccaaccgagagagccgtatattaattaatcctggaaaccatcttaagatccaagaaggtactttaggatttttcatcgcaagtgatgccaaagaagttaaaagggcatttttttactgcaaggcctgtcatgatgacatcacagatcccaaaagaataaaaaaatgtggctgcaaacggcttgaagatgagcagccgtcaacactatcaccaaaaaaaaagcaacggaatggaggcatgcggaactcacccaacacctcgcctaagctgatgaggcatgaccccttgttaattcctggcaatgatcagattgacaacatggactccaatgtgaagaagtacgactctactgggatgtttcactggtgtgcacccaaggagatagagaaagtcatcctgactcgaagtgaagctgccatgaccgtcctgagtggccatgtcgtggtctgcatctttggcgacgtcagctcagccctgatcggcctccggaacctggtgatgccgctccgtgccagcaactttcattaccatgagctcaagcacattgtgtttgtgggctctattgagtacctcaagcgggaatgggagacgcttcataacttccccaaagtgtccatattgcctggtacgccattaagtcgggctgatttaagggctgtcaacatcaacctctgtgacatgtgcgttatcctgtcagccaatcagaataatattgatgatacttcgctgcaggacaaggaatgcatcttggcgtcactcaacatcaaatctatgcagtttgatgacagcatcggagtcttgcaggctaattcccaagggttcacacctccaggaatggatagatcctctccagataacagcccagtgcacgggatgttacgtcaaccatccatcacaactggggtcaacatccccatcatcactgaactagtgaacgatactaatgttcagtttttggaccaagacgatgatgatgaccctgatacagaactgtacctcacgcagccctttgcctgtgggacagcatttgccgtcagtgtcctggactcactcatgagcgcgacgtacttcaatgacaatatcctcaccctgatacggaccctggtgaccggaggagccacgccggagctggaggctctgattgctgaggaaaacgcccttagaggtggctacagcaccccgcagacactggccaatagggaccgctgccgcgtggcccagttagctctgctcgatgggccatttgcggacttaggggatggtggttgttatggtgatctgttctgcaaagctctgaaaacatataatatgctttgttttggaatttaccggctgagagatgctcacctcagcacccccagtcagtgcacaaagaggtatgtcatcaccaacccgccctatgagtttgagctcgtgccgacggacctgatcttctgcttaatgcagtttgaccacaatgccggccagtcccgggccagcctgtcccattcctcccactcgtcgcagtcctccagcaagaagagctcctctgttcactccatcccatccacagcaaaccgacagaaccggcccaagtccagggagtcccgggacaaacagaatgcaacaaggatgaatagaatgggccaagcagaaaagaaatggtttacagatgaaccggataatgcctatcccagaaacattcaaatcaagcccatgagtacccacatggctaaccagatcaaccaatataaatccacaagcagcttgattccaccaatcagagaagttgaagatgaatgttgactcccaggagaccagaactatttttttaaagcctgacaaacttcataaatggtgatgtgacttttcttcttacatgctgaatcactggtggaaacgttaggataagcaagaattgccagaaaataaagtagacagatctttc

SEQ ID NO: 282929 - DNA, 3646 bp, Artificial Sequence
  derived and/or modified sequence
cccaagatggatgcgctcatcatcccggtgaccatggaggtgccgtgcgacagccggggccaacgcatgtggtgggctttcctggcctcctccatggtgactttcttcgggggcctcttcatcatcttgctctggcggacgctcaagtacctgtggaccgtgtgctgccactgcgggggcaagacgaaggaggcccagaagattaacaatggctcaagccaggcggatggcactctcaaaccagtggatgaaaaagaggaggcagtggccgccgaggtcggctggatgacctccgtgaaggactgggcgggggtgatgatatccgcccagacactgactggcagagtcctggttgtcttagtctttgctctcagcatcggtgcacttgtaatatacttcatagattcatcaaacccaatagaatcctgccagaatttctacaaagatttcacattacagatcgacatggctttcaacgtgttcttccttctctacttcggcttgcggtttattgcagccaacgataaattgtggttctggctggaagtgaactctgtagtggatttcttcacggtgccccccgtgtttgtgtctgtgtacttaaacagaagttggcttggtttgagatttttaagagctctgagactgatacagttttcagaaattttgcagtttctgaatattcttaaaacaagtaattccatcaagctggtgaatctgctctccatatttatcagcacgtggctgactgcagccgggttcatccatttggtggagaattcaggggacccatgggaaaatttccaaaacaaccaggctctcacctactgggaatgtgtctatttactcatggtcacaatgtccaccgttggttatggggatgtttatgcaaaaaccacacttgggcgcctcttcatggtcttcttcatcctcgggggactggccatgtttgccagctacgtccctgaaatcatagagttaataggaaaccgcaagaaatacgggggctcctatagtgcggttagtggaagaaagcacattgtggtctgcggacacatcactctggagagtgtttccaacttcctgaaggactttctgcacaaggaccgggatgacgtcaatgtggagatcgtttttcttcacaacatctcccccaacctggagcttgaagctctgttcaaacgacattttactcaggtggaattttatcagggttccgtcctcaatccacatgatcttgcaagagtcaagatagagtcagcagatgcatgcctgatccttgccaacaagtactgcgctgacccggatgcggaggatgcctcgaatatcatgagagtaatctccataaagaactaccatccgaagataagaatcatcactcaaatgctgcagtatcacaacaaggcccatctgctaaacatcccgagctggaattggaaagaaggtgatgacgcaatctgcctcgcagagttgaagttgggcttcatagcccagagctgcctggctcaaggcctctccaccatgcttgccaacctcttctccatgaggtcattcataaagattgaggaagacacatggcagaaatactacttggaaggagtctcaaatgaaatgtacacagaatatctctccagtgccttcgtgggtctgtccttccctactgtttgtgagctgtgttttgtgaagctcaagctcctaatgatagccattgagtacaagtctgccaaccgagagagccgtatattaattaatcctggaaaccatcttaagatccaagaaggtactttaggatttttcatcgcaagtgatgccaaagaagttaaaagggcatttttttactgcaaggcctgtcatgatgacatcacagatcccaaaagaataaaaaaatgtggctgcaaacggcttgaagatgagcagccgtcaacactatcaccaaaaaaaaagcaacggaatggaggcatgcggaactcacccaacacctcgcctaagctgatgaggcatgaccccttgttaattcctggcaatgatcagattgacaacatggactccaatgtgaagaagtacgactctactgggatgtttcactggtgtgcacccaaggagatagagaaagtcatcctgactcgaagtgaagctgccatgaccgtcctgagtggccatgtcgtggtctgcatctttggcgacgtcagctcagccctgatcggcctccggaacctggtgatgccgctccgtgccagcaactttcattaccatgagctcaagcacattgtgtttgtgggctctattgagtacctcaagcgggaatgggagacgcttcataacttccccaaagtgtccatattgcctggtacgccattaagtcgggctgatttaagggctgtcaacatcaacctctgtgacatgtgcgttatcctgtcagccaatcagaataatattgatgatacttcgctgcaggacaaggaatgcatcttggcgtcactcaacatcaaatctatgcagtttgatgacagcatcggagtcttgcaggctaattcccaagggttcacacctccaggaatggatagatcctctccagataacagcccagtgcacgggatgttacgtcaaccatccatcacaactggggtcaacatccccatcatcactgaactagtgaacgatactaatgttcagtttttggaccaagacgatgatgatgaccctgatacagaactgtacctcacgcagccctttgcctgtgggacagcatttgccgtcagtgtcctggactcactcatgagcgcgacgtacttcaatgacaatatcctcaccctgatacggaccctggtgaccggaggagccacgccggagctggaggctctgattgctgaggaaaacgcccttagaggtggctacagcaccccgcagacactggccaatagggaccgctgccgcgtggcccagttagctctgctcgatgggccatttgcggacttaggggatggtggttgttatggtgatctgttctgcaaagctctgaaaacatataatatgctttgttttggaatttaccggctgagagatgctcacctcagcacccccagtcagtgcacaaagaggtatgtcatcaccaacccgccctatgagtttgagctcgtgccgacggacctgatcttctgcttaatgcagtttgaccacaatgccggccagtcccgggccagcctgtcccattcctcccactcgtcgcagtcctccagcaagaagagctcctctgttcactccatcccatccacagcaaaccgacagaaccggcccaagtccagggagtcccgggacaaacagaatgcaacaaggatgaatagaatgggccaagaaaagaaatggtttacagatgaaccggataatgcctatcccagaaacattcaaatcaagcccatgagtacccacatggctaaccagatcaaccaatataaatccacaagcagcttgattccaccaatcagagaagttgaagatgaatgttgactcccaggagaccagaactatttttttaaagcctgacaaacttcataaatggtgatgtgacttttcttcttacatgctgaatcactggtggaaacgttaggataagcaagaattgccagaaaataaagtagacagatctttc

SEQ ID NO: 282930 - DNA, 3549 bp, Artificial Sequence
  derived and/or modified sequence
tgaagcagtagttcaagctcctcatcttcctccgtacacgaacctaaaatggatgccttaattatccccgtcactatggaagtcccctgcgattccagaggccagcgtatgtggtgggccttcctggcgagctcaatggtgacgttcttcggaggactgtttatcatcctcctctggcggacacttaaatacctctggactgtgtgttgtcactgcggagggaaaactaaggaagcccaaaagattaataacggcagcagccaggccgatggcacattaaagccggtggacgagaaggaggaagctgtggcagcagaggtcggctggatgacttccgtgaaagattgggccggagtaatgataagtgcccagacactgactggtagagttctcgtggtcctggtgttcgccctttccattggcgctctagtcatctactttattgactcctccaacccaatcgaatcttgtcagaacttttataaggacttcaccctgcagattgacatggcgttcaacgttttttttctgctgtatttcgggctgcggtttatcgctgccaacgacaagctctggttctggcttgaggtcaactcagtcgtagacttctttacagtgcctcctgtcttcgtgtcagtctacctgaatcgaagctggctgggcttgagatttttgagggccttgaggttaatccaattcagcgaaattctccagttcctaaacatcctgaagacaagtaattcaatcaagctagttaatctgctgagcatttttatctcgacctggctgaccgctgctggatttattcacctcgtggagaacagcggagatccatgggaaaatttccagaataatcaggccttgacttattgggagtgcgtctaccttctcatggtgacaatgtctacagtggggtacggggatgtgtacgctaagactacactgggtagactgtttatggtgtttttcattctgggaggtcttgctatgttcgcctcatatgtcccggaaattatcgaactgatcggaaaccgaaaaaaatacgggggtagctattcagcagtgtcaggcaggaaacatatcgttgtctgcgggcacataactctcgaaagcgtgtccaacttcctgaaggacttccttcacaaagatagggacgacgtcaacgtggaaattgtgtttctgcacaacatctcaccaaacctggaacttgaagctttatttaagcgtcattttactcaagttgagttttatcaggggtccgtacttaaccctcatgatctcgcacgagtaaagattgagtccgccgatgcctgcctaatcctagccaacaaatattgtgctgatccggatgcggaagatgcatccaacatcatgcgggtcatttctatcaagaattaccacccaaagattaggatcatcacgcagatgcttcagtaccacaacaaggcacatcttctgaatataccctcatggaactggaaggagggagatgacgccatttgtctggccgagctgaagttggggttcattgcccaatcctgcctggcccagggactgtctacgatgttggccaatttgtttagcatgaggtctttcataaagatcgaagaagatacctggcagaaatactacttggaaggcgtgtccaacgaaatgtacacggagtacctctctagcgctttcgtcggactcagctttccgaccgtatgtgaactctgttttgtcaaactgaagctattgatgattgcgattgagtacaaaagtgccaatagagaatcccgcatcttaattaatccaggcaaccacctgaagattcaggaagggacccttggattctttatcgcctcagatgctaaagaagtgaaaagggccttcttttactgtaaagcctgtcacgacgatataacagaccccaagcgcattaaaaagtgtggctgcaaaaggttggaagatgagcagccatccacactctctccgaaaaagaaacaacgcaacggaggtatgcggaattctcccaatacctcgccaaaattgatgcgtcacgacccactgctgatcccaggaaatgaccagattgacaatatggactctaatgtaaagaaatacgactctactgggatgtttcattggtgcgcacccaaggaaatcgaaaaggtcatcctcacacggtctgaggctgcaatgactgtgctatctggccacgttgtggtttgtatcttcggggatgtctccagcgctttgatcggccttcgcaacctggtcatgcctttaagggcctctaatttccattaccatgaacttaagcacattgtttttgttggcagcattgagtaccttaaaagggagtgggagacactacacaactttcccaaagtcagcatactgcccggaacacctctctccagggcagacctgcgcgctgtgaatattaacctctgcgacatgtgcgttattttgagcgccaaccaaaacaatatcgacgatacgagcctccaggacaaagagtgcatactggcaagcctcaatattaagtctatgcagttcgacgactccattggcgtcttgcaggctaacagccaggggtttacaccaccaggcatggacagatccagccccgacaatagtccagtgcatggcatgctgagacagcctagcattactacaggggtaaatattccaattatcaccgaactggtgaacgataccaatgtgcaatttctggaccaagatgatgacgatgatccagacactgagctgtaccttacccaaccattcgcatgcggcacggccttcgctgtgtccgtacttgattccctgatgtccgctacctactttaacgacaacattctaaccttaatcagaaccctggtaactggtggtgccaccccagagcttgaggctctgattgccgaagaaaacgccttacggggagggtactctacacctcagaccctggccaacagggatcgctgtagagtcgcccagctcgcgctccttgatggcccttttgccgatctgggggacggcggttgttatggtgacctgttttgcaaagcattgaagacatataatatgttgtgctttggcatatatcggctacgagatgcacatttaagcacgcccagtcaatgcacgaagcggtacgtaattacaaatccaccctacgagtttgaattggttccaaccgatttaattttttgtctcatgcagtttgaccataatgccggacagtcgagggcatccctgtcccacagtagtcactctagccaaagttcatcaaagaaaagctcttcggtgcattccattccatcaaccgccaacaggcagaaccgccctaagagtcgggaatctcgcgataaacagaatgccacgagaatgaacagaatggggcaggcggagaagaaatggtttacagacgagcctgataatgcctaccccaggaatattcagatcaagccaatgagcactcacatggccaatcaaatcaatcaatataagtccacatcttccctgatcccgcctattagggaggtggaggatgaatgctag

SEQ ID NO: 282931 - DNA, 3504 bp, Artificial Sequence
  derived and/or modified sequence
cccaagatggacgctctgatcattcctgtgaccatggaggtcccctgtgactccagaggccaacgtatgtggtgggccttcttggccagcagtatggttacattctttgggggactgtttattatccttctatggagaaccctgaagtacctctggaccgtgtgttgtcactgcggcggtaagaccaaggaggctcaaaaaatcaacaatggctcctctcaggccgacgggactctgaagcctgtggacgagaaagaagaggccgtggccgcagaggttggctggatgacctccgtgaaagattgggccggagttatgatttcagcacagaccctcacaggacgcgttctggtggtcctggtgttcgcactgtctataggggctcttgtgatctactttatcgattcgtccaacccaattgagtcctgccaaaatttctacaaggacttcaccttacagattgatatggcattcaatgtgttcttcttgctctactttggtctccgcttcatagctgccaacgataaattatggttttggttagaggtcaattctgtggtggacttcttcacagtaccacccgtgttcgtcagcgtatacctcaacaggagttggctggggttgcggttcctgcgggctctcagacttattcaattttctgagatcctccagtttttaaatatactaaagacaagcaacagcatcaaactggtgaatctcctgagcatctttattagtacctggctcaccgccgcaggatttatccacctcgtcgagaattctggcgatccgtgggaaaacttccagaataaccaggcgctgacctattgggagtgtgtgtacctgctgatggtgaccatgagcacagtgggatatggtgacgtgtacgcaaagactacactggggagactcttcatggtgttcttcatcctgggtgggctggccatgttcgccagctacgtgcctgaaataatcgagctgatcggaaacaggaaaaaatacgggggaagctatagcgccgtcagcggcagaaaacatattgttgtgtgtggacacatcaccctggaatccgtcagtaatttcctgaaggatttcctgcacaaagaccgcgatgacgtgaacgtcgagattgtctttttgcataatataagccccaatttggaacttgaggctctctttaaacgccatttcacacaggtggagttttaccaaggctccgtactgaacccccacgaccttgctcgtgtcaagatagaatctgctgatgcatgcctcattctggccaataagtactgcgccgatccagacgcggaggacgcatctaatatcatgcgagtgatctctattaaaaactaccaccctaaaattcggatcataacacagatgctgcagtaccacaacaaagctcatctgcttaacatccccagctggaattggaaagaaggcgacgacgctatttgtttggcagagttgaagttgggcttcattgcccagtcttgtctggctcaaggtctctcgactatgctggcaaacttgttttctatgcgttccttcattaagatcgaagaagacacctggcagaagtattacctggagggggtcagcaatgagatgtataccgaatacctctccagtgcctttgtcggtctgagcttccccaccgtgtgcgaactctgctttgtgaaacttaaattattaatgatagcaatcgagtataagagtgccaaccgtgaatcccgaattctcattaatcccggaaaccatctgaagatccaagagggaacactgggtttcttcatagcatctgatgccaaggaagtgaaacgtgcatttttctattgcaaggcctgccatgatgatattaccgatccaaagcgcattaaaaaatgtggctgcaagcggctagaagacgaacaacctagtacactcagtccgaagaagaagcagcggaatgggggaatgcgcaactcccccaacacatccccgaagctaatgcgacatgaccctcttcttatacccggaaatgaccagattgacaacatggattcaaatgttaagaaatacgacagtacaggaatgtttcactggtgtgcaccaaaagaaattgagaaagtgatactgaccaggtccgaagcagccatgaccgtgctaagcgggcacgtagtggtctgcatctttggggacgtgtcatccgccttaatcggactgcggaatctcgtaatgcctctgcgcgcttcaaattttcattatcatgagctcaagcatatcgtgttcgtgggctcaatcgagtatcttaaaagggagtgggagacactccacaacttccccaaagtgtctatccttcccggtacaccactttcccgcgctgatcttcgggcagtgaacattaatctttgcgatatgtgcgttattctgtccgcaaaccaaaataatattgacgatacaagcctgcaagataaagagtgcattctggctagtctcaacatcaaaagcatgcagtttgacgacagtattggggtgctgcaagcaaactcgcaggggttcacgccgccaggcatggaccggagtagtcccgataatagcccagtgcacggaatgcttcgccagccaagcataaccaccggggtgaatatacctattatcaccgaactggtcaatgacaccaacgtgcagtttcttgaccaggatgatgatgatgatccagacacagagctatatcttacacagcctttcgcctgcggcacagcgtttgccgtttcggtattagatagcctaatgtctgccacatacttcaacgacaacatcctgaccctgatccgcaccttggtcactggcggtgctactcctgagctggaggctctgattgccgaggaaaatgctttgcgtggtgggtacagtacaccccaaacactggccaaccgagataggtgccgcgttgcacagctggctttgctggacggaccattcgctgatcttggtgatggaggttgctacggggatctcttttgcaaagcactgaaaacatataatatgctgtgctttggtatatatagattacgtgacgcgcacttatcaactccttcacagtgtactaaacggtatgtgatcacaaaccctccttatgagtttgaactggtgcctactgacctcatattttgcctgatgcaatttgaccacaacgccggacagtccagagctagccttagtcactccagtcacagtagccaaagctcgagcaaaaaatcatctagcgtccattccattccaagcacagccaatcgccagaaccgacctaaatcgcgtgagtccagagacaaacagaatgccacccgcatgaataggatgggtcaggagaaaaagtggttcactgatgaacctgacaatgcctaccctcgtaacattcagatcaagcctatgtcaacccatatggctaatcagatcaaccagtacaagtccacctcctctctcattccacccattcgggaagtagaagacgaatgttag

SEQ ID NO: 282932 - DNA, 3549 bp, Artificial Sequence
  derived and/or modified sequence
tgaagcagcagcagcagcagcagcagcagcagcgtgcacgagcccaagatggacgccctgatcatccccgtgaccatggaggtgccctgcgacagcagaggccagagaatgtggtgggccttcctggccagcagcatggtgaccttcttcggcggcctgttcatcatcctgctgtggagaaccctgaagtacctgtggaccgtgtgctgccactgcggcggcaagaccaaggaggcccagaagatcaacaacggcagcagccaggccgacggcaccctgaagcccgtggacgagaaggaggaggccgtggccgccgaggtgggctggatgaccagcgtgaaggactgggccggcgtgatgatcagcgcccagaccctgaccggcagagtgctggtggtgctggtgttcgccctgagcatcggcgccctggtgatctacttcatcgacagcagcaaccccatcgagagctgccagaacttctacaaggacttcaccctgcagatcgacatggccttcaacgtgttcttcctgctgtacttcggcctgagattcatcgccgccaacgacaagctgtggttctggctggaggtgaacagcgtggtggacttcttcaccgtgccccccgtgttcgtgagcgtgtacctgaacagaagctggctgggcctgagattcctgagagccctgagactgatccagttcagcgagatcctgcagttcctgaacatcctgaagaccagcaacagcatcaagctggtgaacctgctgagcatcttcatcagcacctggctgaccgccgccggcttcatccacctggtggagaacagcggcgacccctgggagaacttccagaacaaccaggccctgacctactgggagtgcgtgtacctgctgatggtgaccatgagcaccgtgggctacggcgacgtgtacgccaagaccaccctgggcagactgttcatggtgttcttcatcctgggcggcctggccatgttcgccagctacgtgcccgagatcatcgagctgatcggcaacagaaagaagtacggcggcagctacagcgccgtgagcggcagaaagcacatcgtggtgtgcggccacatcaccctggagagcgtgagcaacttcctgaaggacttcctgcacaaggacagagacgacgtgaacgtggagatcgtgttcctgcacaacatcagccccaacctggagctggaggccctgttcaagagacacttcacccaggtggagttctaccagggcagcgtgctgaacccccacgacctggccagagtgaagatcgagagcgccgacgcctgcctgatcctggccaacaagtactgcgccgaccccgacgccgaggacgccagcaacatcatgagagtgatcagcatcaagaactaccaccccaagatcagaatcatcacccagatgctgcagtaccacaacaaggcccacctgctgaacatccccagctggaactggaaggagggcgacgacgccatctgcctggccgagctgaagctgggcttcatcgcccagagctgcctggcccagggcctgagcaccatgctggccaacctgttcagcatgagaagcttcatcaagatcgaggaggacacctggcagaagtactacctggagggcgtgagcaacgagatgtacaccgagtacctgagcagcgccttcgtgggcctgagcttccccaccgtgtgcgagctgtgcttcgtgaagctgaagctgctgatgatcgccatcgagtacaagagcgccaacagagagagcagaatcctgatcaaccccggcaaccacctgaagatccaggagggcaccctgggcttcttcatcgccagcgacgccaaggaggtgaagagagccttcttctactgcaaggcctgccacgacgacatcaccgaccccaagagaatcaagaagtgcggctgcaagagactggaggacgagcagcccagcaccctgagccccaagaagaagcagagaaacggcggcatgagaaacagccccaacaccagccccaagctgatgagacacgaccccctgctgatccccggcaacgaccagatcgacaacatggacagcaacgtgaagaagtacgacagcaccggcatgttccactggtgcgcccccaaggagatcgagaaggtgatcctgaccagaagcgaggccgccatgaccgtgctgagcggccacgtggtggtgtgcatcttcggcgacgtgagcagcgccctgatcggcctgagaaacctggtgatgcccctgagagccagcaacttccactaccacgagctgaagcacatcgtgttcgtgggcagcatcgagtacctgaagagagagtgggagaccctgcacaacttccccaaggtgagcatcctgcccggcacccccctgagcagagccgacctgagagccgtgaacatcaacctgtgcgacatgtgcgtgatcctgagcgccaaccagaacaacatcgacgacaccagcctgcaggacaaggagtgcatcctggccagcctgaacatcaagagcatgcagttcgacgacagcatcggcgtgctgcaggccaacagccagggcttcaccccccccggcatggacagaagcagccccgacaacagccccgtgcacggcatgctgagacagcccagcatcaccaccggcgtgaacatccccatcatcaccgagctggtgaacgacaccaacgtgcagttcctggaccaggacgacgacgacgaccccgacaccgagctgtacctgacccagcccttcgcctgcggcaccgccttcgccgtgagcgtgctggacagcctgatgagcgccacctacttcaacgacaacatcctgaccctgatcagaaccctggtgaccggcggcgccacccccgagctggaggccctgatcgccgaggagaacgccctgagaggcggctacagcaccccccagaccctggccaacagagacagatgcagagtggcccagctggccctgctggacggccccttcgccgacctgggcgacggcggctgctacggcgacctgttctgcaaggccctgaagacctacaacatgctgtgcttcggcatctacagactgagagacgcccacctgagcacccccagccagtgcaccaagagatacgtgatcaccaaccccccctacgagttcgagctggtgcccaccgacctgatcttctgcctgatgcagttcgaccacaacgccggccagagcagagccagcctgagccacagcagccacagcagccagagcagcagcaagaagagcagcagcgtgcacagcatccccagcaccgccaacagacagaacagacccaagagcagagagagcagagacaagcagaacgccaccagaatgaacagaatgggccaggccgagaagaagtggttcaccgacgagcccgacaacgcctaccccagaaacatccagatcaagcccatgagcacccacatggccaaccagatcaaccagtacaagagcaccagcagcctgatcccccccatcagagaggtggaggacgagtgctag

SEQ ID NO: 282933 - DNA, 3504 bp, Artificial Sequence
  derived and/or modified sequence
cccaagatggacgccctgatcatccccgtgaccatggaggtgccctgcgacagcagaggccagagaatgtggtgggccttcctggccagcagcatggtgaccttcttcggcggcctgttcatcatcctgctgtggagaaccctgaagtacctgtggaccgtgtgctgccactgcggcggcaagaccaaggaggcccagaagatcaacaacggcagcagccaggccgacggcaccctgaagcccgtggacgagaaggaggaggccgtggccgccgaggtgggctggatgaccagcgtgaaggactgggccggcgtgatgatcagcgcccagaccctgaccggcagagtgctggtggtgctggtgttcgccctgagcatcggcgccctggtgatctacttcatcgacagcagcaaccccatcgagagctgccagaacttctacaaggacttcaccctgcagatcgacatggccttcaacgtgttcttcctgctgtacttcggcctgagattcatcgccgccaacgacaagctgtggttctggctggaggtgaacagcgtggtggacttcttcaccgtgccccccgtgttcgtgagcgtgtacctgaacagaagctggctgggcctgagattcctgagagccctgagactgatccagttcagcgagatcctgcagttcctgaacatcctgaagaccagcaacagcatcaagctggtgaacctgctgagcatcttcatcagcacctggctgaccgccgccggcttcatccacctggtggagaacagcggcgacccctgggagaacttccagaacaaccaggccctgacctactgggagtgcgtgtacctgctgatggtgaccatgagcaccgtgggctacggcgacgtgtacgccaagaccaccctgggcagactgttcatggtgttcttcatcctgggcggcctggccatgttcgccagctacgtgcccgagatcatcgagctgatcggcaacagaaagaagtacggcggcagctacagcgccgtgagcggcagaaagcacatcgtggtgtgcggccacatcaccctggagagcgtgagcaacttcctgaaggacttcctgcacaaggacagagacgacgtgaacgtggagatcgtgttcctgcacaacatcagccccaacctggagctggaggccctgttcaagagacacttcacccaggtggagttctaccagggcagcgtgctgaacccccacgacctggccagagtgaagatcgagagcgccgacgcctgcctgatcctggccaacaagtactgcgccgaccccgacgccgaggacgccagcaacatcatgagagtgatcagcatcaagaactaccaccccaagatcagaatcatcacccagatgctgcagtaccacaacaaggcccacctgctgaacatccccagctggaactggaaggagggcgacgacgccatctgcctggccgagctgaagctgggcttcatcgcccagagctgcctggcccagggcctgagcaccatgctggccaacctgttcagcatgagaagcttcatcaagatcgaggaggacacctggcagaagtactacctggagggcgtgagcaacgagatgtacaccgagtacctgagcagcgccttcgtgggcctgagcttccccaccgtgtgcgagctgtgcttcgtgaagctgaagctgctgatgatcgccatcgagtacaagagcgccaacagagagagcagaatcctgatcaaccccggcaaccacctgaagatccaggagggcaccctgggcttcttcatcgccagcgacgccaaggaggtgaagagagccttcttctactgcaaggcctgccacgacgacatcaccgaccccaagagaatcaagaagtgcggctgcaagagactggaggacgagcagcccagcaccctgagccccaagaagaagcagagaaacggcggcatgagaaacagccccaacaccagccccaagctgatgagacacgaccccctgctgatccccggcaacgaccagatcgacaacatggacagcaacgtgaagaagtacgacagcaccggcatgttccactggtgcgcccccaaggagatcgagaaggtgatcctgaccagaagcgaggccgccatgaccgtgctgagcggccacgtggtggtgtgcatcttcggcgacgtgagcagcgccctgatcggcctgagaaacctggtgatgcccctgagagccagcaacttccactaccacgagctgaagcacatcgtgttcgtgggcagcatcgagtacctgaagagagagtgggagaccctgcacaacttccccaaggtgagcatcctgcccggcacccccctgagcagagccgacctgagagccgtgaacatcaacctgtgcgacatgtgcgtgatcctgagcgccaaccagaacaacatcgacgacaccagcctgcaggacaaggagtgcatcctggccagcctgaacatcaagagcatgcagttcgacgacagcatcggcgtgctgcaggccaacagccagggcttcaccccccccggcatggacagaagcagccccgacaacagccccgtgcacggcatgctgagacagcccagcatcaccaccggcgtgaacatccccatcatcaccgagctggtgaacgacaccaacgtgcagttcctggaccaggacgacgacgacgaccccgacaccgagctgtacctgacccagcccttcgcctgcggcaccgccttcgccgtgagcgtgctggacagcctgatgagcgccacctacttcaacgacaacatcctgaccctgatcagaaccctggtgaccggcggcgccacccccgagctggaggccctgatcgccgaggagaacgccctgagaggcggctacagcaccccccagaccctggccaacagagacagatgcagagtggcccagctggccctgctggacggccccttcgccgacctgggcgacggcggctgctacggcgacctgttctgcaaggccctgaagacctacaacatgctgtgcttcggcatctacagactgagagacgcccacctgagcacccccagccagtgcaccaagagatacgtgatcaccaaccccccctacgagttcgagctggtgcccaccgacctgatcttctgcctgatgcagttcgaccacaacgccggccagagcagagccagcctgagccacagcagccacagcagccagagcagcagcaagaagagcagcagcgtgcacagcatccccagcaccgccaacagacagaacagacccaagagcagagagagcagagacaagcagaacgccaccagaatgaacagaatgggccaggagaagaagtggttcaccgacgagcccgacaacgcctaccccagaaacatccagatcaagcccatgagcacccacatggccaaccagatcaaccagtacaagagcaccagcagcctgatcccccccatcagagaggtggaggacgagtgctag

SEQ ID NO: 282934 - DNA, 3618 bp, Artificial Sequence
  derived and/or modified sequence
atggcaaacggtggggggggaggcggtggatcttctggtggtgggggcggtggggggggctcctccctccgcatgagctcaaacatccacgccaaccatttgtcgttagacgcctctagtagcagcagttcaagctcatctagtagtagctcttcatcatccagctcctcgtcatcttcggtccacgaaccaaaaatggacgcattaataattcctgtaaccatggaagtgccctgcgattcgaggggtcaaagaatgtggtgggcatttctcgcttccagtatggttacgttttttggcggactgttcatcatcctgctgtggcggacactgaagtacctctggacagtgtgctgtcattgtggcggaaaaaccaaagaagcccagaaaataaataacggctcaagccaagcagacggtaccttgaaacctgtggacgagaaagaagaggccgtggccgccgaggtaggatggatgacatctgtcaaggattgggccggagtgatgattagtgcgcagacattgacagggagggtcctcgtggtactagtgttcgccctctccatcggggccctcgtaatttatttcattgacagctccaacccaatcgaatcatgtcaaaatttttacaaagatttcacgctgcagatcgacatggcgtttaacgtgttttttctgctgtatttcggcctgcgattcatcgccgcaaatgacaagttatggttttggttggaggttaatagcgtcgttgacttcttcactgtccctccagtgtttgttagtgtatatctcaacaggagctggttgggactgagattcctgcgagctttgaggcttattcagttttccgagattctgcagttcctcaacattctgaagacgtccaactccattaaactggttaatctcctcagtatctttatcagcacctggcttaccgccgcagggtttatccacctggtggaaaactctggagatccttgggagaatttccagaataatcaggcacttacgtactgggagtgcgtatacctgctcatggtgactatgtcgaccgtgggctacggtgatgtatatgccaagaccacgctgggtcggctgttcatggttttttttatccttggcggcctggctatgttcgcctcttacgttccagaaattatagaacttatagggaaccgaaagaagtacggcggctcctactcagcagtgagcggtagaaagcacatcgtggtttgcgggcatattacactcgagtccgtgtcgaactttctgaaagactttcttcataaggatagggatgacgtcaatgtggagatcgtgttcttacacaatatctcccctaatctggaacttgaggcactctttaagcgtcatttcacccaggtcgaattctaccagggctcggtgctgaatcctcatgatttggcccgcgtgaaaattgagagcgccgatgcatgcctgatcctcgcaaataagtactgtgcggacccggatgcagaagatgcaagcaacatcatgagagttattagcatcaaaaactatcatccaaaaatcagaatcatcacgcaaatgttgcagtatcacaacaaagcacacttactgaacatccccagctggaattggaaggagggcgacgacgcaatttgcctcgccgaactgaagcttggttttattgcacaatcttgtctggcgcaggggctgagcacaatgctggcaaatctgttctcaatgaggtcattcattaaaatcgaggaggatacctggcagaagtactacctggagggggtttctaacgaaatgtataccgagtacttgagttcagcctttgtagggcttagctttcctacagtttgtgagctttgttttgtcaaactgaaactcctaatgattgccatcgagtataagtctgctaatcgcgagagccgtattctcatcaacccaggaaatcatcttaagatacaggagggcacactcggcttttttatagctagtgacgctaaggaagtgaagagggcattcttttattgcaaggcctgtcatgacgacattaccgatccgaaacggatcaagaagtgtgggtgtaagcgacttgaggacgaacagccttctacactctcacctaagaaaaaacaacggaatggcggaatgcgtaacagccctaatacgtcacccaaactaatgagacacgacccactcctaattcccggtaacgaccagatcgataacatggatagcaatgttaagaaatatgactcaaccgggatgtttcactggtgtgctcccaaggagattgaaaaagttatcttgacacggtccgaagccgcgatgactgtgttaagcggacatgtcgtggtttgcatctttggcgacgtgtctagtgctctaatcgggcttcgaaatctggtgatgcctctgcgggcctccaacttccactatcatgagttaaagcatatagtcttcgtgggatcaatcgagtacctgaagagagaatgggagacacttcacaacttccctaaggtctcaattctgcctgggacccctttgtcacgggcagatctgcgcgcagttaatattaatttgtgtgatatgtgtgtcatactgtccgctaaccagaataatatcgatgacacttcgctgcaggacaaagaatgtattctcgcctctcttaacattaagagcatgcagtttgatgacagtatcggagtactccaggcaaatagtcagggatttacccctcctggcatggaccgctccagtcccgataactcccctgtccacgggatgctgcgtcagcctagcattaccaccggcgtcaatattccaattatcacagagctggccaagcctggcaaactcccactcgtaagcgtcaaccaggagaagaattccgggacgcatatccttatgatcaccgagctggtgaacgacacgaacgtgcaattccttgaccaggacgatgacgacgatccagacacagagctgtacctgacgcagccatttgcgtgtggtacggcatttgccgtgtccgtcctagattcactaatgtctgccacctacttcaatgacaacattctgactttaatcaggactctggtcaccggtggggccacaccggaactggaagcactgatcgcagaagaaaatgcacttcggggaggatattcaaccccgcagactttagctaatagagaccgatgtagggttgcccagctggctctgttggacggccccttcgcagaccttggcgatggaggctgctacggagacctgttttgtaaggcgctgaagacttataacatgttgtgcttcggcatctatcggctacgcgatgctcatctgagcaccccatcccaatgtacaaagcgatacgttatcacaaatccgccctatgaattcgaactggtgcccacggacctgatcttctgccttatgcaatttgatcacaatgccggacagagtcgagcgagcctatcccactcgtctcacagtagccagtcaagtagcaaaaagagctcgagcgttcatagcattcctagcaccgctaacagacagaatcgtccaaagtcccgcgaatctcgggacaagcagaaccggaaagagatggtgtaccgatag

SEQ ID NO: 282935 - DNA, 3618 bp, Artificial Sequence
  derived and/or modified sequence
atggccaatggaggcggcggcggcggcggcagcagcggcggcggcggcggcggcggcggcagcagcctgaggatgagcagcaacatccacgccaaccacctgagcctggatgccagcagcagcagcagcagcagcagcagcagcagcagcagcagcagcagcagcagcagcagcagctctgtgcatgagcccaagatggatgccctgatcatccctgtgaccatggaggtgccctgtgacagccggggccagaggatgtggtgggccttcctggccagctccatggtgaccttctttggaggcctcttcatcatcctgctgtggaggaccctgaagtacctgtggacagtgtgctgccactgcggcggcaagaccaaggaggcccagaagatcaacaacggcagcagccaggctgatggcaccctgaagcctgtggatgagaaggaggaggccgtggccgctgaggtgggctggatgacctctgtgaaggactgggccggcgtgatgatcagcgcccagaccctgaccggccgggtgctggtggtgctggtgtttgccctgagcattggagccctggtgatctacttcatcgacagcagcaaccccatcgagagctgccagaacttctacaaggacttcaccctgcagattgacatggccttcaacgtgttcttcctgctgtacttcggcctgcgcttcatcgccgccaatgacaagctgtggttctggctggaggtgaacagcgtggtggacttcttcaccgtgccccctgtgtttgtgtctgtgtacctgaacagatcctggctgggcctgcgcttcctgcgggccctgcggctcatccagttcagcgagatcctgcagttcctgaacatcctgaagaccagcaacagcatcaagctggtgaacctgctgagcatcttcatcagcacctggctgacagctgctggcttcatccacctggtggagaacagcggggacccctgggagaacttccagaacaaccaggccctgacctactgggagtgtgtgtacctgctgatggtgaccatgagcacagtgggctatggagatgtgtatgccaagaccaccctgggccgcctcttcatggtgttcttcatcctgggcggcctggccatgtttgccagctatgtgcctgagatcatcgagctgattggcaacaggaagaagtatggaggcagctacagcgctgtgtctggcaggaagcacatcgtggtgtgtggccacatcaccctggagagcgtgagcaacttcctgaaggacttcctgcacaaggacagagatgatgtgaatgtggagatcgtgttcctgcacaacatcagccccaacctggagctggaggccctcttcaagaggcacttcacccaggtggagttctaccagggctctgtgctgaacccccatgacctggcccgggtgaagattgaatctgcagatgcctgcctgatcctggccaacaagtactgtgccgaccctgatgctgaagatgccagcaacatcatgagggtcatcagcatcaagaactaccaccccaagatccgcatcatcacccagatgctgcagtaccacaacaaggcccacctgctgaacatccccagctggaactggaaggagggagatgatgccatctgcctggccgagctgaagctgggcttcatcgcccagagctgcctggcccagggcctgagcaccatgctggccaacctcttctccatgaggagcttcatcaagattgaggaggacacctggcagaagtactacctggagggcgtgtccaatgagatgtacacagagtacctgagcagcgcctttgtgggcctgtccttccccaccgtgtgtgagctgtgctttgtgaagctgaagctgctgatgattgccatcgagtacaagagcgccaaccgggagagccgcatcctgatcaaccctggcaaccacctgaagatccaggagggcaccctgggcttcttcatcgccagtgatgccaaggaggtgaagagggccttcttctactgcaaggcctgccatgatgacatcacagaccccaagaggatcaagaagtgtggctgcaagaggctggaggatgagcagcccagcaccctgagccccaagaagaagcagagaaatggaggcatgaggaacagccccaacaccagccccaagctgatgagacatgaccccctgctgatccctggaaatgaccagattgacaacatggacagcaatgtgaagaagtatgacagcacaggcatgttccactggtgtgcccccaaggagattgagaaggtgatcctgaccaggtctgaggccgccatgacagtgctgagcggccacgtggtggtgtgcatctttggagatgtgagcagcgccctgattggcctgaggaacctggtgatgcccctgcgggccagcaacttccactaccacgagctgaagcacatcgtgtttgtgggcagcattgagtacctgaagcgggagtgggagaccctgcacaacttccccaaggtgtccatcctgcccggcacccccctgagcagagctgacctgcgggctgtgaacatcaacctgtgtgacatgtgtgtgatcctgagcgccaaccagaacaacattgatgacaccagcctgcaggacaaggagtgcatcctggccagcctgaacatcaagtccatgcagtttgatgacagcattggagtgctgcaggccaacagccagggcttcaccccacctggcatggacaggagcagcccagacaacagccctgtgcacggcatgctgcggcagcccagcatcaccactggagtgaacatccccatcatcacagagctggccaagccaggcaagctgcccctggtgtctgtgaaccaggagaagaacagcggcacccacatcctgatgatcacagagctggtgaatgacaccaacgtgcagttcctggaccaggatgatgatgatgatcctgacacagagctgtacctgacccagccctttgcctgtggcacagcctttgctgtgtctgtgctggacagcctgatgtctgccacctacttcaatgacaacatcctgaccctcatccgcaccctggtgactggaggagccaccccagagctggaggccctgattgctgaggagaatgccctgcggggcggctacagcaccccccagaccctggccaacagagaccgctgccgggtggcccagctggccctgctggatggcccctttgctgacctgggagatggcggctgctacggggacctcttctgcaaggccctgaagacctacaacatgctgtgcttcggcatctaccgcctgagagatgcccacctgagcacccccagccagtgcaccaagcgctacgtgatcaccaaccccccctatgaatttgagctggtgcccacagacctgatcttctgcctgatgcagtttgaccacaatgccggccagagccgggccagcctgagccacagcagccacagcagccagagcagcagcaagaagagcagctctgtgcacagcatccccagcacagccaaccggcagaaccggcccaagagccgggagagccgggacaagcagaacaggaaggagatggtgtacagatag

SEQ ID NO: 282936 - DNA, 3618 bp, Artificial Sequence
  derived and/or modified sequence
atggccaacggcggcggcggcggcggcggcagcagcggcggcggcggaggggggggcggttcgtcactgcggatgagcagcaatattcacgccaaccaccttagtttggatgcttcctcttcaagctctagctcttcctcaagctccagcagttctagtagttccagcagctcatcaagcgttcatgagccaaagatggatgccctcatcatacctgtcacaatggaagtcccctgtgactcacgtggtcagagaatgtggtgggcctttcttgctagtagcatggtgacattctttggcggcctgtttattattcttctatggcggactctgaaatatctttggaccgtgtgctgccactgcggaggtaaaacaaaagaggcgcagaaaatcaataacggcagcagtcaggccgatggcacattgaagcccgtagacgagaaagaggaagccgttgcagctgaagtgggatggatgactagcgtgaaggattgggccggtgtcatgatctccgcgcagaccttaacagggcgagtcttagtagttctggttttcgccctaagcattggtgcactggttatatattttattgacagtagcaatccgatagagtcctgccagaatttttataaggatttcacacttcagatcgatatggcttttaatgtgttctttctactgtatttcggactgcgtttcatcgcagctaatgacaagctttggttctggctggaggtgaactctgtggtcgatttcttcacagtgccccctgtgtttgtttcggtctacttgaacaggtcttggttaggccttagatttctgcgagctctacggcttatacagttctctgagatcctgcaatttctgaacatcctgaaaacctcgaacagcatcaagctggtgaatctactatctatcttcatcagcacttggctgactgccgctggttttatccacctcgtcgagaatagtggggacccttgggaaaattttcaaaacaaccaggcccttacctactgggagtgcgtatatctactgatggtgactatgtcaactgtcgggtacggtgacgtatacgccaagacaaccttgggaaggctttttatggtcttctttatccttgggggtctggccatgtttgcctcttacgtgccagagatcatcgagctcattggcaaccggaagaagtacggagggtcctattccgccgtatcaggaaggaaacacatagtggtctgtggtcacatcaccctggagtccgtctccaactttttaaaagattttctgcataaggatagagacgatgtaaatgtcgagatcgtctttctgcataacatatctccaaacctggagttagaggcgctgttcaaaaggcatttcacccaagtggaattctatcaaggctccgtgctgaaccctcatgatctcgccagggtgaagattgaaagtgcagacgcctgcttaatcctggccaacaagtactgcgcagacccagacgcagaagatgcatcaaacataatgcgagtgatcagcatcaagaactaccatcccaagattaggattatcactcagatgctgcagtaccacaataaagcacacctcctcaatattccttcatggaactggaaagaaggtgatgatgccatctgcctcgcggagctcaaactcgggtttattgcccagtcatgcctggctcaggggctgagtactatgctggccaacctcttcagtatgaggagcttcatcaagatcgaagaggatacttggcagaagtattatctggagggggtgtcaaacgagatgtacaccgagtatctgagttccgcatttgtgggactgtccttcccaactgtatgcgaactgtgttttgtcaagctcaaactcctcatgattgcaatagaatacaagagtgctaatagggagtcccgcatcttgattaatcccgggaaccatttaaagatccaggaaggtacattaggtttcttcatcgctagtgatgcgaaagaggtgaagcgagccttcttctattgtaaggcctgtcatgacgatattactgatcccaagcgtattaagaagtgtgggtgtaaacgcctggaggacgaacagcctagtacactgtcccccaagaaaaagcagaggaacggggggatgcgaaacagtccaaacacaagccccaagctgatgcgacatgatcctctgttgatccctgggaatgatcaaatagacaacatggactccaacgtaaaaaaatacgattcaaccggcatgtttcattggtgtgcaccaaaagaaatcgaaaaagtcattctgacaagatctgaagccgccatgaccgtgctatccggccatgtcgtggtgtgcatttttggcgacgtcagttccgccttgatcggtctccggaatctggtgatgcctctacgtgcatccaactttcactaccatgagctcaagcatattgtctttgttgggtccattgaatatctgaaacgcgaatgggagactctacataattttcccaaggtcagtattctgcctgggactcctcttagtcgcgccgatcttcgcgcagtcaacattaacctttgtgacatgtgtgttattctgtctgcaaaccaaaacaacattgatgacacatccctgcaggacaaagagtgcatcttagctagtcttaacattaagagcatgcagtttgacgacagtattggcgttctacaggccaactcgcagggctttaccccacccggcatggatagatcctcccccgacaactcgcccgtccacggcatgctgcggcagcccagcattaccacaggtgtgaacatccccatcattactgagttagcaaaacccgggaagctgcctctcgtctctgtcaaccaggaaaaaaattctggaacccacattttaatgattacagaactggtaaacgataccaatgtccagttcttggatcaggatgatgatgacgatcccgacaccgagctgtatttgacgcagccattcgcttgcgggacagcttttgctgtgagtgtgcttgactctctcatgtcagccacatatttcaatgacaacattcttactcttataagaaccttggtgaccggtggcgctacaccagagctggaggccctcatcgcggaggaaaacgcgctgcgggggggctactcaaccccccaaaccctagctaatcgagacagatgccgagttgcccaactagccctgctcgacgggccttttgcagatttgggagacggcggatgttatggcgatcttttctgtaaggcactgaaaacatataacatgttgtgtttcgggatctatcgcctccgcgacgcccacctcagcacaccctcacagtgtaccaaacggtacgtgattaccaatcctccctacgagtttgagcttgtacccactgatctgatcttctgcctcatgcagttcgatcataatgcaggccagtcccgggctagcctctctcattcttcacattcatcccaatcgtcctcaaagaagagtagttccgtccactccatcccaagcacagccaacagacagaatagaccaaagtccagagagagtagagacaagcaaaacaggaaagagatggtgtacaggtag

SEQ ID NO: 282937 - DNA, 4617 bp, Artificial Sequence
  derived and/or modified sequence
gcgagcggaggccgaggggctcagcggcgtggcgacaggactagggggtcccgagaacatgggctagcaggcggccacgggccggcggccggacgcggtgaacctgccgcggccgggcgcgcactggcgcggcgagccggagccgagcgcagccgggggaggagggctggcgcaggggcgcccgggcggagggggccgattatccattattaacgagttaccacctaataagcggagagcggctcgttagccgcgcgggaggcgctcggggaagggggtcaccggccgagcgcagcgcacacccgtggcgcacggcgggcggcgcggcgccgaggacacccgggaccgcgcgcggagccggggcgggcccgggggcggcgcagaccccgggcgcgggcggcccgcggcgccccctggctctcggcgctcggggccagcgcagcccggggcgagcggggcgcgggccggggagggggagctgcccgcgcactccatccccctcccccccgggcgggcggcggcggctcgctgtatatatctcggcgcaccccgccaggtcgcgcacagcgccccgagcccaggcgcctccccgcccccctcccgcgctccgcggcggcggcggcggcggcagcagtagcagcaatatggctgttgatgggtgtttggggtggcgctggcggcgggaggagctcccccgagcccctgcgccggctgcccgttgctagctatggcaaatggtggcggcggcggcggcggcagcagcggcggcggcggcggcggcggaggcagcagtcttagaatgagtagcaatatccacgcgaaccatctcagcctagacgcgtcctcctcctcctcctcctcctcttcctcttcttcttcttcctcctcctcttcctcctcgtcctcggtccacgagcccaagatggatgcgctcatcatcccggtgaccatggaggtgccgtgcgacagccggggccaacgcatgtggtgggctttcctggcctcctccatggtgactttcttcgggggcctcttcatcatcttgctctggcggacgctcaagtacctgtggaccgtgtgctgccactgcgggggcaagacgaaggaggcccagaagattaacaatggctcaagccaggcggatggcactctcaaaccagtggatgaaaaagaggaggcagtggccgccgaggtcggctggatgacctccgtgaaggactgggcgggggtgatgatatccgcccagacactgactggcagagtcctggttgtcttagtctttgctctcagcatcggtgcacttgtaatatacttcatagattcatcaaacccaatagaatcctgccagaatttctacaaagatttcacattacagatcgacatggctttcaacgtgttcttccttctctacttcggcttgcggtttattgcagccaacgataaattgtggttctggctggaagtgaactctgtagtggatttcttcacggtgccccccgtgtttgtgtctgtgtacttaaacagaagttggcttggtttgagatttttaagagctctgagactgatacagttttcagaaattttgcagtttctgaatattcttaaaacaagtaattccatcaagctggtgaatctgctctccatatttatcagcacgtggctgactgcagccgggttcatccatttggtggagaattcaggggacccatgggaaaatttccaaaacaaccaggctctcacctactgggaatgtgtctatttactcatggtcacaatgtccaccgttggttatggggatgtttatgcaaaaaccacacttgggcgcctcttcatggtcttcttcatcctcgggggactggccatgtttgccagctacgtccctgaaatcatagagttaataggaaaccgcaagaaatacgggggctcctatagtgcggttagtggaagaaagcacattgtggtctgcggacacatcactctggagagtgtttccaacttcctgaaggactttctgcacaaggaccgggatgacgtcaatgtggagatcgtttttcttcacaacatctcccccaacctggagcttgaagctctgttcaaacgacattttactcaggtggaattttatcagggttccgtcctcaatccacatgatcttgcaagagtcaagatagagtcagcagatgcatgcctgatccttgccaacaagtactgcgctgacccggatgcggaggatgcctcgaatatcatgagagtaatctccataaagaactaccatccgaagataagaatcatcactcaaatgctgcagtatcacaacaaggcccatctgctaaacatcccgagctggaattggaaagaaggtgatgacgcaatctgcctcgcagagttgaagttgggcttcatagcccagagctgcctggctcaaggcctctccaccatgcttgccaacctcttctccatgaggtcattcataaagattgaggaagacacatggcagaaatactacttggaaggagtctcaaatgaaatgtacacagaatatctctccagtgccttcgtgggtctgtccttccctactgtttgtgagctgtgttttgtgaagctcaagctcctaatgatagccattgagtacaagtctgccaaccgagagagccgtatattaattaatcctggaaaccatcttaagatccaagaaggtactttaggatttttcatcgcaagtgatgccaaagaagttaaaagggcatttttttactgcaaggcctgtcatgatgacatcacagatcccaaaagaataaaaaaatgtggctgcaaacggcttgaagatgagcagccgtcaacactatcaccaaaaaaaaagcaacggaatggaggcatgcggaactcacccaacacctcgcctaagctgatgaggcatgaccccttgttaattcctggcaatgatcagattgacaacatggactccaatgtgaagaagtacgactctactgggatgtttcactggtgtgcacccaaggagatagagaaagtcatcctgactcgaagtgaagctgccatgaccgtcctgagtggccatgtcgtggtctgcatctttggcgacgtcagctcagccctgatcggcctccggaacctggtgatgccgctccgtgccagcaactttcattaccatgagctcaagcacattgtgtttgtgggctctattgagtacctcaagcgggaatgggagacgcttcataacttccccaaagtgtccatattgcctggtacgccattaagtcgggctgatttaagggctgtcaacatcaacctctgtgacatgtgcgttatcctgtcagccaatcagaataatattgatgatacttcgctgcaggacaaggaatgcatcttggcgtcactcaacatcaaatctatgcagtttgatgacagcatcggagtcttgcaggctaattcccaagggttcacacctccaggaatggatagatcctctccagataacagcccagtgcacgggatgttacgtcaaccatccatcacaactggggtcaacatccccatcatcactgaactagctaaaccgggcaagttgcctttggtatcagtcaatcaggaaaaaaacagtgggacgcacattctaatgataactgaactggtgaacgatactaatgttcagtttttggaccaagacgatgatgatgaccctgatacagaactgtacctcacgcagccctttgcctgtgggacagcatttgccgtcagtgtcctggactcactcatgagcgcgacgtacttcaatgacaatatcctcaccctgatacggaccctggtgaccggaggagccacgccggagctggaggctctgattgctgaggaaaacgcccttagaggtggctacagcaccccgcagacactggccaatagggaccgctgccgcgtggcccagttagctctgctcgatgggccatttgcggacttaggggatggtggttgttatggtgatctgttctgcaaagctctgaaaacatataatatgctttgttttggaatttaccggctgagagatgctcacctcagcacccccagtcagtgcacaaagaggtatgtcatcaccaacccgccctatgagtttgagctcgtgccgacggacctgatcttctgcttaatgcagtttgaccacaatgccggccagtcccgggccagcctgtcccattcctcccactcgtcgcagtcctccagcaagaagagctcctctgttcactccatcccatccacagcaaaccgacagaaccggcccaagtccagggagtcccgggacaaacagaacagaaaagaaatggtttacagatgaaccggataatgcctatcccagaaacattcaaatcaagcccatgagtacccacatggctaaccagatcaaccaatataaatccacaagcagcttgattccaccaatcagagaagttgaagatgaatgttgactcccaggagaccagaactatttttttaaagcctgacaaacttcataaatggtgatgtgacttttcttcttacatgctgaatcactggtggaaacgttaggataagcaagaattgccagaaaataaagtagacagatctttc

SEQ ID NO: 282938 - DNA, 3618 bp, Artificial Sequence
  derived and/or modified sequence
atggctaacggcggtggtggcggtggaggatccagtgggggaggaggaggtggaggcggaagttcactgagaatgtcatccaatattcacgcaaaccatctgtctttagatgcctcatcatcaagctcctcctcctcaagctctagcagtagttcaagctccagctcatcatcttcttccgtccacgaacctaaaatggatgccctgattattcccgtgactatggaagtaccatgcgatagccgaggacagcgaatgtggtgggctttcctcgccagctcaatggttactttttttggtggactgtttatcatcttgctgtggcgcactctcaagtatctatggaccgtctgctgccactgcggcggaaagacaaaggaggcccaaaaaatcaacaatggctcaagccaggctgatggcaccctgaaacccgtggacgaaaaggaggaagctgtggcagccgaagtgggctggatgacttctgtgaaagactgggccggagtgatgatctcggcacagacgttaacaggtcgcgtcctcgtggtgctggtgtttgcactctccattggagcgctcgttatttatttcatcgactcaagcaatcccatcgaatcgtgccagaacttttacaaagattttactttgcagatcgatatggccttcaatgtcttctttttgctctatttcggccttcgattcattgccgctaacgataaactctggttttggctggaagtgaactcagttgttgacttcttcactgttcctcccgtcttcgtgtcggtctatttgaataggtcatggctgggcctgagattcctgagggctctgagactgattcagttttcagaaatactccagttcctgaacatcctgaaaactagtaacagtattaagctcgtcaatctgttgtccatcttcatctcaacctggctgaccgctgcgggttttatccatctggtggagaatagtggcgacccgtgggaaaattttcagaacaaccaagctcttacctactgggagtgtgtgtatttgttgatggtgactatgtcgactgtcggctacggtgatgtatacgcaaaaaccaccctggggcgtctgtttatggtctttttcatcctgggcggactcgccatgttcgcctcctacgtgcctgaaatcatagagttgatcggcaaccgtaagaaatacggtggctcatactccgccgtcagcgggcgtaaacacatagtggtgtgcggccatatcactctggaaagcgtaagtaatttcctcaaggattttctgcacaaggacagagacgacgtgaatgttgagatagtctttcttcacaacatctctccaaacctggaactcgaggcccttttcaagcggcactttacgcaagtggaattctaccagggttccgtgttaaacccacacgatcttgcccgagttaagatcgagagcgccgacgcttgcctgatcttagccaacaaatattgtgcggacccagacgcagaggacgcctccaacatcatgcgtgtgatctccattaaaaattaccatccaaagatccgaattataacacagatgctgcaatatcataacaaggctcatctgttgaacatcccttcttggaactggaaggaaggtgacgatgccatctgcctggctgagctaaaactcggcttcatcgcgcagtcttgcttagcccagggtttgagtactatgcttgccaatctcttttctatgaggtcattcataaagatcgaggaggacacatggcagaagtactaccttgaaggcgtgagcaatgagatgtatacagagtatctatcatctgcgttcgtgggactctcgtttcccacagtgtgcgagctctgtttcgtcaaattaaagctccttatgattgccatcgaatacaaaagcgccaaccgcgaatcccggatcttaattaatccaggcaatcatcttaagattcaggagggaacattgggtttctttatcgctagcgatgctaaagaggtcaagcgagctttcttctattgcaaggcctgtcacgatgatataacagaccccaaacggatcaagaagtgcggatgtaaaaggctggaggatgagcagccatccacactgtctccaaagaaaaagcagcgtaacggaggaatgcggaatagccccaatacttcccccaagctgatgcggcatgatcctctgctaatacctggcaatgatcagatcgataacatggactccaacgtgaaaaaatatgatagtactggcatgtttcattggtgcgcaccaaaagagatcgagaaggtcatccttactcggtccgaggccgcaatgaccgtactgtccgggcacgtagtggtgtgtatcttcggagacgtgagctcagcacttatcggactgagaaacctggtgatgcctctccgtgcgtctaacttccattaccacgaactcaaacatattgtcttcgtcggctcaattgaatatctgaagagggagtgggaaacacttcataactttccaaaagtgagtattttgccaggcaccccactctctcgggctgacttaagagctgtaaatataaatctgtgtgatatgtgtgtaatattatcggctaatcagaacaacatagacgatacatctctgcaagataaggagtgtatcctggcttccttgaacatcaaatctatgcagttcgatgattcaatcggcgtgctacaagctaattcccaaggcttcaccccaccgggtatggataggagtagtcctgacaattcgccagttcacggtatgctgcgccagcctagcatcacaactggagtgaacattccaattataaccgaactggctaaacctggaaaactgcccttagttagcgtgaatcaggagaagaatagcggaactcacattttgatgatcaccgagctcgtaaacgatacaaacgttcagtttttagaccaggacgatgacgatgaccctgacactgagttgtacctgacccagccgttcgcttgcggcactgcttttgccgttagcgtgctggactccttgatgagcgcaacctatttcaatgacaacattctgacactcattaggacgctggtgacagggggagcaaccccagagctggaagccctgatcgccgaggaaaacgccttaagaggaggctactctacaccgcaaaccttagctaaccgcgatcgttgtcgcgtggcccagctggccctcctggacgggccttttgccgacctgggggacggcggttgctacggagacctgttttgcaaggccttaaagacttataacatgctgtgcttcgggatctaccgtctcagagacgcacatctctccacgccgtcccagtgtactaagaggtacgtgatcaccaaccccccttacgagttcgagctcgtgccaacggacctgattttttgcctgatgcagttcgaccacaatgccggacagagtcgggctagtctgagtcactcttctcattcttcacagtcctcttccaagaagagctctagtgtccacagcatcccaagtactgctaatcgacaaaataggccgaaaagtcgagagagtcgggacaagcagaaccgaaaagagatggtgtataggtag

SEQ ID NO: 282939 - DNA, 3618 bp, Artificial Sequence
  derived and/or modified sequence
atggccaacggcggcggcggcggcggcggcagcagcggcggcggcggcggcggcggcggcagcagcctgagaatgagcagcaacatccacgccaaccacctgagcctggacgccagcagcagcagcagcagcagcagcagcagcagcagcagcagcagcagcagcagcagcagcagcagcgtgcacgagcccaagatggacgccctgatcatccccgtgaccatggaggtgccctgcgacagcagaggccagagaatgtggtgggccttcctggccagcagcatggtgaccttcttcggcggcctgttcatcatcctgctgtggagaaccctgaagtacctgtggaccgtgtgctgccactgcggcggcaagaccaaggaggcccagaagatcaacaacggcagcagccaggccgacggcaccctgaagcccgtggacgagaaggaggaggccgtggccgccgaggtgggctggatgaccagcgtgaaggactgggccggcgtgatgatcagcgcccagaccctgaccggcagagtgctggtggtgctggtgttcgccctgagcatcggcgccctggtgatctacttcatcgacagcagcaaccccatcgagagctgccagaacttctacaaggacttcaccctgcagatcgacatggccttcaacgtgttcttcctgctgtacttcggcctgagattcatcgccgccaacgacaagctgtggttctggctggaggtgaacagcgtggtggacttcttcaccgtgccccccgtgttcgtgagcgtgtacctgaacagaagctggctgggcctgagattcctgagagccctgagactgatccagttcagcgagatcctgcagttcctgaacatcctgaagaccagcaacagcatcaagctggtgaacctgctgagcatcttcatcagcacctggctgaccgccgccggcttcatccacctggtggagaacagcggcgacccctgggagaacttccagaacaaccaggccctgacctactgggagtgcgtgtacctgctgatggtgaccatgagcaccgtgggctacggcgacgtgtacgccaagaccaccctgggcagactgttcatggtgttcttcatcctgggcggcctggccatgttcgccagctacgtgcccgagatcatcgagctgatcggcaacagaaagaagtacggcggcagctacagcgccgtgagcggcagaaagcacatcgtggtgtgcggccacatcaccctggagagcgtgagcaacttcctgaaggacttcctgcacaaggacagagacgacgtgaacgtggagatcgtgttcctgcacaacatcagccccaacctggagctggaggccctgttcaagagacacttcacccaggtggagttctaccagggcagcgtgctgaacccccacgacctggccagagtgaagatcgagagcgccgacgcctgcctgatcctggccaacaagtactgcgccgaccccgacgccgaggacgccagcaacatcatgagagtgatcagcatcaagaactaccaccccaagatcagaatcatcacccagatgctgcagtaccacaacaaggcccacctgctgaacatccccagctggaactggaaggagggcgacgacgccatctgcctggccgagctgaagctgggcttcatcgcccagagctgcctggcccagggcctgagcaccatgctggccaacctgttcagcatgagaagcttcatcaagatcgaggaggacacctggcagaagtactacctggagggcgtgagcaacgagatgtacaccgagtacctgagcagcgccttcgtgggcctgagcttccccaccgtgtgcgagctgtgcttcgtgaagctgaagctgctgatgatcgccatcgagtacaagagcgccaacagagagagcagaatcctgatcaaccccggcaaccacctgaagatccaggagggcaccctgggcttcttcatcgccagcgacgccaaggaggtgaagagagccttcttctactgcaaggcctgccacgacgacatcaccgaccccaagagaatcaagaagtgcggctgcaagagactggaggacgagcagcccagcaccctgagccccaagaagaagcagagaaacggcggcatgagaaacagccccaacaccagccccaagctgatgagacacgaccccctgctgatccccggcaacgaccagatcgacaacatggacagcaacgtgaagaagtacgacagcaccggcatgttccactggtgcgcccccaaggagatcgagaaggtgatcctgaccagaagcgaggccgccatgaccgtgctgagcggccacgtggtggtgtgcatcttcggcgacgtgagcagcgccctgatcggcctgagaaacctggtgatgcccctgagagccagcaacttccactaccacgagctgaagcacatcgtgttcgtgggcagcatcgagtacctgaagagagagtgggagaccctgcacaacttccccaaggtgagcatcctgcccggcacccccctgagcagagccgacctgagagccgtgaacatcaacctgtgcgacatgtgcgtgatcctgagcgccaaccagaacaacatcgacgacaccagcctgcaggacaaggagtgcatcctggccagcctgaacatcaagagcatgcagttcgacgacagcatcggcgtgctgcaggccaacagccagggcttcaccccccccggcatggacagaagcagccccgacaacagccccgtgcacggcatgctgagacagcccagcatcaccaccggcgtgaacatccccatcatcaccgagctggccaagcccggcaagctgcccctggtgagcgtgaaccaggagaagaacagcggcacccacatcctgatgatcaccgagctggtgaacgacaccaacgtgcagttcctggaccaggacgacgacgacgaccccgacaccgagctgtacctgacccagcccttcgcctgcggcaccgccttcgccgtgagcgtgctggacagcctgatgagcgccacctacttcaacgacaacatcctgaccctgatcagaaccctggtgaccggcggcgccacccccgagctggaggccctgatcgccgaggagaacgccctgagaggcggctacagcaccccccagaccctggccaacagagacagatgcagagtggcccagctggccctgctggacggccccttcgccgacctgggcgacggcggctgctacggcgacctgttctgcaaggccctgaagacctacaacatgctgtgcttcggcatctacagactgagagacgcccacctgagcacccccagccagtgcaccaagagatacgtgatcaccaaccccccctacgagttcgagctggtgcccaccgacctgatcttctgcctgatgcagttcgaccacaacgccggccagagcagagccagcctgagccacagcagccacagcagccagagcagcagcaagaagagcagcagcgtgcacagcatccccagcaccgccaacagacagaacagacccaagagcagagagagcagagacaagcagaacagaaaggagatggtgtacagatag

SEQ ID NO: 282940 - protein, 1167 aa, Artificial Sequence
  derived and/or modified sequence
  misc_feature (1)..(1): Xaa can be any naturally occurring amino acid
XGGGGGGGGSSLRMSSNIHANHLSLDASSSSSSSSSSSSSSSSSSSSSSVHEPKMDALIIPVTMEVPCDSRGQRMWWAFLASSMVTFFGGLFIILLWRTLKYLWTVCCHCGGKTKEAQKINNGSSQADGTLKPVDEKEEAVAAEVGWMTSVKDWAGVMISAQTLTGRVLVVLVFALSIGALVIYFIDSSNPIESCQNFYKDFTLQIDMAFNVFFLLYFGLRFIAANDKLWFWLEVNSVVDFFTVPPVFVSVYLNRSWLGLRFLRALRLIQFSEILQFLNILKTSNSIKLVNLLSIFISTWLTAAGFIHLVENSGDPWENFQNNQALTYWECVYLLMVTMSTVGYGDVYAKTTLGRLFMVFFILGGLAMFASYVPEIIELIGNRKKYGGSYSAVSGRKHIVVCGHITLESVSNFLKDFLHKDRDDVNVEIVFLHNISPNLELEALFKRHFTQVEFYQGSVLNPHDLARVKIESADACLILANKYCADPDAEDASNIMRVISIKNYHPKIRIITQMLQYHNKAHLLNIPSWNWKEGDDAICLAELKLGFIAQSCLAQGLSTMLANLFSMRSFIKIEEDTWQKYYLEGVSNEMYTEYLSSAFVGLSFPTVCELCFVKLKLLMIAIEYKSANRESRILINPGNHLKIQEGTLGFFIASDAKEVKRAFFYCKACHDDITDPKRIKKCGCKRLEDEQPSTLSPKKKQRNGGMRNSPNTSPKLMRHDPLLIPGNDQIDNMDSNVKKYDSTGMFHWCAPKEIEKVILTRSEAAMTVLSGHVVVCIFGDVSSALIGLRNLVMPLRASNFHYHELKHIVFVGSIEYLKREWETLHNFPKVSILPGTPLSRADLRAVNINLCDMCVILSANQNNIDDTSLQDKECILASLNIKSMQFDDSIGVLQANSQGFTPPGMDRSSPDNSPVHGMLRQPSITTGVNIPIITELVNDTNVQFLDQDDDDDPDTELYLTQPFACGTAFAVSVLDSLMSATYFNDNILTLIRTLVTGGATPELEALIAEENALRGGYSTPQTLANRDRCRVAQLALLDGPFADLGDGGCYGDLFCKALKTYNMLCFGIYRLRDAHLSTPSQCTKRYVITNPPYEFELVPTDLIFCLMQFDHNAGQSRASLSHSSHSSQSSSKKSSSVHSIPSTANRQNRPKSRESRDKQNRKEMVYR

SEQ ID NO: 282941 - DNA, 3504 bp, Artificial Sequence
  derived and/or modified sequence
tagggtggcggaggcggcggcgggggaagctctctgcgcatgtcttcaaatattcacgctaatcacctctccctggacgccagtagctcttcctctagctcctcaagttcttcatcctcatcctcttccagctcttcgtcctcatctgtgcacgaacccaaaatggacgctctgatcattccagtaaccatggaagtgccctgcgacagcagggggcagagaatgtggtgggcgtttctggcctcgagtatggtaacatttttcggagggctcttcataatcttactttggagaactttgaaatatctgtggaccgtatgttgtcattgtggcggcaagaccaaggaagcacagaagattaacaatggcagctcccaggcagacggcaccttaaagccagtggacgagaaagaagaggccgtggcagcagaggtggggtggatgacctctgtgaaagactgggccggtgttatgatttctgcacagactttgacagggagagttctggtggtcctggtgtttgctctgtcgatcggcgcattggtcatatacttcatagactcctcaaatcccatcgagtcttgtcagaacttttacaaagacttcactttgcagatagacatggcattcaacgtgttttttttactctactttggccttaggtttatcgctgcaaatgataaactatggttctggttagaggtgaactccgtagtagattttttcaccgtgcccccggtgtttgtgagtgtgtacttgaaccgatcatggttggggctgaggttcttgcgagccctccggctcatccagttctccgagattctgcagttcctcaacatcttgaaaacctccaactctatcaagcttgttaacctcttgtcaatcttcataagtacctggctgactgccgcaggtttcatccacctcgtggagaacagcggagacccatgggaaaactttcaaaataatcaggctcttacatattgggagtgtgtttatctgctcatggtaaccatgtctaccgtgggctacggagacgtctacgcgaagacaacgctgggcaggctgttcatggtgttcttcatactcggcggacttgcaatgttcgcgagttacgtgccagaaatcatcgagctgattgggaaccggaaaaagtatgggggctcttacagcgctgtgagtggaagaaagcatatcgtggtatgtggacatatcacactcgaaagcgtgtcgaacttccttaaggactttttgcacaaagaccgcgacgacgtaaacgttgaaattgtttttctgcacaacatctccccgaatctcgagttagaggctctctttaaacgccattttacccaggtcgagttttatcaggggtctgtgctgaaccctcatgacctggctcgggttaaaatcgagagtgccgacgcatgccttatcctggccaataaatattgtgccgaccctgatgccgaggatgccagcaatatcatgagggtgatcagtattaagaattaccaccctaagatccggatcattacacagatgctgcaataccataacaaggcacatctgctgaatattccaagctggaattggaaagaaggagacgacgccatatgtcttgccgagctgaagttgggatttatcgcccagagttgcttggcccaaggtctttcgactatgctggctaacctgttttctatgcggagctttattaagatcgaggaggacacctggcaaaagtactacttagagggggtgtcaaacgaaatgtatacagagtatcttagttccgccttcgtgggactgtcctttcctaccgtgtgcgagctgtgtttcgtgaaactgaagttgttgatgatagcaatcgagtacaagtctgctaaccgcgaatcccggatcctgattaatcccggaaaccatctgaaaatccaggaagggacactggggttcttcatcgcatctgatgctaaggaggtgaaacgggccttcttctattgcaaggcttgccacgacgacattaccgatcccaagcgtatcaagaaatgtgggtgcaaaaggcttgaggatgagcagcctagcactctgtcgcccaaaaaaaaacagagaaatggagggatgcgtaacagccctaataccagtccgaagctcatgcgacatgatcctttactaataccaggcaatgaccagatcgataatatggattcaaacgtgaaaaagtatgacagcacaggaatgttccactggtgtgcccctaaggagattgagaaagtcattctgacccgatctgaggccgccatgaccgtgctgtcagggcatgtagtagtctgcatcttcggggacgttagctcggccctgatcggcttaaggaatctggtcatgccgctacgtgcaagcaacttccactatcatgaattaaaacatattgtttttgttgggtcgatagaatacctaaagagagaatgggagactctgcacaatttccctaaagtcagcatcttgcctggaactccgctctcacgagccgatttacgcgctgtaaacattaacctgtgcgacatgtgtgtgattctgtccgccaatcaaaacaacattgacgacacctccctccaggataaggagtgtatactagcgagtctcaacattaagagcatgcaatttgatgactccattggtgttctacaggccaacagccaggggttcaccccacccggaatggatagaagctcccctgataacagcccagtgcacggaatgttgcggcaaccaagtatcacgactggagtgaacatcccaatcatcacggaattagtcaacgacacgaacgtgcaatttcttgaccaagacgatgatgacgatccagacaccgaattatatttgacgcagcctttcgcatgcgggactgctttcgcagtttctgtgttggattctctaatgagtgctacctatttcaatgataatatactcaccttaatacgtaccctcgtcacgggaggagccacacccgagttggaggccctgatcgccgaggaaaatgccctgcgcgggggttattcaactccacagacactggctaatagagatcgatgtagagttgcccagctagccctccttgacgggccattcgcggatctaggtgacggcggttgctatggagatctgttttgcaaggctctgaaaacctacaatatgttatgctttgggatatatcggctgcgtgacgcccatctgtccacccccagtcagtgtactaagcgctatgtcattactaatcccccttacgaatttgagctggtccctactgatcttattttttgcctgatgcagttcgaccacaatgctggtcagtctagggcctccctctctcattcaagtcactcaagtcaatcaagctctaaaaaaagcagcagtgtccactccatacctagcactgcaaatcgacagaaccgcccaaaaagtagagaaagcagagacaagcagaatcgcaaagaaatggtgtacagatag

SEQ ID NO: 282942 - DNA, 3504 bp, Artificial Sequence
  derived and/or modified sequence
tgaggaggcggcggcggcggcggcggcagcagcctgaggatgagcagcaacatccacgccaaccacctgagcctggatgccagcagcagcagcagcagcagcagcagcagcagcagcagcagcagcagcagcagcagcagcagctctgtgcatgagcccaagatggatgccctgatcatccctgtgaccatggaggtgccctgtgacagccggggccagaggatgtggtgggccttcctggccagctccatggtgaccttcttcggcggcctcttcatcatcctgctgtggaggaccctgaagtacctgtggacagtgtgctgccactgcggcggcaagaccaaggaggcccagaagatcaacaacggcagcagccaggctgatggcaccctgaagcctgtggatgagaaggaggaggccgtggccgctgaggtgggctggatgacctctgtgaaggactgggccggcgtgatgatcagcgcccagaccctgaccggccgggtgctggtggtgctggtgtttgccctgagcatcggggccctggtgatctacttcatcgacagcagcaaccccatcgagagctgccagaacttctacaaggacttcaccctgcagattgacatggccttcaacgtgttcttcctgctgtacttcggcctgcgcttcatcgccgccaatgacaagctgtggttctggctggaggtgaacagcgtggtggacttcttcaccgtgccccctgtgtttgtgtctgtgtacctgaacagatcctggctgggcctgcgcttcctgcgggccctgcggctcatccagttcagcgagatcctgcagttcctgaacatcctgaagaccagcaacagcatcaagctggtgaacctgctgagcatcttcatcagcacctggctgacagctgctggcttcatccacctggtggagaacagcggggacccctgggagaacttccagaacaaccaggccctgacctactgggagtgtgtgtacctgctgatggtgaccatgagcacagtgggctatggagatgtgtatgccaagaccaccctgggccgcctcttcatggtgttcttcatcctgggcggcctggccatgtttgccagctatgtgcctgagatcatcgagctgattggcaacaggaagaagtatggaggcagctacagcgctgtgtctggcaggaagcacatcgtggtgtgtggccacatcaccctggagagcgtgagcaacttcctgaaggacttcctgcacaaggacagagatgatgtgaatgtggagatcgtgttcctgcacaacatcagccccaacctggagctggaggccctcttcaagaggcacttcacccaggtggagttctaccagggctctgtgctgaacccccatgacctggcccgggtgaagattgagagcgcagatgcctgcctgatcctggccaacaagtactgtgccgaccctgatgctgaagatgccagcaacatcatgagggtcatcagcatcaagaactaccaccccaagatccgcatcatcacccagatgctgcagtaccacaacaaggcccacctgctgaacatccccagctggaactggaaggagggagatgatgccatctgcctggccgagctgaagctgggcttcatcgcccagagctgcctggcccagggcctgagcaccatgctggccaacctcttctccatgaggagcttcatcaagattgaggaggacacctggcagaagtactacctggagggcgtgtccaatgagatgtacacagagtacctgagcagcgcctttgtgggcctgtccttccccaccgtgtgtgagctgtgctttgtgaagctgaagctgctgatgattgccatcgagtacaagagcgccaaccgggagagccgcatcctgatcaaccctggcaaccacctgaagatccaggagggcaccctgggcttcttcatcgccagtgatgccaaggaggtgaagagggccttcttctactgcaaggcctgccatgatgacatcacagaccccaagaggatcaagaagtgtggctgcaagaggctggaggatgagcagcccagcaccctgagccccaagaagaagcagagaaatggaggcatgaggaacagccccaacaccagccccaagctgatgagacatgaccccctgctgatccctggaaatgaccagattgacaacatggacagcaatgtgaagaagtatgacagcacaggcatgttccactggtgtgcccccaaggagattgagaaggtgatcctgaccaggtctgaggccgccatgacagtgctgagcggccacgtggtggtgtgcatctttggagatgtgtcctctgccctgattggcctgaggaacctggtgatgcccctgcgggccagcaacttccactaccacgagctgaagcacatcgtgtttgtgggcagcattgagtacctgaagcgggagtgggagaccctgcacaacttccccaaggtgtccatcctgcccggcacccccctgagcagagctgacctgcgggctgtgaacatcaacctgtgtgacatgtgtgtgatcctgagcgccaaccagaacaacattgatgacaccagcctgcaggacaaggagtgcatcctggccagcctgaacatcaagtccatgcagtttgatgacagcattggagtgctgcaggccaacagccagggcttcaccccacctggcatggacaggagcagcccagacaacagccctgtgcacggcatgctgcggcagcccagcatcaccaccggggtgaacatccccatcatcacagagctggtgaatgacaccaacgtgcagttcctggaccaggatgatgatgatgatcctgacacagagctgtacctgacccagccctttgcctgtggcacagcctttgctgtgtctgtgctggacagcctgatgtctgccacctacttcaatgacaacatcctgaccctcatccgcaccctggtgactggaggagccaccccagagctggaggccctgattgctgaggagaatgccctgcggggcggctacagcaccccccagaccctggccaacagagaccgctgccgggtggcccagctggccctgctggatggcccctttgctgacctgggagatggcggctgctacggggacctcttctgcaaggccctgaagacctacaacatgctgtgcttcggcatctaccgcctgagagatgcccacctgagcacccccagccagtgcaccaagcgctacgtgatcaccaaccccccctatgaatttgagctggtgcccacagacctgatcttctgcctgatgcagtttgaccacaatgccggccagagccgggccagcctgagccacagcagccacagcagccagagcagcagcaagaagagcagctctgtgcacagcatccccagcacagccaaccggcagaaccggcccaagagccgggagagccgggacaagcagaacaggaaggagatggtgtacagatag

SEQ ID NO: 282943 - DNA, 3504 bp, Artificial Sequence
  derived and/or modified sequence
tgaggcggcggcggcggcggcggcggcagcagcctgcggatgagcagtaacatccatgctaaccatctttctctcgacgcatcttctagctccagttcaagctccagcagtagtagcagctctagctcttcgtctagctcttcgagcgtgcatgagcctaaaatggatgcactgatcatccctgtcaccatggaggtgccttgcgactcgagggggcagaggatgtggtgggcctttttggccagctccatggtaacattcttcggtggcttatttatcattttactgtggaggacacttaagtatttgtggaccgtgtgttgtcattgtggcgggaaaaccaaggaagcgcaaaaaatcaacaatggatccagccaggcagatggcaccctaaagcctgtcgatgaaaaggaggaagctgtagccgccgaggttggttggatgacctcagttaaggattgggccggggtgatgatcagcgcccagactttgaccggcagggttctggtggtcctggttttcgctctgagcattggcgccctcgtgatctacttcatcgattcttccaaccccatcgagagttgccaaaacttttacaaggatttcacactgcagattgatatggcttttaatgtgtttttcctgctgtatttcggcctgcgctttatcgctgccaatgataagctgtggttctggctcgaggtgaactccgtcgtggacttcttcacagttcctcccgtgttcgtgagtgtatacctgaaccggagctggctcggcctgcggtttctgagagccctgagactgatccagtttagtgagatcttacagtttctcaatatcttaaaaacaagcaactccatcaaactggtcaacctgctttctatatttattagcacttggctaacagctgctgggtttatccacttggttgagaattcaggtgacccatgggaaaattttcagaataatcaggccttaacctactgggagtgtgtttatctgctgatggtcacgatgtcaactgtgggctatggcgacgtctatgccaagactacgctggggagactgttcatggttttttttatcctgggcggattggctatgttcgcaagctatgttcctgaaattatcgagcttatcggaaaccggaaaaaatacggtggtagttattccgccgtgagtggacggaaacacatcgtggtctgtggccacattacccttgagtcagtgtctaattttcttaaggacttccttcacaaggatagggacgacgttaatgttgagatcgtgtttctacataatatttctccaaacctcgagttagaggctctgttcaagaggcacttcacacaggtagagttttaccaaggatccgtcttaaacccccatgacctcgccagagtcaagatagaatcggctgatgcctgcctcatcctggcaaataagtactgcgcagaccccgatgctgaggacgcttctaacattatgagagtgatcagcatcaagaactatcaccccaagatcagaattattacccagatgctccagtatcacaacaaagctcaccttctgaacatccccagttggaactggaaggaaggagacgatgctatctgtttggccgaactgaaactgggcttcattgcccaatcctgtctggcccaggggctgtctactatgttggccaacctgttcagcatgagatctttcatcaaaattgaagaagatacctggcagaaatattacttggaaggtgtctcgaacgaaatgtacaccgaatatctcagcagtgcctttgtgggtctgtctttcccaacagtgtgcgaactttgcttcgtgaaactcaagttgctgatgatcgccatagaatacaaaagtgcgaacagggagagcagaattctgattaaccctggaaatcacctgaaaattcaagaggggacactggggttctttatcgcttctgatgctaaggaagtgaaacgtgcctttttctattgcaaggcctgtcatgacgatattaccgatcccaaacggatcaagaagtgtggttgtaaaaggctggaggacgagcagccgagcaccttgagccccaagaagaaacaaagaaatggcggtatgagaaattcgcccaatacaagcccaaaacttatgcgccatgacccactcctgatacccggaaacgatcagatcgacaatatggattctaacgtgaaaaaatacgactccaccggaatgtttcattggtgtgcacccaaagagattgagaaagtgattctcacaaggtctgaggctgccatgaccgtgctgagtggccacgtggtggtgtgtatctttggcgacgtctcctcagctctgatcggcctcaggaacctagtcatgccgctgcgagcttccaacttccattaccatgagctgaaacacatcgtcttcgtcgggagtattgagtacctcaagcgagagtgggagactctgcacaattttcccaaagtgagcattctgcctgggacgccgcttagcagagccgatttgcgcgccgtcaacattaatctttgcgacatgtgcgtgattctgtcagctaatcagaataacatcgacgacacatccctacaggataaggaatgcatccttgcctctctgaatatcaagtccatgcagttcgatgattctattggcgtgttgcaggctaatagtcagggctttacgccccccggcatggacaggtcctcccctgacaattcaccagtgcacggtatgcttcgacaaccctccataactacgggcgttaatatccccattattaccgaactggtgaacgatacaaatgtacagtttttagaccaggatgacgacgacgaccccgacactgaactgtatcttacgcagccattcgcctgtggaaccgccttcgccgtcagcgttctagacagcctaatgtcagcaacgtatttcaacgataacatccttacactcattcgtacattggtcacaggtggagctactcccgaattggaggcgctgatcgctgaggagaacgcactgagaggcgggtattccactccacagacccttgcaaacagagaccgctgcagagtggctcagctggctctgttagacggacctttcgccgatctcggagatggcggatgctacggggacctcttctgtaaggccctcaaaacctacaatatgctgtgcttcggcatctaccgattacgtgatgcacacctctcaaccccaagccagtgtaccaaacggtacgtcatcaccaatcctccatacgagtttgagctggtgccaaccgatcttatattttgtctcatgcagttcgatcataatgctggccagtccagagcatccttgagtcatagctctcattcaagccagtcctccagcaaaaagagcagtagcgttcactcgatccccagcactgccaacagacagaatagacccaaatctcgggagtctagggacaagcagaaccggaaagagatggtttatcggtag

SEQ ID NO: 282944 - DNA, 3774 bp, Artificial Sequence
  derived and/or modified sequence
cggcggcggcggcggcggcggaggcagcagtcttagaatgagtagcaatatccacgcgaaccatctcagcctagacgcgtcctcctcctcctcctcctcctcttcctcttcttcttcttcctcctcctcttcctcctcgtcctcggtccacgagcccaagatggatgcgctcatcatcccggtgaccatggaggtgccgtgcgacagccggggccaacgcatgtggtgggctttcctggcctcctccatggtgactttcttcgggggcctcttcatcatcttgctctggcggacgctcaagtacctgtggaccgtgtgctgccactgcgggggcaagacgaaggaggcccagaagattaacaatggctcaagccaggcggatggcactctcaaaccagtggatgaaaaagaggaggcagtggccgccgaggtcggctggatgacctccgtgaaggactgggcgggggtgatgatatccgcccagacactgactggcagagtcctggttgtcttagtctttgctctcagcatcggtgcacttgtaatatacttcatagattcatcaaacccaatagaatcctgccagaatttctacaaagatttcacattacagatcgacatggctttcaacgtgttcttccttctctacttcggcttgcggtttattgcagccaacgataaattgtggttctggctggaagtgaactctgtagtggatttcttcacggtgccccccgtgtttgtgtctgtgtacttaaacagaagttggcttggtttgagatttttaagagctctgagactgatacagttttcagaaattttgcagtttctgaatattcttaaaacaagtaattccatcaagctggtgaatctgctctccatatttatcagcacgtggctgactgcagccgggttcatccatttggtggagaattcaggggacccatgggaaaatttccaaaacaaccaggctctcacctactgggaatgtgtctatttactcatggtcacaatgtccaccgttggttatggggatgtttatgcaaaaaccacacttgggcgcctcttcatggtcttcttcatcctcgggggactggccatgtttgccagctacgtccctgaaatcatagagttaataggaaaccgcaagaaatacgggggctcctatagtgcggttagtggaagaaagcacattgtggtctgcggacacatcactctggagagtgtttccaacttcctgaaggactttctgcacaaggaccgggatgacgtcaatgtggagatcgtttttcttcacaacatctcccccaacctggagcttgaagctctgttcaaacgacattttactcaggtggaattttatcagggttccgtcctcaatccacatgatcttgcaagagtcaagatagagtcagcagatgcatgcctgatccttgccaacaagtactgcgctgacccggatgcggaggatgcctcgaatatcatgagagtaatctccataaagaactaccatccgaagataagaatcatcactcaaatgctgcagtatcacaacaaggcccatctgctaaacatcccgagctggaattggaaagaaggtgatgacgcaatctgcctcgcagagttgaagttgggcttcatagcccagagctgcctggctcaaggcctctccaccatgcttgccaacctcttctccatgaggtcattcataaagattgaggaagacacatggcagaaatactacttggaaggagtctcaaatgaaatgtacacagaatatctctccagtgccttcgtgggtctgtccttccctactgtttgtgagctgtgttttgtgaagctcaagctcctaatgatagccattgagtacaagtctgccaaccgagagagccgtatattaattaatcctggaaaccatcttaagatccaagaaggtactttaggatttttcatcgcaagtgatgccaaagaagttaaaagggcatttttttactgcaaggcctgtcatgatgacatcacagatcccaaaagaataaaaaaatgtggctgcaaacggcttgaagatgagcagccgtcaacactatcaccaaaaaaaaagcaacggaatggaggcatgcggaactcacccaacacctcgcctaagctgatgaggcatgaccccttgttaattcctggcaatgatcagattgacaacatggactccaatgtgaagaagtacgactctactgggatgtttcactggtgtgcacccaaggagatagagaaagtcatcctgactcgaagtgaagctgccatgaccgtcctgagtggccatgtcgtggtctgcatctttggcgacgtcagctcagccctgatcggcctccggaacctggtgatgccgctccgtgccagcaactttcattaccatgagctcaagcacattgtgtttgtgggctctattgagtacctcaagcgggaatgggagacgcttcataacttccccaaagtgtccatattgcctggtacgccattaagtcgggctgatttaagggctgtcaacatcaacctctgtgacatgtgcgttatcctgtcagccaatcagaataatattgatgatacttcgctgcaggacaaggaatgcatcttggcgtcactcaacatcaaatctatgcagtttgatgacagcatcggagtcttgcaggctaattcccaagggttcacacctccaggaatggatagatcctctccagataacagcccagtgcacgggatgttacgtcaaccatccatcacaactggggtcaacatccccatcatcactgaactagtgaacgatactaatgttcagtttttggaccaagacgatgatgatgaccctgatacagaactgtacctcacgcagccctttgcctgtgggacagcatttgccgtcagtgtcctggactcactcatgagcgcgacgtacttcaatgacaatatcctcaccctgatacggaccctggtgaccggaggagccacgccggagctggaggctctgattgctgaggaaaacgcccttagaggtggctacagcaccccgcagacactggccaatagggaccgctgccgcgtggcccagttagctctgctcgatgggccatttgcggacttaggggatggtggttgttatggtgatctgttctgcaaagctctgaaaacatataatatgctttgttttggaatttaccggctgagagatgctcacctcagcacccccagtcagtgcacaaagaggtatgtcatcaccaacccgccctatgagtttgagctcgtgccgacggacctgatcttctgcttaatgcagtttgaccacaatgccggccagtcccgggccagcctgtcccattcctcccactcgtcgcagtcctccagcaagaagagctcctctgttcactccatcccatccacagcaaaccgacagaaccggcccaagtccagggagtcccgggacaaacagaacagaaaagaaatggtttacagatgaaccggataatgcctatcccagaaacattcaaatcaagcccatgagtacccacatggctaaccagatcaaccaatataaatccacaagcagcttgattccaccaatcagagaagttgaagatgaatgttgactcccaggagaccagaactatttttttaaagcctgacaaacttcataaatggtgatgtgacttttcttcttacatgctgaatcactggtggaaacgttaggataagcaagaattgccagaaaataaagtagacagatctttc

SEQ ID NO: 282945 - DNA, 3504 bp, Artificial Sequence
  derived and/or modified sequence
taagggggtgggggaggagggggaggctcctcgctacgcatgagttctaatatacatgctaaccacttaagcctggacgcctctagtagctcatcctcatcctcttcctcttcatcctcatcgagttcttcatcttcctccagctcggtccacgagccaaagatggatgcattgattatcccagttactatggaagttccttgtgactcacgcggacagcgaatgtggtgggcatttctcgcgtcaagcatggtgacattcttcggcggactgttcatcatcttgctctggcggactctaaagtatctctggacagtctgctgccactgcggtggcaaaaccaaagaagctcagaaaatcaataatgggagctctcaggccgacggaactttgaagccggtggacgaaaaggaagaggccgtggccgctgaggtcggctggatgacgagtgtgaaagattgggccggagtaatgattagtgctcaaaccttgactggacgcgtactggtcgtcttggttttcgcgctctcgatcggcgcacttgtgatatattttatcgattcctccaatcctatcgagtcttgtcagaacttctacaaggatttcaccctgcagattgacatggccttcaatgtgttttttctgctgtatttcggcctacgatttatcgccgctaatgacaagctgtggttctggctggaagtgaatagtgtggtggactttttcacagtgccccctgtgtttgtgtcagtatacctgaaccggtcctggctgggactgagattcctgcgagccctaaggctcatacagttctccgagatcctgcaatttcttaatatcctcaagaccagtaactccataaagctggtgaacctgctatccatttttatcagcacatggttaacagccgcaggtttcatccatctagtggagaattccggagacccttgggaaaattttcagaataaccaggcacttacatactgggagtgcgtctatctactcatggtgacgatgtcaaccgtgggatacggtgatgtttacgccaaaaccaccctcggtagattgttcatggtgttctttatcctggggggattagctatgtttgcatcgtatgtcccagaaatcattgagttgatcggcaatagaaagaagtatggagggtcttacagtgccgtcagtggcaggaagcacattgtcgtctgcggacacattacactcgagagtgtgagcaacttcttaaaggactttcttcacaaggaccgggacgatgtaaacgtggagatcgtctttctccacaacatctcaccaaacttagaactagaggcattatttaaacgccactttacccaagtcgagttctaccagggctcggtgctgaatcctcacgacctggctcgcgtgaagattgaatccgccgatgcttgcctgattctggccaataagtactgcgccgatccagacgctgaagacgcaagcaatatcatgcgtgtaatctcaattaaaaattatcatcctaagatccgcattattactcagatgctgcagtatcataacaaagcacatctgctcaacattccatcatggaactggaaagagggcgatgacgccatatgtctcgccgagttgaagctaggcttcatcgctcagagttgtctggcacaaggactgagcacaatgctggccaacctcttcagtatgaggtcctttattaagatagaggaagatacttggcagaagtactacctggaaggcgtgagcaatgagatgtatactgagtacctgtcttcagccttcgttgggttgtcctttccaaccgtttgcgagctgtgttttgtgaagctgaagctgctgatgatcgccatcgaatacaagtccgccaaccgcgaaagcagaattctgatcaaccctggcaaccatctaaagattcaggaagggactctgggcttttttatcgccagcgacgctaaagaggtcaaacgggcattcttctattgtaaggcgtgtcacgatgacataaccgaccccaagagaataaaaaagtgcggctgcaagagactcgaagatgagcaaccaagcaccctgtcgccgaaaaagaaacagaggaacgggggaatgcgcaactcacctaacacatcccccaaacttatgagacatgatccgctgctcattccgggtaacgaccaaatcgacaacatggactcaaacgtaaaaaagtacgactccaccgggatgttccactggtgtgcgcctaaggagatcgagaaagtgattctcacccgatcagaagcagcaatgaccgttttatccgggcacgtggttgtctgtatctttggtgatgtctcgtccgcactcatcgggctccggaacctggtcatgccactacgggctagtaattttcattaccacgagcttaaacacatcgtcttcgtgggctcgattgagtacttgaagagggagtgggagactttacacaacttccccaaagtgagtattctccccggaacacccctcagtcgcgctgacttacgggcagtcaacattaatctctgcgacatgtgtgtgattctctctgccaaccagaacaatattgacgatacaagcctccaggataaagagtgtatactggcgtctttgaatattaaatccatgcagttcgacgacagcatcggagtgttacaggcgaacagccaaggattcacccccccaggcatggaccgctcatccccggataacagccctgtccatgggatgctgagacagccctccattacaactggagtaaatattccaatcattacggagttggtgaatgataccaacgtccaattccttgatcaggatgatgatgatgacccggataccgagctgtatcttactcagcccttcgcttgcggaactgccttcgccgtttctgtgctggatagtctgatgtcggccacctactttaacgataatattctgactcttattcgtactcttgtcacaggaggtgcgacccccgagttagaagctctgattgctgaggagaatgcactgcggggaggctactcaacccctcagacactggcgaacagggaccgctgtcgggtagctcaactcgccctgctggatggcccatttgccgatctgggagacggcggatgctatggcgatcttttttgtaaagcactcaaaacctataacatgctgtgtttcggcatttatcgcctgcgcgacgcacacctgtcgacccccagtcagtgcacaaaacggtacgtcatcacaaatccgccatacgagttcgagctggtgcctacagatctcatcttctgcctcatgcagttcgatcacaatgctggccaaagtagggcttccctaagtcacagctcccattcctcccagtccagctccaagaagtcatcatctgttcactcaatcccgtccactgcaaaccgccaaaaccgaccaaaatcccgcgaaagcagggataaacagaaccggaaggagatggtttaccgatag

SEQ ID NO: 282946 - DNA, 3504 bp, Artificial Sequence
  derived and/or modified sequence
tgaggcggcggcggcggcggcggcggcagcagcctgagaatgagcagcaacatccacgccaaccacctgagcctggacgccagcagcagcagcagcagcagcagcagcagcagcagcagcagcagcagcagcagcagcagcagcagcgtgcacgagcccaagatggacgccctgatcatccccgtgaccatggaggtgccctgcgacagcagaggccagagaatgtggtgggccttcctggccagcagcatggtgaccttcttcggcggcctgttcatcatcctgctgtggagaaccctgaagtacctgtggaccgtgtgctgccactgcggcggcaagaccaaggaggcccagaagatcaacaacggcagcagccaggccgacggcaccctgaagcccgtggacgagaaggaggaggccgtggccgccgaggtgggctggatgaccagcgtgaaggactgggccggcgtgatgatcagcgcccagaccctgaccggcagagtgctggtggtgctggtgttcgccctgagcatcggcgccctggtgatctacttcatcgacagcagcaaccccatcgagagctgccagaacttctacaaggacttcaccctgcagatcgacatggccttcaacgtgttcttcctgctgtacttcggcctgagattcatcgccgccaacgacaagctgtggttctggctggaggtgaacagcgtggtggacttcttcaccgtgccccccgtgttcgtgagcgtgtacctgaacagaagctggctgggcctgagattcctgagagccctgagactgatccagttcagcgagatcctgcagttcctgaacatcctgaagaccagcaacagcatcaagctggtgaacctgctgagcatcttcatcagcacctggctgaccgccgccggcttcatccacctggtggagaacagcggcgacccctgggagaacttccagaacaaccaggccctgacctactgggagtgcgtgtacctgctgatggtgaccatgagcaccgtgggctacggcgacgtgtacgccaagaccaccctgggcagactgttcatggtgttcttcatcctgggcggcctggccatgttcgccagctacgtgcccgagatcatcgagctgatcggcaacagaaagaagtacggcggcagctacagcgccgtgagcggcagaaagcacatcgtggtgtgcggccacatcaccctggagagcgtgagcaacttcctgaaggacttcctgcacaaggacagagacgacgtgaacgtggagatcgtgttcctgcacaacatcagccccaacctggagctggaggccctgttcaagagacacttcacccaggtggagttctaccagggcagcgtgctgaacccccacgacctggccagagtgaagatcgagagcgccgacgcctgcctgatcctggccaacaagtactgcgccgaccccgacgccgaggacgccagcaacatcatgagagtgatcagcatcaagaactaccaccccaagatcagaatcatcacccagatgctgcagtaccacaacaaggcccacctgctgaacatccccagctggaactggaaggagggcgacgacgccatctgcctggccgagctgaagctgggcttcatcgcccagagctgcctggcccagggcctgagcaccatgctggccaacctgttcagcatgagaagcttcatcaagatcgaggaggacacctggcagaagtactacctggagggcgtgagcaacgagatgtacaccgagtacctgagcagcgccttcgtgggcctgagcttccccaccgtgtgcgagctgtgcttcgtgaagctgaagctgctgatgatcgccatcgagtacaagagcgccaacagagagagcagaatcctgatcaaccccggcaaccacctgaagatccaggagggcaccctgggcttcttcatcgccagcgacgccaaggaggtgaagagagccttcttctactgcaaggcctgccacgacgacatcaccgaccccaagagaatcaagaagtgcggctgcaagagactggaggacgagcagcccagcaccctgagccccaagaagaagcagagaaacggcggcatgagaaacagccccaacaccagccccaagctgatgagacacgaccccctgctgatccccggcaacgaccagatcgacaacatggacagcaacgtgaagaagtacgacagcaccggcatgttccactggtgcgcccccaaggagatcgagaaggtgatcctgaccagaagcgaggccgccatgaccgtgctgagcggccacgtggtggtgtgcatcttcggcgacgtgagcagcgccctgatcggcctgagaaacctggtgatgcccctgagagccagcaacttccactaccacgagctgaagcacatcgtgttcgtgggcagcatcgagtacctgaagagagagtgggagaccctgcacaacttccccaaggtgagcatcctgcccggcacccccctgagcagagccgacctgagagccgtgaacatcaacctgtgcgacatgtgcgtgatcctgagcgccaaccagaacaacatcgacgacaccagcctgcaggacaaggagtgcatcctggccagcctgaacatcaagagcatgcagttcgacgacagcatcggcgtgctgcaggccaacagccagggcttcaccccccccggcatggacagaagcagccccgacaacagccccgtgcacggcatgctgagacagcccagcatcaccaccggcgtgaacatccccatcatcaccgagctggtgaacgacaccaacgtgcagttcctggaccaggacgacgacgacgaccccgacaccgagctgtacctgacccagcccttcgcctgcggcaccgccttcgccgtgagcgtgctggacagcctgatgagcgccacctacttcaacgacaacatcctgaccctgatcagaaccctggtgaccggcggcgccacccccgagctggaggccctgatcgccgaggagaacgccctgagaggcggctacagcaccccccagaccctggccaacagagacagatgcagagtggcccagctggccctgctggacggccccttcgccgacctgggcgacggcggctgctacggcgacctgttctgcaaggccctgaagacctacaacatgctgtgcttcggcatctacagactgagagacgcccacctgagcacccccagccagtgcaccaagagatacgtgatcaccaaccccccctacgagttcgagctggtgcccaccgacctgatcttctgcctgatgcagttcgaccacaacgccggccagagcagagccagcctgagccacagcagccacagcagccagagcagcagcaagaagagcagcagcgtgcacagcatccccagcaccgccaacagacagaacagacccaagagcagagagagcagagacaagcagaacagaaaggagatggtgtacagatag

SEQ ID NO: 282947 - protein, 1177 aa, Artificial Sequence
  derived and/or modified sequence
MANGGGGGGGSSGGGGGGGGSSLRMSSNIHANHLSLDASSSSSSSSSSSSSSSSSSSSSSVHEPKMDALIIPVTMEVPCDSRGQRMWWAFLASSMVTFFGGLFIILLWRTLKYLWTVCCHCGGKTKEAQKINNGSSQADGTLKPVDEKEEAVAAEVGWMTSVKDWAGVMISAQTLTGRVLVVLVFALSIGALVIYFIDSSNPIESCQNFYKDFTLQIDMAFNVFFLLYFGLRFIAANDKLWFWLEVNSVVDFFTVPPVFVSVYLNRSWLGLRFLRALRLIQFSEILQFLNILKTSNSIKLVNLLSIFISTWLTAAGFIHLVENSGDPWENFQNNQALTYWECVYLLMVTMSTVGYGDVYAKTTLGRLFMVFFILGGLAMFASYVPEIIELIGNRKKYGGSYSAVSGRKHIVVCGHITLESVSNFLKDFLHKDRDDVNVEIVFLHNISPNLELEALFKRHFTQVEFYQGSVLNPHDLARVKIESADACLILANKYCADPDAEDASNIMRVISIKNYHPKIRIITQMLQYHNKAHLLNIPSWNWKEGDDAICLAELKLGFIAQSCLAQGLSTMLANLFSMRSFIKIEEDTWQKYYLEGVSNEMYTEYLSSAFVGLSFPTVCELCFVKLKLLMIAIEYKSANRESRILINPGNHLKIQEGTLGFFIASDAKEVKRAFFYCKACHDDITDPKRIKKCGCKRLEDEQPSTLSPKKKQRNGGMRNSPNTSPKLMRHDPLLIPGNDQIDNMDSNVKKYDSTGMFHWCAPKEIEKVILTRSEAAMTVLSGHVVVCIFGDVSSALIGLRNLVMPLRASNFHYHELKHIVFVGSIEYLKREWETLHNFPKVSILPGTPLSRADLRAVNINLCDMCVILSANQNNIDDTSLQDKECILASLNIKSMQFDDSIGVLQANSQGFTPPGMDRSSPDNSPVHGMLRQPSITTGVNIPIITELVNDTNVQFLDQDDDDDPDTELYLTQPFACGTAFAVSVLDSLMSATYFNDNILTLIRTLVTGGATPELEALIAEENALRGGYSTPQTLANRDRCRVAQLALLDGPFADLGDGGCYGDLFCKALKTYNMLCFGIYRLRDAHLSTPSQCTKRYVITNPPYEFELVPTDLIFCLMQFDHNAGQSRASLSHSSHSSQSSSKKSSSVHSIPSTANRQNRPKSRESRDKQKKEMVYR

SEQ ID NO: 282948 - DNA, 3534 bp, Artificial Sequence
  derived and/or modified sequence
atggctaatgggggcgggggtggcggagggtctagtggcgggggtggtggcgggggtgggtctagtctcagaatgtcctccaacattcacgccaaccatctgagcctcgacgcttcttccagctcttcatcaagcagcagctcctcctcctctagttcctctagcagcagctcctctagcgtacatgagccaaagatggacgcactcattattcccgtgaccatggaggttccatgcgactctcgaggtcagcgaatgtggtgggccttcctcgcctctagcatggtgacttttttcggcgggctattcattattctactgtggcgaacccttaagtatctctggacagtgtgctgtcactgtggaggaaagacaaaagaagcccagaaaattaacaatggatcatcacaggcagatggcacactcaaacctgtcgatgagaaggaagaggctgtggccgccgaagtgggttggatgaccagtgtcaaagattgggcaggcgtgatgatctccgcgcagaccctgacgggtcgcgtcctggtggtcctcgtttttgctttgtcgattggcgcgctggtgatctatttcatcgattcatcaaaccctatcgagtcatgccagaacttttataaagacttcaccctgcagatcgatatggcctttaatgtgttttttctcctatacttcggcctgcgttttatagccgccaacgataaattgtggttctggctggaggttaatagtgtggtcgatttctttactgtccccccggtttttgtcagcgtctatttaaacaggtcttggttggggctgcggtttctgcgcgcccttaggctcattcagttctctgagattttgcagttcctgaatattcttaagacgtctaattctatcaaacttgtgaacctgctcagtattttcatctcaacctggctgaccgctgccggattcattcaccttgttgagaactccggagatccctgggagaattttcagaacaaccaagcgctcacttattgggaatgtgtgtatctcctcatggtaaccatgagtaccgtcgggtatggtgacgtgtatgctaaaacaactcttggccggctgttcatggttttcttcattttaggcggcctggccatgtttgccagctacgtgccggagatcatagagctcataggtaatagaaagaagtacggtggatcttactcagcagtgtcgggccgcaagcacattgtggtctgtggccacataactttggagagcgttagtaatttcttgaaggatttcctccacaaagatcgggatgacgtgaatgtagaaatcgtttttctccacaatatatcaccgaatctcgaacttgaagccttgtttaaacggcacttcacacaggtggaattttaccagggttcagtcctgaatcctcacgatcttgctagagtaaagatcgagtcggcagacgcctgtctgatcctagcgaacaaatattgtgcagatccggatgcagaggatgcttccaacatcatgcgcgtcataagtattaaaaactaccatccgaagatacgcataatcacccaaatgctccagtatcacaacaaggcacacctgttgaacatcccctcatggaattggaaagagggggacgatgcgatctgtctggccgaactcaagctgggcttcattgcgcagagttgtctcgcccaaggactgtctaccatgcttgcgaatctgttttctatgagaagctttattaagattgaggaggatacctggcagaagtattatctggagggagtgagtaacgagatgtacaccgaatacctgagttccgcctttgtgggattgagcttccccacagtttgtgagctgtgtttcgtgaagctcaagcttctgatgattgccattgaatacaagtccgctaatcgggagtctagaattctcattaaccctggcaatcatctgaaaattcaagaggggacactgggattcttcatagccagcgacgccaaggaggtcaagcgggcattcttctactgtaaagcctgccacgacgacattactgacccaaaacgaatcaagaagtgcggctgcaagcgcctagaggacgaacaaccttcaaccctaagccccaaaaaaaaacagcggaatggcggaatgagaaacagcccaaatacatctcctaagctcatgaggcacgatcccttactaattcccggaaacgatcaaattgacaatatggacagcaacgtgaaaaagtacgattctactggaatgttccattggtgcgcacctaaggagatcgagaaagttatactgacccgcagcgaggcagcaatgacagtgctgtctggccatgtcgtggtgtgcatctttggcgatgtgtctagtgctctgatcggacttagaaacctggtgatgccactccgggcctccaactttcattatcatgaactgaaacatattgtgtttgtcggctccatagagtatctgaagcgagagtgggaaacactgcacaacttcccaaaagtcagcatcctccctggcacgccgctgagtagggcagacttgagggctgtgaatattaacctatgtgacatgtgcgtgatactgagtgctaatcagaacaatatagacgacacttccctacaggataaagaatgtatcctagcctcactaaacatcaaatctatgcagttcgacgactctatcggggtccttcaggcaaatagtcagggattcaccccacccggtatggatcgttcctccccagacaactcacctgtgcacggtatgttgaggcagccttccatcacaactggagtcaacattcccataatcacagagctcgtgaatgacaccaatgttcaattcctcgaccaggatgacgacgacgacccagacaccgagctttatctcactcagccattcgcatgtggcaccgccttcgccgtctccgtgcttgacagtttaatgtccgctacctactttaacgataatattctcactctcatcagaactctggtgacaggtggcgcaactccggagcttgaggctctcatcgctgaagagaacgccctgcgagggggttattccactccccagaccctcgccaacagggatcggtgtcgcgtggcacagcttgctctcctggacggcccatttgcagacttgggagatggaggctgctatggcgatctattctgtaaagccctcaagacctacaacatgctgtgctttggcatctaccgtctcagagacgcccatctctctacgccatcacaatgtaccaagcgctatgtcatcaccaacccaccgtacgagttcgagctcgtgccgacagatctgatcttctgcttgatgcagtttgaccacaacgctggccagagccgagcttctttgtctcattcatcacattcgtcacagagtagtagcaagaagagcagcagcgttcattctataccctccacagcgaaccgccagaatcgccctaaatcccgtgaaagcagggataaacaaaagaaagaaatggtgtacagatag

SEQ ID NO: 282949 - DNA, 3534 bp, Artificial Sequence
  derived and/or modified sequence
atggccaatggaggcggcggcggcggcggcagcagcggcggcggcggcggcggcggcggcagcagcctgaggatgagcagcaacatccacgccaaccacctgagcctggatgccagcagcagcagcagcagcagcagcagcagcagcagcagcagcagcagcagcagcagcagcagctctgtgcatgagcccaagatggatgccctgatcatccctgtgaccatggaggtgccctgtgacagccggggccagaggatgtggtgggccttcctggccagctccatggtgaccttctttggaggcctcttcatcatcctgctgtggaggaccctgaagtacctgtggacagtgtgctgccactgcggcggcaagaccaaggaggcccagaagatcaacaacggcagcagccaggctgatggcaccctgaagcctgtggatgagaaggaggaggccgtggccgctgaggtgggctggatgacctctgtgaaggactgggccggcgtgatgatcagcgcccagaccctgaccggccgggtgctggtggtgctggtgtttgccctgagcattggagccctggtgatctacttcatcgacagcagcaaccccatcgagagctgccagaacttctacaaggacttcaccctgcagattgacatggccttcaacgtgttcttcctgctgtacttcggcctgcgcttcatcgccgccaatgacaagctgtggttctggctggaggtgaacagcgtggtggacttcttcaccgtgccccctgtgtttgtgtctgtgtacctgaacagatcctggctgggcctgcgcttcctgcgggccctgcggctcatccagttcagcgagatcctgcagttcctgaacatcctgaagaccagcaacagcatcaagctggtgaacctgctgagcatcttcatcagcacctggctgacagctgctggcttcatccacctggtggagaacagcggggacccctgggagaacttccagaacaaccaggccctgacctactgggagtgtgtgtacctgctgatggtgaccatgagcacagtgggctatggagatgtgtatgccaagaccaccctgggccgcctcttcatggtgttcttcatcctgggcggcctggccatgtttgccagctatgtgcctgagatcatcgagctgattggcaacaggaagaagtatggaggcagctacagcgctgtgtctggcaggaagcacatcgtggtgtgtggccacatcaccctggagagcgtgagcaacttcctgaaggacttcctgcacaaggacagagatgatgtgaatgtggagatcgtgttcctgcacaacatcagccccaacctggagctggaggccctcttcaagaggcacttcacccaggtggagttctaccagggctctgtgctgaacccccatgacctggcccgggtgaagattgaatctgcagatgcctgcctgatcctggccaacaagtactgtgccgaccctgatgctgaagatgccagcaacatcatgagggtcatcagcatcaagaactaccaccccaagatccgcatcatcacccagatgctgcagtaccacaacaaggcccacctgctgaacatccccagctggaactggaaggagggagatgatgccatctgcctggccgagctgaagctgggcttcatcgcccagagctgcctggcccagggcctgagcaccatgctggccaacctcttctccatgaggagcttcatcaagattgaggaggacacctggcagaagtactacctggagggcgtgtccaatgagatgtacacagagtacctgagcagcgcctttgtgggcctgtccttccccaccgtgtgtgagctgtgctttgtgaagctgaagctgctgatgattgccatcgagtacaagagcgccaaccgggagagccgcatcctgatcaaccctggcaaccacctgaagatccaggagggcaccctgggcttcttcatcgccagtgatgccaaggaggtgaagagggccttcttctactgcaaggcctgccatgatgacatcacagaccccaagaggatcaagaagtgtggctgcaagaggctggaggatgagcagcccagcaccctgagccccaagaagaagcagagaaatggaggcatgaggaacagccccaacaccagccccaagctgatgagacatgaccccctgctgatccctggaaatgaccagattgacaacatggacagcaatgtgaagaagtatgacagcacaggcatgttccactggtgtgcccccaaggagattgagaaggtgatcctgaccaggtctgaggccgccatgacagtgctgagcggccacgtggtggtgtgcatctttggagatgtgagcagcgccctgattggcctgaggaacctggtgatgcccctgcgggccagcaacttccactaccacgagctgaagcacatcgtgtttgtgggcagcattgagtacctgaagcgggagtgggagaccctgcacaacttccccaaggtgtccatcctgcccggcacccccctgagcagagctgacctgcgggctgtgaacatcaacctgtgtgacatgtgtgtgatcctgagcgccaaccagaacaacattgatgacaccagcctgcaggacaaggagtgcatcctggccagcctgaacatcaagtccatgcagtttgatgacagcattggagtgctgcaggccaacagccagggcttcaccccacctggcatggacaggagcagcccagacaacagccctgtgcacggcatgctgcggcagcccagcatcaccactggagtgaacatccccatcatcacagagctggtgaatgacaccaacgtgcagttcctggaccaggatgatgatgatgatcctgacacagagctgtacctgacccagccctttgcctgtggcacagcctttgctgtgtctgtgctggacagcctgatgtctgccacctacttcaatgacaacatcctgaccctcatccgcaccctggtgactggaggagccaccccagagctggaggccctgattgctgaagaaaatgccctgcggggcggctacagcaccccccagaccctggccaacagagaccgctgccgggtggcccagctggccctgctggatggcccctttgctgacctgggagatggcggctgctatggagacctcttctgcaaggccctgaagacctacaacatgctgtgcttcggcatctaccgcctgagagatgcccacctgagcacccccagccagtgcaccaagagatatgtgatcaccaaccccccctatgaatttgagctggtgcccacagacctgatcttctgcctgatgcagtttgaccacaatgccggccagagccgggccagcctgagccacagcagccacagcagccagagcagcagcaagaagagcagctctgtgcacagcatccccagcacagccaaccggcagaaccggcccaagagccgggagagccgggacaagcagaagaaggagatggtgtacagatag

SEQ ID NO: 282950 - DNA, 3534 bp, Artificial Sequence
  derived and/or modified sequence
atggccaacggcggcggcggcggcggcggcagcagcggcggcggcggaggaggaggcggatctagcctaaggatgagctcgaacattcacgcaaaccacctctccctagatgcaagtagctcttctagtagctcttcttcttccagtagcagttcctcctctagcagttcatcatcttctgtgcatgaaccgaagatggatgctctgatcattcccgtgaccatggaagtgccttgtgactccagggggcagaggatgtggtgggcctttctagcaagcagtatggttactttcttcggcggactcttcatcatcctcctgtggcgtactctgaaatatttgtggacagtttgttgccactgtggtgggaagaccaaggaggctcagaagatcaacaacggcagtagtcaagccgatgggacactgaagccagtcgacgagaaggaggaagcggtggccgccgaggtgggatggatgacttcagtgaaggattgggcgggtgtgatgatcagcgctcagacactgaccggccgggtcctggttgttctcgtgttcgcactatctatcggcgccctggttatctactttatcgatagttccaatcctattgagagctgccagaatttctataaagactttacactgcaaatagacatggcttttaatgtcttcttcctcctttatttcgggctgcgctttatcgcagcaaacgacaaactttggttctggctggaggtgaactctgtggtagactttttcacagtgccgcccgtctttgtgtcggtttatctaaatcgcagttggctgggcctgaggttcctgagggcgctccgactgatccagttctccgaaattctgcaattcctgaacattttaaaaacgtctaattcaataaagctggtgaacctcctgtcaatctttatttcaacctggctaactgcagccggtttcatccacctggtagaaaattctggagacccatgggagaattttcagaataatcaggccctgacctattgggagtgtgtgtacctgctgatggtgactatgtctactgtgggctacggcgatgtgtacgccaagacaacactgggaaggctgttcatggtgtttttcatacttgggggcctggcgatgttcgcctcttatgtccctgaaatcatcgaactgattgggaacagaaagaaatacggtggctcctattctgcagtgtcagggcgcaaacacatcgtagtgtgcgggcacattaccctggaaagtgtcagcaactttctgaaagatttcctccacaaagaccgggacgatgtgaacgtggagatcgtgttccttcacaacatttctcctaacctggagttagaagcactgtttaagcggcacttcactcaggttgagttttaccaaggatctgtcctgaacccacacgatctcgcccgggttaagattgagtctgccgacgcttgtctgatcctggcgaacaagtactgcgccgatccagacgctgaagatgcgagcaatatcatgcgcgtaatcagtattaagaactaccacccaaagatcagaatcatcacccagatgctgcaataccacaacaaggcccacctactaaatattcctagttggaactggaaggagggagatgatgcaatatgcctggccgagctcaaactcggcttcatcgcgcagagctgcctggcccaaggcctgtccacaatgttggcaaacctgttttcaatgaggtcattcatcaaaatagaagaggacacctggcaaaagtactatttagagggtgtgtccaatgagatgtataccgagtatctgagttccgcctttgtcggtttaagctttcctaccgtctgcgagctgtgtttcgtgaagctgaagctcctgatgattgctatcgaatacaaatccgccaacagagaaagtagaatcctaatcaatcctggaaaccatctcaaaattcaagaaggtacactgggtttctttatagcttctgatgctaaagaagtgaaacgcgcctttttttattgcaaggcctgccatgacgacatcaccgatcctaagagaataaaaaaatgcggttgtaaacggctggaggatgaacagccttcaaccctatcaccaaaaaagaaacagcgaaacggcgggatgcggaattcgccgaacacttctccgaagctgatgagacatgacccgctgctgatccctggcaacgaccaaatcgataacatggatagtaacgttaagaaatacgactctacgggaatgttccactggtgcgcccctaaggaaatagaaaaggtcattttgaccaggtcagaagctgcaatgacagtgctgagtggccacgttgtcgtgtgtatcttcggcgatgttagtagcgcccttatcggattgcgcaacctcgtgatgccactccgggcaagcaacttccattatcatgaactaaaacatatcgtctttgtagggtcaatcgagtatttgaagcgggaatgggaaactcttcataattttcccaaggtgtctattcttcccggcacccccctaagcagggccgacctgcgggctgttaacatcaatctttgcgacatgtgcgtcatcctgagcgcgaaccaaaataatattgacgacacatctctgcaagacaaggagtgtattctagcttcgttaaacattaaaagtatgcagttcgatgacagcattggggttcttcaggctaacagtcagggatttaccccgccaggcatggaccggtcttcgcccgacaactcacccgttcatggcatgttgcgccaacctagcattacaactggcgttaatatccctattatcacagaactcgtcaacgacacaaacgtgcaatttcttgatcaggacgatgatgacgaccctgacactgaactctatctgacacagccctttgcctgcgggacagcattcgccgtgagcgttcttgactctctgatgtccgccacatacttcaacgataatatcctcacactgattaggaccctggtgacaggtggagccacaccagagctggaggctcttatagccgaggagaatgccttacggggtggctactcaaccccccagaccctcgccaaccgcgacagatgtcgggtggcccagttagcattactagacggccctttcgccgacctcggagatgggggatgctacggcgacttgttttgtaaggccctaaaaacatacaatatgctctgcttcggaatctataggctgcgcgacgcgcacttatccacccctagccagtgcaccaaaagatacgttattaccaatcctccatacgaatttgaacttgtgcctaccgacctgattttctgtctgatgcagttcgaccacaacgccggacagtcacgggcctctctttcccatagttcacattcttcccagtcttcctctaagaagtcctcttctgtccacagcatcccctccaccgcaaatagacaaaatagaccgaaatcccgggagagccgcgataagcagaagaaggagatggtctataggtag

SEQ ID NO: 282951 - DNA, 4157 bp, Artificial Sequence
  derived and/or modified sequence
ggcgcagaccccgggcgcgggcggcccgcggcgccccctggctctcggcgctcggggccagcgcagcccggggcgagcggggcgcgggccggggagggggagctgcccgcgcactccatccccctcccccccgggcgggcggcggcggctcgctgtatatatctcggcgcaccccgccaggtcgcgcacagcgccccgagcccaggcgcctccccgcccccctcccgcgctccgcggcggcggcggcggcggcagcagtagcagcaatatggctgttgatgggtgtttggggtggcgctggcggcgggaggagctcccccgagcccctgcgccggctgcccgttgctagctatggcaaatggtggcggcggcggcggcggcagcagcggcggcggcggcggcggcggaggcagcagtcttagaatgagtagcaatatccacgcgaaccatctcagcctagacgcgtcctcctcctcctcctcctcctcttcctcttcttcttcttcctcctcctcttcctcctcgtcctcggtccacgagcccaagatggatgcgctcatcatcccggtgaccatggaggtgccgtgcgacagccggggccaacgcatgtggtgggctttcctggcctcctccatggtgactttcttcgggggcctcttcatcatcttgctctggcggacgctcaagtacctgtggaccgtgtgctgccactgcgggggcaagacgaaggaggcccagaagattaacaatggctcaagccaggcggatggcactctcaaaccagtggatgaaaaagaggaggcagtggccgccgaggtcggctggatgacctccgtgaaggactgggcgggggtgatgatatccgcccagacactgactggcagagtcctggttgtcttagtctttgctctcagcatcggtgcacttgtaatatacttcatagattcatcaaacccaatagaatcctgccagaatttctacaaagatttcacattacagatcgacatggctttcaacgtgttcttccttctctacttcggcttgcggtttattgcagccaacgataaattgtggttctggctggaagtgaactctgtagtggatttcttcacggtgccccccgtgtttgtgtctgtgtacttaaacagaagttggcttggtttgagatttttaagagctctgagactgatacagttttcagaaattttgcagtttctgaatattcttaaaacaagtaattccatcaagctggtgaatctgctctccatatttatcagcacgtggctgactgcagccgggttcatccatttggtggagaattcaggggacccatgggaaaatttccaaaacaaccaggctctcacctactgggaatgtgtctatttactcatggtcacaatgtccaccgttggttatggggatgtttatgcaaaaaccacacttgggcgcctcttcatggtcttcttcatcctcgggggactggccatgtttgccagctacgtccctgaaatcatagagttaataggaaaccgcaagaaatacgggggctcctatagtgcggttagtggaagaaagcacattgtggtctgcggacacatcactctggagagtgtttccaacttcctgaaggactttctgcacaaggaccgggatgacgtcaatgtggagatcgtttttcttcacaacatctcccccaacctggagcttgaagctctgttcaaacgacattttactcaggtggaattttatcagggttccgtcctcaatccacatgatcttgcaagagtcaagatagagtcagcagatgcatgcctgatccttgccaacaagtactgcgctgacccggatgcggaggatgcctcgaatatcatgagagtaatctccataaagaactaccatccgaagataagaatcatcactcaaatgctgcagtatcacaacaaggcccatctgctaaacatcccgagctggaattggaaagaaggtgatgacgcaatctgcctcgcagagttgaagttgggcttcatagcccagagctgcctggctcaaggcctctccaccatgcttgccaacctcttctccatgaggtcattcataaagattgaggaagacacatggcagaaatactacttggaaggagtctcaaatgaaatgtacacagaatatctctccagtgccttcgtgggtctgtccttccctactgtttgtgagctgtgttttgtgaagctcaagctcctaatgatagccattgagtacaagtctgccaaccgagagagccgtatattaattaatcctggaaaccatcttaagatccaagaaggtactttaggatttttcatcgcaagtgatgccaaagaagttaaaagggcatttttttactgcaaggcctgtcatgatgacatcacagatcccaaaagaataaaaaaatgtggctgcaaacggcttgaagatgagcagccgtcaacactatcaccaaaaaaaaagcaacggaatggaggcatgcggaactcacccaacacctcgcctaagctgatgaggcatgaccccttgttaattcctggcaatgatcagattgacaacatggactccaatgtgaagaagtacgactctactgggatgtttcactggtgtgcacccaaggagatagagaaagtcatcctgactcgaagtgaagctgccatgaccgtcctgagtggccatgtcgtggtctgcatctttggcgacgtcagctcagccctgatcggcctccggaacctggtgatgccgctccgtgccagcaactttcattaccatgagctcaagcacattgtgtttgtgggctctattgagtacctcaagcgggaatgggagacgcttcataacttccccaaagtgtccatattgcctggtacgccattaagtcgggctgatttaagggctgtcaacatcaacctctgtgacatgtgcgttatcctgtcagccaatcagaataatattgatgatacttcgctgcaggacaaggaatgcatcttggcgtcactcaacatcaaatctatgcagtttgatgacagcatcggagtcttgcaggctaattcccaagggttcacacctccaggaatggatagatcctctccagataacagcccagtgcacgggatgttacgtcaaccatccatcacaactggggtcaacatccccatcatcactgaactagtgaacgatactaatgttcagtttttggaccaagacgatgatgatgaccctgatacagaactgtacctcacgcagccctttgcctgtgggacagcatttgccgtcagtgtcctggactcactcatgagcgcgacgtacttcaatgacaatatcctcaccctgatacggaccctggtgaccggaggagccacgccggagctggaggctctgattgctgaggaaaacgcccttagaggtggctacagcaccccgcagacactggccaatagggaccgctgccgcgtggcccagttagctctgctcgatgggccatttgcggacttaggggatggtggttgttatggtgatctgttctgcaaagctctgaaaacatataatatgctttgttttggaatttaccggctgagagatgctcacctcagcacccccagtcagtgcacaaagaggtatgtcatcaccaacccgccctatgagtttgagctcgtgccgacggacctgatcttctgcttaatgcagtttgaccacaatgccggccagtcccgggccagcctgtcccattcctcccactcgtcgcagtcctccagcaagaagagctcctctgttcactccatcccatccacagcaaaccgacagaaccggcccaagtccagggagtcccgggacaaacagaaaaaagaaatggtttacagatgaaccggataatgcctatcccagaaacattcaaatcaagcccatgagtacccacatggctaaccagatcaaccaatataaatccacaagcagcttgattccaccaatcagagaagttgaagatgaatgttgactcccaggagaccagaactatttttttaaagcctgacaaacttcataaatggtgatgtgacttttcttcttacatgctgaatcactggtggaaacgttaggataagcaagaattgccagaaaataaagtagacagatctttc

SEQ ID NO: 282952 - DNA, 3534 bp, Artificial Sequence
  derived and/or modified sequence
atggcaaacggaggaggaggaggaggagggtcctctgggggtggcggtggtgggggaggctctagcttaagaatgtcctcaaacatccacgccaaccacttgtcactggatgcttcctcaagcagttccagctcttcatcatcatcatccagctcaagctcatcatcctcctcaagcagcgtacatgaacctaagatggatgccctgattattcctgtgaccatggaggtcccctgcgacagtcgtggacagcgtatgtggtgggcctttcttgctagctctatggtcacgtttttcgggggactctttatcatcctgttgtggaggacactgaaatatctgtggaccgtgtgctgccactgcggcggtaagaccaaggaagcccagaaaatcaataatggctcatcccaggcagacggcacactgaaacccgtggatgagaaggaggaggccgtggccgctgaagtcgggtggatgacctcagtgaaggactgggccggagtcatgatttccgcgcagacactgacagggcgagtcctggtcgtgcttgtttttgcgctgtccatcggtgctctggtgatctacttcatcgactcctctaatcccattgagagctgtcagaacttctacaaagacttcacacttcagatcgacatggcttttaatgtgttctttctgttatacttcggattgagatttatagccgctaatgataaactctggttctggctcgaggtgaattccgtcgtggacttctttacagtgccaccagtgttcgtgtctgtgtacctcaaccgtagctggctcggtctgaggttcctgcgtgctttgcgactgattcagttctctgaaatacttcaatttctcaacatccttaaaacgtcaaacagcatcaagctcgttaacctgctttcaatcttcatctctacttggcttactgccgctggcttcatacacctcgtggaaaattccggtgacccttgggagaactttcagaataatcaagccctgacatactgggaatgcgtgtatctgctgatggttaccatgagcacagtgggttacggagacgtatatgccaagaccacactggggagactgtttatggtatttttcatcctgggtgggcttgccatgttcgcatcgtacgttccagagattatcgagctgattggtaatagaaagaagtatggtggcagctactcagctgtctccggtagaaaacacatcgtagtttgcggccacatcacactagagtctgtgtccaactttctgaaggactttctacacaaggatcgcgatgatgtgaatgtcgaaatcgtattcctccacaacatttcaccaaatctcgagcttgaagcgttgttcaaacggcactttacacaagtggagttttatcaaggtagcgtcttgaacccacacgacctcgcgagggtaaagattgaaagcgccgatgcatgtttgattttggccaacaaatattgtgctgacccagacgccgaagatgccagtaatataatgagggtcatctccatcaagaattatcatcccaagatccgcattatcacacagatgctgcaataccacaacaaagctcatctccttaacatccctagctggaattggaaggagggggatgacgcaatatgcctcgccgaactcaagctcggattcatcgcccaaagctgtctcgcccagggactttcaacaatgcttgccaacctcttttcaatgcgtagcttcattaaaatcgaagaggacacttggcagaagtactatttggagggggtgagcaacgagatgtatactgaatatctgtcgtctgcctttgtgggcctatcctttcccactgtctgcgaactctgtttcgtgaagctcaagcttttaatgatagcaatcgagtacaaaagcgccaatagggagagccgaattctgattaaccccggaaatcatctgaagatccaggaagggacacttggttttttcatcgcaagcgatgccaaagaagttaagagggcttttttctactgcaaggcttgtcacgacgatatcaccgatccaaagagaattaagaaatgcgggtgcaagcgcctggaagacgagcagcccagcacgctgagccccaaaaagaaacaacggaacggtgggatgcgtaattctcctaacacatctccaaagttaatgcgccatgatcctctgctgattccgggaaatgatcaaatagataatatggatagtaatgtgaaaaaatacgactctacaggcatgttccattggtgcgcccctaaagagatagaaaaggtgattctcacccggagcgaggccgcaatgaccgtgttgtctggacacgttgtggtttgtatcttcggggacgtctcttcagccttgatcggacttagaaaccttgttatgcctctgagagctagcaacttccattaccacgagttgaaacatatcgtcttcgtgggcagtattgagtatctcaagcgtgaatgggaaaccctgcataattttccgaaagtgagtatcctcccgggtacacccctgagcagggccgaccttcgggctgtcaatatcaatttgtgcgatatgtgtgtgatcctgagcgccaaccagaataatatcgacgatacctctctccaggataaggaatgtatcctggctagtctgaatattaaaagcatgcagtttgatgatagtataggtgtcctccaagctaatagccaagggttcaccccccctggaatggatcgcagttctcccgacaactcccctgtgcacggcatgttgcggcagccatctataacaactggggtgaatattcctattattactgagcttgtgaacgacaccaatgtacagtttcttgaccaggatgacgatgacgatcccgacactgaattgtacttgactcagcctttcgcctgtggcaccgccttcgccgtgtctgtgctggatagcctcatgagcgcaacttatttcaatgataacattctgaccttgatcagaacgctggtgaccggcggtgcaacaccggagctggaagcgttgattgcagaagagaatgcactgaggggtgggtacagcacccctcaaacacttgctaacagggatagatgcagagtcgctcaactggcactcctcgatggtcccttcgcagacctgggcgacggtgggtgctacggtgaccttttctgtaaggctctcaagacctataacatgctatgcttcggcatctatcggctcagggacgcacatttaagcactccttcgcaatgcactaaaagatatgttattactaacccaccatacgagttcgagctggtgcccacagacctcatcttctgtctgatgcaattcgatcacaacgccggacagtccagagcatctctgtcacattcctcccactcaagccagagctcaagtaagaaatccagcagtgtccactcaatccctagcactgcaaatagacagaaccgcccaaagtcccgtgagagccgggataagcagaagaaggagatggtgtaccggtag

SEQ ID NO: 282953 - DNA, 3534 bp, Artificial Sequence
  derived and/or modified sequence
atggccaacggcggcggcggcggcggcggcagcagcggcggcggcggcggcggcggcggcagcagcctgagaatgagcagcaacatccacgccaaccacctgagcctggacgccagcagcagcagcagcagcagcagcagcagcagcagcagcagcagcagcagcagcagcagcagcagcgtgcacgagcccaagatggacgccctgatcatccccgtgaccatggaggtgccctgcgacagcagaggccagagaatgtggtgggccttcctggccagcagcatggtgaccttcttcggcggcctgttcatcatcctgctgtggagaaccctgaagtacctgtggaccgtgtgctgccactgcggcggcaagaccaaggaggcccagaagatcaacaacggcagcagccaggccgacggcaccctgaagcccgtggacgagaaggaggaggccgtggccgccgaggtgggctggatgaccagcgtgaaggactgggccggcgtgatgatcagcgcccagaccctgaccggcagagtgctggtggtgctggtgttcgccctgagcatcggcgccctggtgatctacttcatcgacagcagcaaccccatcgagagctgccagaacttctacaaggacttcaccctgcagatcgacatggccttcaacgtgttcttcctgctgtacttcggcctgagattcatcgccgccaacgacaagctgtggttctggctggaggtgaacagcgtggtggacttcttcaccgtgccccccgtgttcgtgagcgtgtacctgaacagaagctggctgggcctgagattcctgagagccctgagactgatccagttcagcgagatcctgcagttcctgaacatcctgaagaccagcaacagcatcaagctggtgaacctgctgagcatcttcatcagcacctggctgaccgccgccggcttcatccacctggtggagaacagcggcgacccctgggagaacttccagaacaaccaggccctgacctactgggagtgcgtgtacctgctgatggtgaccatgagcaccgtgggctacggcgacgtgtacgccaagaccaccctgggcagactgttcatggtgttcttcatcctgggcggcctggccatgttcgccagctacgtgcccgagatcatcgagctgatcggcaacagaaagaagtacggcggcagctacagcgccgtgagcggcagaaagcacatcgtggtgtgcggccacatcaccctggagagcgtgagcaacttcctgaaggacttcctgcacaaggacagagacgacgtgaacgtggagatcgtgttcctgcacaacatcagccccaacctggagctggaggccctgttcaagagacacttcacccaggtggagttctaccagggcagcgtgctgaacccccacgacctggccagagtgaagatcgagagcgccgacgcctgcctgatcctggccaacaagtactgcgccgaccccgacgccgaggacgccagcaacatcatgagagtgatcagcatcaagaactaccaccccaagatcagaatcatcacccagatgctgcagtaccacaacaaggcccacctgctgaacatccccagctggaactggaaggagggcgacgacgccatctgcctggccgagctgaagctgggcttcatcgcccagagctgcctggcccagggcctgagcaccatgctggccaacctgttcagcatgagaagcttcatcaagatcgaggaggacacctggcagaagtactacctggagggcgtgagcaacgagatgtacaccgagtacctgagcagcgccttcgtgggcctgagcttccccaccgtgtgcgagctgtgcttcgtgaagctgaagctgctgatgatcgccatcgagtacaagagcgccaacagagagagcagaatcctgatcaaccccggcaaccacctgaagatccaggagggcaccctgggcttcttcatcgccagcgacgccaaggaggtgaagagagccttcttctactgcaaggcctgccacgacgacatcaccgaccccaagagaatcaagaagtgcggctgcaagagactggaggacgagcagcccagcaccctgagccccaagaagaagcagagaaacggcggcatgagaaacagccccaacaccagccccaagctgatgagacacgaccccctgctgatccccggcaacgaccagatcgacaacatggacagcaacgtgaagaagtacgacagcaccggcatgttccactggtgcgcccccaaggagatcgagaaggtgatcctgaccagaagcgaggccgccatgaccgtgctgagcggccacgtggtggtgtgcatcttcggcgacgtgagcagcgccctgatcggcctgagaaacctggtgatgcccctgagagccagcaacttccactaccacgagctgaagcacatcgtgttcgtgggcagcatcgagtacctgaagagagagtgggagaccctgcacaacttccccaaggtgagcatcctgcccggcacccccctgagcagagccgacctgagagccgtgaacatcaacctgtgcgacatgtgcgtgatcctgagcgccaaccagaacaacatcgacgacaccagcctgcaggacaaggagtgcatcctggccagcctgaacatcaagagcatgcagttcgacgacagcatcggcgtgctgcaggccaacagccagggcttcaccccccccggcatggacagaagcagccccgacaacagccccgtgcacggcatgctgagacagcccagcatcaccaccggcgtgaacatccccatcatcaccgagctggtgaacgacaccaacgtgcagttcctggaccaggacgacgacgacgaccccgacaccgagctgtacctgacccagcccttcgcctgcggcaccgccttcgccgtgagcgtgctggacagcctgatgagcgccacctacttcaacgacaacatcctgaccctgatcagaaccctggtgaccggcggcgccacccccgagctggaggccctgatcgccgaggagaacgccctgagaggcggctacagcaccccccagaccctggccaacagagacagatgcagagtggcccagctggccctgctggacggccccttcgccgacctgggcgacggcggctgctacggcgacctgttctgcaaggccctgaagacctacaacatgctgtgcttcggcatctacagactgagagacgcccacctgagcacccccagccagtgcaccaagagatacgtgatcaccaaccccccctacgagttcgagctggtgcccaccgacctgatcttctgcctgatgcagttcgaccacaacgccggccagagcagagccagcctgagccacagcagccacagcagccagagcagcagcaagaagagcagcagcgtgcacagcatccccagcaccgccaacagacagaacagacccaagagcagagagagcagagacaagcagaagaaggagatggtgtacagatag

SEQ ID NO: 282954 - protein, 655 aa, Artificial Sequence
  derived and/or modified sequence
MVKEKVAHPQDPHHPSEKPVIHCHKCGEPCKGEVLRVQTKHFHIKCFTCKVCGCDLAQGGFFIKNGEYLCTLDYQRMYGTRCHGCGEFVEGEVVTALGKTYHPNCFACTICKRPFPPGDRVTFNGRDCLCQLCAQPMSSSPKETTFSSNCAGCGRDIKNGQALLALDKQWHLGCFKCKSCGKVLTGEYISKDGAPYCEKDYQGLFGVKCEACHQFITGKVLEAGDKHYHPSCARCSRCNQMFTEGEEMYLQGSTVWHPDCKQSTKTEEKLRPTRTSSESIYSRPGSSIPGSPGHTIYAKVDNEILDYKDLAAIPKVKAIYDIERPDLITYEPFYTSGYDDKQERQSLGESPRTLSPTPSAEGYQDVRDRMIHRSTSQGSINSPVYSRHSYTPTTSRSPQHFHRPGNEPSSGRNSPLPYRPDSRPLTPTYAQAPKHFHVPDQGINIYRKPPIYKQHGPDMKRRSSGREEDDEELLRRRQLQEEQLMKLNSGLGQLILKEEMEKESRERSSLLASRYDSPINSASHIPSSKTASLPGYGRNGLHRPVSTDFAQYNSYGDVSGGVRDFQTLPDGHMPAMRMDRGVSMPNMLEPKIFPYEMLMVTNRGRNKILREVDRTRLERHLAPEVFREIFGMSIQEFDRLPLWRRNDMKKKAKLF

SEQ ID NO: 282955 - DNA, 1968 bp, Artificial Sequence
  derived and/or modified sequence
atggtgaaggagaaggtggcccacccccaggacccccaccaccccagcgagaagcccgtgatccactgccacaagtgcggcgagccctgcaagggcgaggtgctgagagtgcagaccaagcacttccacatcaagtgcttcacctgcaaggtgtgcggctgcgacctggcccagggcggcttcttcatcaagaacggcgagtacctgtgcaccctggactaccagagaatgtacggcaccagatgccacggctgcggcgagttcgtggagggcgaggtggtgaccgccctgggcaagacctaccaccccaactgcttcgcctgcaccatctgcaagagacccttcccccccggcgacagagtgaccttcaacggcagagactgcctgtgccagctgtgcgcccagcccatgagcagcagccccaaggagaccaccttcagcagcaactgcgccggctgcggcagagacatcaagaacggccaggccctgctggccctggacaagcagtggcacctgggctgcttcaagtgcaagagctgcggcaaggtgctgaccggcgagtacatcagcaaggacggcgccccctactgcgagaaggactaccagggcctgttcggcgtgaagtgcgaggcctgccaccagttcatcaccggcaaggtgctggaggccggcgacaagcactaccaccccagctgcgccagatgcagcagatgcaaccagatgttcaccgagggcgaggagatgtacctgcagggcagcaccgtgtggcaccccgactgcaagcagagcaccaagaccgaggagaagctgagacccaccagaaccagcagcgagagcatctacagcagacccggcagcagcatccccggcagccccggccacaccatctacgccaaggtggacaacgagatcctggactacaaggacctggccgccatccccaaggtgaaggccatctacgacatcgagagacccgacctgatcacctacgagcccttctacaccagcggctacgacgacaagcaggagagacagagcctgggcgagagccccagaaccctgagccccacccccagcgccgagggctaccaggacgtgagagacagaatgatccacagaagcaccagccagggcagcatcaacagccccgtgtacagcagacacagctacacccccaccaccagcagaagcccccagcacttccacagacccggcaacgagcccagcagcggcagaaacagccccctgccctacagacccgacagcagacccctgacccccacctacgcccaggcccccaagcacttccacgtgcccgaccagggcatcaacatctacagaaagccccccatctacaagcagcacggccccgacatgaagagaagaagcagcggcagagaggaggacgacgaggagctgctgagaagaagacagctgcaggaggagcagctgatgaagctgaacagcggcctgggccagctgatcctgaaggaggagatggagaaggagagcagagagagaagcagcctgctggccagcagatacgacagccccatcaacagcgccagccacatccccagcagcaagaccgccagcctgcccggctacggcagaaacggcctgcacagacccgtgagcaccgacttcgcccagtacaacagctacggcgacgtgagcggcggcgtgagagacttccagaccctgcccgacggccacatgcccgccatgagaatggacagaggcgtgagcatgcccaacatgctggagcccaagatcttcccctacgagatgctgatggtgaccaacagaggcagaaacaagatcctgagagaggtggacagaaccagactggagagacacctggcccccgaggtgttcagagagatcttcggcatgagcatccaggagttcgacagactgcccctgtggagaagaaacgacatgaagaagaaggccaagctgttctag

SEQ ID NO: 282956 - DNA, 1968 bp, Artificial Sequence
  derived and/or modified sequence
atggtgaaagagaaagttgctcaccctcaggaccctcaccatccatctgaaaaacccgtcatccattgtcacaagtgtggggagccatgcaagggagaagtgctcagggtccagacaaagcattttcacatcaagtgtttcacctgcaaagtgtgcgggtgtgatcttgcgcaggggggcttcttcatcaaaaatggagaatacttatgtaccctggactaccaacgcatgtacggaaccaggtgtcacggatgcggggaatttgtcgaaggggaagttgtgactgctcttgggaagacctaccaccccaattgttttgcctgtactatttgtaaacgcccctttccacctggggacagagtcacctttaatggcagagattgcctgtgccaactttgtgctcagcccatgtctagtagtccaaaggagactacattttcaagcaattgcgccggatgcgggcgcgatatcaaaaacggccaggcactccttgccttggacaaacagtggcacctgggttgtttcaagtgtaagtcttgtgggaaagtgctgaccggagagtacattagtaaggatggagctccatattgtgagaaagactaccaaggcctattcggagtgaaatgtgaggcatgccatcagttcatcaccggaaaagtgttggaggctggcgacaagcattaccatcctagctgtgctcggtgttcacgctgtaatcagatgttcacagaaggagaagagatgtacctgcaggggtcaaccgtgtggcaccctgactgtaaacaatctacaaagacagaggagaagctacgacctacaaggacatcaagtgaaagcatatactcaagacccggatcctcaatccctggcagtcctggacataccatttacgccaaggtggataatgaaattctcgattataaagatcttgccgctattcctaaagtgaaggctatttatgatattgagcggcctgaccttattacgtatgagcccttttatacctctggttatgacgacaagcaggaaagacagtccctgggcgagagcccacgcaccctgtcccctacaccttctgcagagggataccaggacgtccgggatcgcatgattcatagatccacctcccagggatccattaactcccctgtatactccagacactcttacacgcccacgacatcacgctcaccacagcactttcatcggccaggcaacgagccaagcagcggacgcaactcccccctcccgtatcggcccgactctagacctttgactccaacatacgcacaggcccctaaacactttcacgttccagatcaggggatcaatatctatcgaaaaccacctatatacaagcagcatggacccgatatgaagcgccggtcctcaggacgggaggaggatgacgaagagctgctgcgccgcaggcagctgcaggaagaacagcttatgaaacttaattccggtctcggccagcttatcctgaaagaggagatggaaaaagaaagtcgggagcgcagtagccttctcgcctcccggtatgactctccgatcaactccgctagtcacatcccaagttctaagactgcatctttgcctggctacggccgtaacgggctacacaggcctgtatcaacggatttcgctcaatacaatagctatggggatgtctctggcggcgtgagggattttcagaccttgcctgatggtcacatgcccgctatgcgcatggatcgtggagtttccatgccaaacatgctggagcccaaaatctttccgtatgagatgctaatggtcaccaatcgtgggcgtaacaaaattttgcgagaagtagatcggaccaggctggaacggcatctcgctccggaggtctttagggagatttttggaatgagtatccaggagttcgatcgactgcctctctggcggagaaacgacatgaaaaagaaagcgaagttattctag

SEQ ID NO: 282957 - DNA, 2803 bp, Artificial Sequence
  derived and/or modified sequence
gcaatcatttatcagactgtgggagggggccagcgttcgggagcttttcatagcccgtcctcggtgcgaggaatacaaggtggtgtcagtgaccagagattaggacagtagaattttgcatttgttacagcagcagctgtagcgagtggtttcagccgcagggcagagtccccgagctgggcgcggctgcagctcggcgggcgggcggagaagagcgcgggggcgatagcggggcgggcatgggagcggggcccgccgaggcggggcgggactcgagaccacagccccggacctcacaagcggatgccggggcttctcctggctgccccagcgcccgcggatctgtctgccgaggcgcgcttccactcccagagtttattcctcgttccttcttcagtcctgctcgtcggaggacccggttgccatggtgaaggaaaaagtggcccaccctcaggaccctcaccacccatcagagaagcctgtcattcactgccataaatgtggggagccttgcaagggtgaagtgcttcgggtccagaccaaacatttccacatcaagtgtttcacctgcaaagtgtgtggctgtgacctggcacaagggggcttcttcataaagaacggagagtatctctgcaccctggactaccagcggatgtacgggacacgctgccatggctgtggggagttcgtggagggcgaagtggtgactgctctgggcaagacctaccatcccaattgctttgcttgtactatctgcaagcgcccgtttccacccggagaccgagtcacattcaatgggagagactgcctttgtcaactctgtgcacagccgatgtcgtccagtccgaaagaaaccaccttctccagcaattgtgccggctgcggaagagatatcaagaatgggcaggcgctgctggcgctggataagcagtggcacttggggtgctttaaatgcaagtcctgcgggaaggtcctcaccggggagtacatcagcaaggatggtgctccgtactgtgaaaaggactaccagggactctttggggtgaaatgtgaggcgtgtcaccagtttatcacagggaaagtcctggaggcaggtgacaaacattaccaccccagctgtgcacgatgcagcagatgcaaccagatgttcacagaaggagaggaaatgtatcttcaaggctccaccgtttggcatcccgactgtaagcaatctacgaagaccgaggaaaagctgcggcctaccaggacatcctcggaaagtatttattctaggccaggctccagtattcctggctcaccaggtcatactatctatgcaaaagtagacaatgagatcctggattacaaggatttagcagccattccgaaggtcaaggcaatttatgacattgaacgtccagatcttattacctatgagcctttctacacttcgggctatgatgacaaacaggagagacagagccttggagagtctccgaggactttgtctcctactccatcagcagaagggtaccaggatgttcgggatcggatgatccatcggtccacgagccagggctccatcaactcccctgtgtacagccgccacagctacactccaaccacgtcccgctctccccagcatttccacagacctggcaatgagccgtccagcggccggaactcccctctcccttaccggccagacagccgccctctaactccaacttacgctcaggcccctaaacatttccatgttccagatcaaggaatcaacatttaccgaaagccacccatctacaaacagcatggacctgacatgaaacgcagatctagtggcagagaggaagatgatgaggaacttctgagacgtcggcagcttcaagaagagcaattaatgaagcttaactcaggcctgggacagttgatcttgaaagaagagatggagaaagagagccgggaaaggtcatctctgttagccagtcgctacgattctcccatcaactcagcttcacatattccatcatctaaaactgcatctctccctggctatggaagaaatgggcttcaccggcctgtttctaccgacttcgctcagtataacagctatggggatgtcagcgggggagtgcgagatttccagacactcccagatggccacatgcctgcaatgagaatggaccgaggagtgtctatgcccaacatgttggaaccaaagatatttccatatgaaatgctcatggtgaccaacagagggcgaaacaaaatcctcagagaggtggacagaaccaggctggagcgccacttagcccctgaagtgtttcgggaaatctttggaatgtccatacaggagtttgacaggttacctctttggagacgcaacgacatgaagaaaaaagcaaaactcttctaagtcccactcgtgaatggcaattagagaaaggactgacagtggcggtgccccataggatgtcatattgaggcccaaacttgattggagaatttgcaaactaccgtcgctcagcaacaccaaaaagagaaagtctggttaaaacaccatgagtcaaatgtcgggccagccaacagtaacacttgccaagaagcatggcgtagaaatttctatgttccgaaacacagagtagtgtccacatgtgagcttttcacattaccttatgtatacaacaggagctgcgttgttttcttctttttcttttcctttatctgttgtccaacaacagtgctgactgtccggataagagctggcaagtgcccttaggatgccgcatgggaaaaatcggttatcataatttcaaagtataaatat

SEQ ID NO: 282958 - DNA, 1968 bp, Artificial Sequence
  derived and/or modified sequence
atggtgaaggagaaggtggcccacccccaggacccccaccaccccagcgagaagcctgtgatccactgccacaagtgtggggagccctgcaagggggaggtgctgcgggtgcagaccaagcacttccacatcaagtgcttcacctgcaaggtgtgtggctgtgacctggcccagggcggcttcttcatcaagaatggagagtacctgtgcaccctggactaccagaggatgtatggcacccgctgccacggctgtggggagtttgtggagggggaggtggtgacagccctgggcaagacctaccaccccaactgctttgcctgcaccatctgcaagaggcccttccccccaggggacagagtgaccttcaacggccgggactgcctgtgccagctgtgtgcccagcccatgagcagcagccccaaggagaccaccttcagcagcaactgtgccggctgcggccgggacatcaagaatggccaggccctgctggccctggacaagcagtggcacctgggctgcttcaagtgcaagagctgtgggaaggtgctgactggagagtacatcagcaaggatggagccccctactgtgagaaggactaccagggcctgtttggagtgaagtgtgaggcctgccaccagttcatcaccgggaaggtgctggaggccggggacaagcactaccaccccagctgtgcccgctgcagccgctgcaaccagatgttcacagaaggagaggagatgtacctgcagggcagcacagtgtggcacccagactgcaagcagagcaccaagacagaggagaagctgcggcccaccaggaccagcagcgagagcatctacagccggcccggcagcagcatccctggcagccctggccacaccatctatgccaaggtggacaatgagatcctggactacaaggacctggccgccatccccaaggtgaaggccatctatgacatcgagaggccagacctgatcacctatgagcccttctacaccagcggctatgatgacaagcaggagcggcagagcctgggggagagccccaggaccctgagccccaccccatctgctgagggctaccaggatgtgcgggacaggatgatccacaggagcaccagccagggcagcatcaacagccctgtgtacagccgccacagctacacccccaccaccagccgcagcccccagcacttccacaggcctggaaatgagcccagcagcggcaggaacagccccctgccctacagaccagacagccggcccctgacccccacctacgcccaggcccccaagcacttccacgtgcctgaccagggcatcaacatctacaggaagccacccatctacaagcagcacggccctgacatgaagagaagaagcagcggccgggaggaggatgatgaggagctgctgcggcggcggcagctgcaggaggagcagctgatgaagctgaacagcggcctgggccagctgatcctgaaggaggagatggagaaggagagccgggagaggagcagcctgctggccagccgctatgacagccccatcaacagcgccagccacatccccagcagcaagacagccagcctgcccggctacggcagaaatggcctgcacaggcctgtgtccacagactttgcccagtacaacagctatggagatgtgtctggaggagtgcgggacttccagaccctgcctgatggccacatgcctgccatgaggatggacagaggagtgtccatgcccaacatgctggagcccaagatcttcccctatgagatgctgatggtgaccaacagaggaagaaacaagatcctgcgggaggtggacaggacccggctggagcggcacctggcccctgaggtgttccgggagatcttcggcatgagcatccaggagtttgaccggctgcccctgtggaggagaaatgacatgaagaagaaggccaagctgttctag

SEQ ID NO: 282959 - DNA, 1968 bp, Artificial Sequence
  derived and/or modified sequence
atggtgaaggagaaggtggcccacccccaggacccccaccacccctcagaaaagcccgtgattcattgccataagtgtggggagccctgtaagggggaggtgcttcgcgttcagactaaacattttcacattaagtgcttcacctgcaaagtctgcgggtgcgatctggcacagggtggcttctttataaagaacggcgaatacttgtgtaccctcgattaccagagaatgtatggtactcggtgccacggatgtggggaattcgtcgaaggagaggtggttacggctctaggaaaaacctatcaccccaactgtttcgcttgcaccatttgcaaacgcccctttcctcccggggatcgcgttacctttaatgggagagattgcctctgccagctctgcgctcagcctatgtccagttcaccaaaggaaactacattcagcagcaattgcgcaggatgcggcagggacatcaagaacggccaagcattgctagcactcgacaagcagtggcatttgggctgttttaagtgtaagtcgtgtggtaaagtgcttacaggcgaatatatctccaaggacggcgcaccctattgcgagaaagactaccagggcctatttggagtcaagtgcgaagcttgccaccagttcatcactggcaaagtcctggaggccggcgataagcactatcatcctagctgtgcccgttgttcccgatgtaatcaaatgttcactgagggagaggaaatgtacctccaggggtcgaccgtgtggcatccggactgtaagcaatcaaccaaaactgaggagaaattaaggccaacaagaacaagcagtgaatccatctatagcagacccggttcgtccatcccaggctcccccggtcacactatctatgccaaggtggacaacgagatactcgattacaaggacctggccgcaatccctaaggtgaaagccatctatgacatcgagaggccagacctgatcacctatgaacctttttatacgtctgggtacgacgacaaacaagagcggcagagtctgggcgaaagtcctcgaaccctgtccccgactcccagcgcagagggttaccaggatgtaagggatcggatgattcatcgcagtaccagtcagggctctattaacagtcccgtgtatagtaggcatagctacactcctacgacctcaagaagcccgcagcacttccaccgtcccggcaacgaaccctcctcgggacgcaattcgccactgccttacagacccgatagcaggcccctcaccccaacctacgctcaggcgcctaaacatttccacgtccctgatcagggtatcaatatttatcgcaagccaccgatttacaaacagcacggcccagatatgaaacgacgctcatctggacgagaggaggacgatgaggaactgctgcgtcggcgacaactccaagaggaacagctgatgaagttaaattctggcctggggcagttgattctgaaggaagagatggaaaaagagtcccgtgaacgatccagtttgctcgccagccgctatgactcccccatcaattcggccagtcatatccccagcagcaaaaccgcctccctgccaggttacgggagaaatggcctacatagaccagtcagtaccgattttgcccaatataatagttacggcgatgtgtctggtggcgtcagggacttccagactctcccagacggtcatatgccagccatgcgcatggacaggggagtttctatgccaaatatgcttgagcccaagatctttccgtacgagatgttgatggttacgaatagggggagaaataagatcctgagggaggtggatcgaacgcgtctggaaaggcatctggcccccgaggtcttccgggagattttcggaatgagcatccaggagtttgaccgcttgcccctgtggcgccgcaatgatatgaagaagaaagcgaagctgttctag

SEQ ID NO: 282960 - DNA, 1968 bp, Artificial Sequence
  derived and/or modified sequence
atggtcaaagagaaggtagcccacccacaggacccccatcacccatctgaaaaacccgtcatccattgccacaagtgtggggagccgtgcaaaggcgaagttctcagagtgcagacaaagcactttcacatcaaatgctttacgtgtaaagtgtgcggatgtgatctcgctcaggggggtttcttcattaaaaatggtgagtacttgtgcaccctggattaccaacgcatgtacggcactcggtgccatggttgtggagagtttgtggaaggcgaggtcgtgacagcacttggcaagacttatcaccccaactgcttcgcctgcactatctgtaagaggcccttccctcctggggatcgtgtaactttcaacggccgtgactgcctgtgtcagctctgcgcccagcccatgagctcatcacccaaagagaccacattctcaagtaactgtgcgggatgtggaagggacatcaagaatggccaggccctgttagcgctggataagcagtggcatctgggatgctttaagtgcaaaagctgcggaaaagtattaactggagagtacatctccaaggacggagcaccctactgtgagaaagactatcaggggcttttcggcgttaaatgcgaggcatgtcaccagttcatcaccggcaaggtcttagaagcaggcgacaagcattaccacccaagttgcgccagatgcagccgctgcaaccagatgttcaccgaaggcgaggagatgtatcttcaaggctccacagtgtggcaccctgactgtaagcagagcactaaaactgaagaaaagctaaggccaactcggacttcctcagaatccatctattccaggccaggaagcagcattcctggctcccctggacataccatctacgccaaggttgacaacgagatccttgactacaaggacttagcagctatcccaaaagtcaaagctatatacgacattgagcgacccgacctgatcacatatgaacccttctatactagcggctatgacgacaaacaggaaagacagtccctaggagagtccccccgaacattgtccccaacaccgagcgccgaggggtatcaggatgtgcgcgaccgtatgatccaccgttccaccagtcagggaagcatcaactcgccggtatactctcgacactcgtatacacccacaacatctcggtcaccccagcactttcatcggcctggtaatgaaccaagctccggcagaaatagccccctgccgtaccgacccgactctcggcctttaacaccaacttatgcccaagccccaaagcattttcacgtgccggaccaggggatcaatatctacaggaagcctccaatctataagcagcacgggccagacatgaagcgcagaagttctggccgagaagaagatgatgaggagctgctgcgcagacgacagctacaagaagaacagctcatgaaactgaactcgggactaggtcagctgatactcaaggaggaaatggagaaagagagtcgcgagcgctcttctttgttggcgtcacgctacgattctccaatcaattctgcctctcatatcccgtcttctaaaaccgctagcttgcccggatatggccgaaacggcctgcatcgtccagtgtctacagacttcgcccagtacaacagttacggggacgtgagcggaggtgtgagggatttccagaccctgcccgatggccacatgcccgcaatgaggatggatcgcggtgtcagcatgccaaatatgctggagcctaagatatttccatatgagatgttaatggtgacgaatcgcggtagaaacaagattttgcgagaagttgacagaacccggctggaacgccaccttgccccagaagtttttagagagatctttggcatgtcgattcaggagttcgaccgactcccattgtggcgccgtaacgacatgaagaagaaagcaaagcttttctag

SEQ ID NO: 282961 - protein, 172 aa, Artificial Sequence
  derived and/or modified sequence
CKQSTKTEEKLRPTRTSSESIYSRPGSSIPGSPGHTIYAKVDNEILDYKDLAAIPKVKAIYDIERPDLITYEPFYTSGYDDKQERQSLGESPRTLSPTPSAEGYQDVRDRMIHRSTSQGSINSPVYSRHSYTPTTSRSPQHFHRPDQGINIYRKPPIYKQHVLFEVILLLLI

SEQ ID NO: 282962 - DNA, 1206 bp, Artificial Sequence
  derived and/or modified sequence
atgttcaccgagggcgaggagatgtacctgcagggcagcaccgtgtggcaccccgactgcaagcagagcaccaagaccgaggagaagctgagagccaaggtggacaacgagatcctggactacaaggacctggccgccatccccaaggtgaaggccatctacgacatcgagagacccgacctgatcacctacgagcccttctacaccagcggctacgacgacaagcaggagagacagagcctgggcgagagccccagaaccctgagccccacccccagcgccgagggctaccaggacgtgagagacagaatgatccacagaagcaccagccagggcagcatcaacagccccgtgtacagcagacacagctacacccccaccaccagcagaagcccccagcacttccacagacccgaccagggcatcaacatctacagaaagccccccatctacaagcagcacgccgccctggccgcccagagcaagagcagcgaggacatcatcaagttcagcaagttccccgccgcccaggcccccgaccccagcgagacccccaagatcgagaccgaccactggcccggcccccccagcttcgccgtggtgggccccgacatgaagagaagaagcagcggcagagaggaggacgacgaggagctgctgagaagaagacagctgcaggaggagcagctgatgaagctgaacagcggcctgggccagctgatcctgaaggaggagatggagaaggagagcagagagagaagcagcctgctggccagcagatacgacagccccatcaacagcgccagccacatccccagcagcaagaccgccagcctgcccggctacggcagaaacggcctgcacagacccgtgagcaccgacttcgcccagtacaacagctacggcgacgtgagcggcggcgtgagagactaccagaccctgcccgacggccacatgcccgccatgagaatggacagaggcgtgagcatgcccaacatgctggagcccaagatcttcccctacgagatgctgatggtgaccaacagaggcagaaacaagatcctgagagaggtggacagaaccagactggagagacacctggcccccgaggtgttcagagagatcttcggcatgagcatccaggagttcgacagactgcccctgtggagaagaaacgacatgaagaagaaggccaagctgttctag

SEQ ID NO: 282963 - DNA, 1206 bp, Artificial Sequence
  derived and/or modified sequence
atgtttaccgaaggggaagaaatgtacctacagggctccactgtgtggcatccagattgtaagcagtcaaccaagaccgaagaaaaattaagggccaaagtcgacaacgaaattttggactataaagacctcgccgcgatcccaaaagtgaaagccatttatgatattgagcgtccagatttgatcacctatgagcccttctacacatccgggtacgatgacaagcaggaacggcagtctctgggagaatcgccgcggacactgtcccccacgccgagtgctgaaggataccaagacgttcgcgacaggatgattcacaggagcacctctcaggggagcattaattcccctgtgtattcgcgacattcctacacccccaccacgagtcgatcaccgcagcattttcaccggccagaccagggcattaatatttaccgaaaaccccccatctacaagcaacacgcagctctagcagcccaatctaaaagcagcgaggatattataaaattttccaaattcccagcggcacaagcccccgacccgtccgagaccccaaaaattgaaaccgatcactggcccggaccgcccagcttcgcagtggtcgggcctgatatgaaacggagatcttccgggcgagaggaggatgacgaggaactgctaagaaggaggcaattgcaggaggagcagctgatgaaactaaacagtggattgggccaactgattctgaaggaagaaatggagaaagaaagcagagagcgctcaagtctattagcctcccgttacgactcaccaatcaacagtgcaagtcacattcctagtagcaagaccgcctctctgcccggctatggccgcaacggactgcatagacccgtgtccactgattttgcgcagtacaactcttacggcgacgtttcgggcggcgtgcgcgattatcagactctcccggacggacacatgcctgcaatgcgaatggatcggggcgtgtcaatgcccaatatgcttgagccgaagatcttcccctacgaaatgctgatggtgacaaaccgaggccgcaataaaatccttcgcgaagttgacaggacacgcctggaaaggcacctggcacccgaggtttttcgtgagattttcggaatgtcaatccaggaattcgacagactgcccttatggaggcgcaacgatatgaagaaaaaagccaaattgttctag

SEQ ID NO: 282964 - DNA, 1206 bp, Artificial Sequence
  derived and/or modified sequence
atgttcacagaaggagaggagatgtacctgcagggcagcacagtgtggcacccagactgcaagcagagcaccaagacagaggagaagctgcgggccaaggtggacaatgagatcctggactacaaggacctggccgccatccccaaggtgaaggccatctatgacatcgagaggccagacctgatcacctatgagcccttctacaccagcggctatgatgacaagcaggagcggcagagcctgggggagagccccaggaccctgagccccaccccatctgctgagggctaccaggatgtgcgggacaggatgatccacaggagcaccagccagggcagcatcaacagccctgtgtacagccgccacagctacacccccaccaccagccgcagcccccagcacttccacaggccagaccagggcatcaacatctacaggaagccacccatctacaagcagcacgccgccctggccgcccagagcaagagcagcgaggacatcatcaagttcagcaagtttcctgctgcccaggccccagaccccagcgagacccccaagattgaaacagaccactggccaggccccccatcctttgctgtggtgggccctgacatgaagagaagaagcagcggccgggaggaggatgatgaggagctgctgcggcggcggcagctgcaggaggagcagctgatgaagctgaacagcggcctgggccagctgatcctgaaggaggagatggagaaggagagccgggagaggagcagcctgctggccagccgctatgacagccccatcaacagcgccagccacatccccagcagcaagacagccagcctgcccggctacggcagaaatggcctgcacaggcctgtgtccacagactttgcccagtacaacagctatggagatgtgtctggaggagtgcgggactaccagaccctgcctgatggccacatgcctgccatgaggatggacagaggagtgtccatgcccaacatgctggagcccaagatcttcccctatgagatgctgatggtgaccaacagaggaagaaacaagatcctgcgggaggtggacaggacccggctggagcggcacctggcccctgaggtgttccgggagatcttcggcatgagcatccaggagtttgaccggctgcccctgtggaggagaaatgacatgaagaagaaggccaagctgttctag

SEQ ID NO: 282965 - DNA, 1206 bp, Artificial Sequence
  derived and/or modified sequence
atgttcaccgagggcgaggagatgtacctgcagggcagcaccgtgtggcatcccgattgcaaacaatccacaaaaacggaggaaaaactaagagctaaagtggataacgagatattagactacaaggatttagccgccatccccaaggtgaaggctatatatgacattgaaagaccggatctaattacctacgaaccattttatacctccgggtacgacgacaagcaggagagacaatctctgggagagagcccccggacactgagtcctacgccttcagccgagggctatcaggacgtccgggaccgtatgatccacaggtctacgagtcaaggaagcattaacagccctgtgtacagccggcacagctatactcctacgacgagccgcagtccgcagcacttccaccgcccagatcagggaattaacatatacaggaagcccccaatctataaacagcatgccgccctcgctgcgcagagtaaatccagtgaggacatcattaaattctccaagtttccagcagctcaagcccccgacccgtctgaaacgcctaagatagagacggaccactggcccggaccacctagtttcgccgttgtgggcccggatatgaaaaggaggtccagcggtcgggaggaggatgacgaggaattgttaagaaggcgccagctgcaggaagagcagctgatgaagctcaactctggcctcggccagttgatacttaaggaagaaatggaaaaagaatcaagggagaggagctcattgctggctagcagatatgattccccgatcaattcagcatcacatattccaagctccaaaaccgcctcgcttcctggatacgggcgaaatgggctccaccggcccgtgagcaccgacttcgcgcaatacaattcctacggggatgtgtctggaggggtacgggattatcagaccctccccgacggacacatgcccgccatgagaatggacagaggcgttagcatgccgaatatgctggaacctaaaatttttccatacgagatgcttatggtgacaaaccgaggccgcaataagatcctcagagaggtggatagaacaaggctggagagacacctcgcccctgaagtgttccgggaaatttttggcatgagtattcaggaattcgatcgcctgcctctgtggcggcgaaacgacatgaagaagaaagccaaactgttctag

SEQ ID NO: 282966 - DNA, 1206 bp, Artificial Sequence
  derived and/or modified sequence
atgttcaccgagggagaagagatgtatctgcagggtagtaccgtgtggcaccctgattgcaagcagagcaccaagacagaggagaagctccgggctaaggtggataacgagatcctggattataaggatttggccgctatcccaaaagtgaaggcaatctatgacatcgaaagacccgatcttattacctacgaaccattttacacaagcggctatgatgacaaacaagagaggcagtcattgggagagtccccccgaacacttagccctacgcctagcgcggagggttatcaggacgtgagggacaggatgatacaccgtagtacgtcccagggtagcatcaacagccctgtgtactctcggcattcatatacccccactacaagcaggagcccgcagcacttccaccgacccgatcagggcattaacatctacaggaagccacccatctacaaacagcacgctgcactcgcagcccagtctaaatcatctgaggacattatcaagttctctaagtttcccgctgcgcaggcgccagatccctctgaaacccccaaaatcgaaaccgaccattggcccggaccccctagcttcgctgtagttggacccgacatgaaaaggcggtctagtggacgcgaagaggatgacgaagagttgctgcgcaggaggcagctacaggaggagcagctcatgaagcttaactctggcctggggcagcttatcttgaaggaggaaatggagaaggagagtagagaacggagctctctcctcgcctctcggtacgattcacctattaactccgcatctcacatcccgtcttcaaagactgcgtcgctgcccggatacggcaggaatgggctgcacagacccgtgagtaccgattttgctcagtacaactcatatggtgatgtgtcaggcggagttcgggactatcagacattaccagatggccacatgccagctatgagaatggatagaggtgtaagcatgccaaacatgctggaaccaaaaatattcccgtatgagatgctgatggtcacaaacaggggcaggaacaagatcctcagggaagtggatcggacaagacttgagcgtcatctggctcccgaggtgttccgcgaaatctttggcatgagtatccaggaatttgacagacttcctctctggaggcgcaatgatatgaagaagaaagcgaagctcttctag

SEQ ID NO: 282967 - DNA, 522 bp, Artificial Sequence
  derived and/or modified sequence
atgttcaccgagggcgaggagatgtacctgcagggcagcaccgtgtggcaccccgactgcaagcagagcaccaagaccgaggagaagctgagacccaccagaaccagcagcgagagcatctacagcagacccggcagcagcatccccggcagccccggccacaccatctacgccaaggtggacaacgagatcctggactacaaggacctggccgccatccccaaggtgaaggccatctacgacatcgagagacccgacctgatcacctacgagcccttctacaccagcggctacgacgacaagcaggagagacagagcctgggcgagagccccagaaccctgagccccacccccagcgccgagggctaccaggacgtgagagacagaatgatccacagaagcaccagccagggcagcatcaacagccccgtgtacagcagacacagctacacccccaccaccagcagaagcccccagcacttccacagacccgaccagggcatcaacatctacagaaagtag

SEQ ID NO: 282968 - DNA, 519 bp, Artificial Sequence
  derived and/or modified sequence
tgcaagcagagcaccaagaccgaggagaagctgagacccaccagaaccagcagcgagagcatctacagcagacccggcagcagcatccccggcagccccggccacaccatctacgccaaggtggacaacgagatcctggactacaaggacctggccgccatccccaaggtgaaggccatctacgacatcgagagacccgacctgatcacctacgagcccttctacaccagcggctacgacgacaagcaggagagacagagcctgggcgagagccccagaaccctgagccccacccccagcgccgagggctaccaggacgtgagagacagaatgatccacagaagcaccagccagggcagcatcaacagccccgtgtacagcagacacagctacacccccaccaccagcagaagcccccagcacttccacagacccgaccagggcatcaacatctacagaaagccccccatctacaagcagcacgtgctgttcgaggtgatcctgctgctgctgatctag

SEQ ID NO: 282969 - DNA, 522 bp, Artificial Sequence
  derived and/or modified sequence
atgtttaccgaaggtgaagagatgtacctgcaggggtcaacagtttggcatcccgactgtaagcaaagtaccaagactgaagagaaactgagaccaactcggacctcctccgagagtatctacagccggccaggcagctccattcccgggagtcccggtcataccatctatgccaaggtggacaacgagattctggactacaaggacttggccgcgatcccgaaagtgaaggcaatctacgacatcgagcgtcctgacctcattacatacgagcccttctatacgagtggctatgatgataagcaagagaggcagtccttgggcgagtccccgaggacactgtccccgacacccagtgcggagggatatcaggacgtccgggatcggatgatccacagaagcacctcacagggctccatcaacagcccagtttacagtagacactcctacacacccaccacatcaagatccccacaacactttcatagaccggaccaaggcatcaacatctaccgcaagtag

SEQ ID NO: 282970 - DNA, 519 bp, Artificial Sequence
  derived and/or modified sequence
tgcaagcaaagtacaaagactgaagagaagctgaggccaactcggacatcatcggagagtatatattcccgaccaggcagcagtattcctggatcacctgggcacactatctacgctaaggtggacaacgagattctcgattataaagacttggccgccattccaaaggtcaaagccatctatgatatagaacgtcccgacctgattacttacgaacccttttacacctctgggtacgacgataaacaggaacgacagagccttggcgagtctccgcgcaccctctctccaacccccagcgcagagggctaccaagacgttagggatcggatgatacatcgctctacatcccaaggcagtattaactcaccagtgtattctaggcactcatatacacctacaaccagtcgctccccgcagcatttccacagacccgaccagggtatcaatatttacagaaagccccccatctacaagcagcacgtgctgttcgaagtgatcctcctgctgcttatttag

SEQ ID NO: 282971 - DNA, 522 bp, Artificial Sequence
  derived and/or modified sequence
atgttcacagaaggagaggagatgtacctgcagggcagcacagtgtggcacccagactgcaagcagagcaccaagacagaggagaagctgcggcccaccaggaccagcagcgagagcatctacagccggcccggcagcagcatccctggcagccctggccacaccatctatgccaaggtggacaatgagatcctggactacaaggacctggccgccatccccaaggtgaaggccatctatgacatcgagaggccagacctgatcacctatgagcccttctacaccagcggctatgatgacaagcaggagcggcagagcctgggggagagccccaggaccctgagccccaccccatctgctgagggctaccaggatgtgcgggacaggatgatccacaggagcaccagccagggcagcatcaacagccctgtgtacagccgccacagctacacccccaccaccagccgcagcccccagcacttccacaggccagaccagggcatcaacatctacaggaagtag

SEQ ID NO: 282972 - DNA, 519 bp, Artificial Sequence
  derived and/or modified sequence
tgcaagcagagcaccaagacagaggagaagctgcggcccaccaggaccagcagcgagagcatctacagcaggcctggcagcagcatccctggcagccctggccacaccatctatgccaaggtggacaatgagatcctggactacaaggacctggccgccatccccaaggtgaaggccatctatgacatcgagaggccagacctgatcacctatgagcccttctacaccagcggctatgatgacaagcaggagcggcagagcctgggggagagccccaggaccctgagccccacccccagcgctgagggctaccaggatgtgcgggacaggatgatccacaggagcaccagccagggcagcatcaacagccctgtgtacagccgccacagctacacccccaccaccagccgcagcccccagcacttccacaggccagaccagggcatcaacatctacaggaagccacccatctacaagcagcacgtgctgtttgaggtgatcctgctgctgctgatctag

SEQ ID NO: 282973 - DNA, 522 bp, Artificial Sequence
  derived and/or modified sequence
atgttcaccgagggcgaggagatgtacctgcagggcagcaccgtgtggcatcctgattgcaagcagagtacaaagaccgaggaaaagcttagacccaccagaacatctagtgagtctatctacagccgtccagggtctagcatacccggctcccctggccatacgatctacgccaaggttgacaatgaaatcctggattataaggacctggccgcaataccgaaagtcaaggctatatacgatattgagcggccagatctgattacctacgagcctttttacaccagcggctatgatgataaacaggaaagacaatcgctgggggaatctcccagaaccctgtcaccaaccccgagcgccgaagggtaccaagacgtgagagacagaatgattcatcgcagtacaagtcagggcagtatcaacagtccggtctactcaaggcacagttacacacccacaacaagtcgttctcctcaacattttcatcgtccggatcagggtattaatatttacagaaaatag

SEQ ID NO: 282974 - DNA, 519 bp, Artificial Sequence
  derived and/or modified sequence
tgcaagcagagcaccaagaccgaggagaagctgcggcccacccggactagcagtgaatccatatattcccggccaggctcttcaatccccggctccccagggcatactatctacgccaaggttgacaacgaaattctcgactataaggacctcgcagccattcctaaggttaaggctatctacgatatcgaaaggccggaccttattacctacgaacccttttatacatctggctatgacgataagcaagaaagacagagtctcggagagtcaccccgcacgctgagccccaccccttcagccgaaggctaccaggacgtaagagatcgcatgatacaccgtagcacctctcagggctctatcaatagcccagtctattcacgccattcttatactccaaccacctcgagaagtcctcagcacttccatagacctgaccagggcataaatatctaccgtaagccacctatctataagcaacatgtactgtttgaggtcatcctgttgctgctgatctag

SEQ ID NO: 282975 - DNA, 522 bp, Artificial Sequence
  derived and/or modified sequence
atgttcactgagggggaggaaatgtacctccaggggagtaccgtttggcatccggattgcaaacagtccactaaaacagaggagaagttgaggcctactagaacctcctctgaatctatctacagtaggccgggttccagcattcccggttcccccggtcatacaatctacgccaaagttgacaatgagatcctcgactataaagacctcgcagctattcccaaagttaaggctatctacgacattgagcgccctgacctcattacctacgagcccttctatacttcaggatatgatgacaagcaggagcgccaatctctgggcgagtcccccagaacgctgtcccccactccgtctgctgagggctaccaagacgtgagagatcgtatgattcaccgaagtacctcccagggctcaatcaactccccagtctacagccgtcatagctacacacctaccacctcgcgatctccccagcacttccaccggcctgaccagggcatcaacatttaccgcaagtag

SEQ ID NO: 282976 - DNA, 519 bp, Artificial Sequence
  derived and/or modified sequence
tgcaagcaatccacgaagaccgaggaaaagcttagaccaactcggacctcatctgaatctatatatagcagacccggtagctccatccccggaagtccagggcacactatttatgcgaaagtggataatgagatactggattataaggacctggcagccatccctaaggtaaaggccatatacgacatcgagcggcctgatctgatcacctatgagcccttttatacctccggctacgatgataagcaagaacgccagtctcttggagaaagtccgagaactctttccccaactccaagtgcagaaggctaccaggacgtgcgggataggatgatccaccggtcaacatctcaggggtctattaattcacccgtctactcacgccatagttatacacctacaacatcaagatcccctcagcactttcatagacccgatcagggaattaacatatacagaaagcctcccatatacaaacagcacgtgctattcgaagtgatcctgctcttgctaatttag

SEQ ID NO: 282977 - DNA, 541 bp, Artificial Sequence
  derived and/or modified sequence
tgtaagcaatctacgaagaccgaggaaaagctgcggcctaccaggacatcctcggaaagtatttattctaggccaggctccagtattcctggctcaccaggtcatactatctatgcaaaagtagacaatgagatcctggattacaaggatttagcagccattccgaaggtcaaggcaatttatgacattgaacgtccagatcttattacctatgagcctttctacacttcgggctatgatgacaaacaggagagacagagccttggagagtctccgaggactttgtctcctactccatcagcagaagggtaccaggatgttcgggatcggatgatccatcggtccacgagccagggctccatcaactcccctgtgtacagccgccacagctacactccaaccacgtcccgctctccccagcatttccacagacctgatcaaggaatcaacatttaccgaaagccacccatctacaaacagcatgtactgtttgaagtcatccttttgttgttaatttaagaataaaattctcagcatttga

SEQ ID NO: 282978 - protein, 395 aa, Artificial Sequence
  derived and/or modified sequence
MNGPVDGLCDHSLSEGVFMFTSESVGEGHPDKICDQISDAVLDAHLKQDPNAKVACETVCKTGMVLLCGEITSMAMVDYQRVVRDTIKHIGYDDSAKGFDFKTCNVLVALEQQSPDIAQCVHLDRNEEDVGAGDQGLMFGYATDETEECMPLTIILAHKLNARMADLRRSGLLPWLRPDSKTQVTVQYMQDNGAVIPVRIHTIVISVQHNEDITLEEMRRALKEQVIRAVVPAKYLDEDTVYHLQPSGRFVIGGPQGDAGVTGRKIIVDTYGGWGAHGGGAFSGKDYTKVDRSAAYAARWVAKSLVKAGLCRRVLVQVSYAIGVAEPLSISIFTYGTSQKTERELLDVVHKNFDLRPGVIVRDLDLKKPIYQKTACYGHFGRSEFPWEVPRKLVF

SEQ ID NO: 282979 - DNA, 1188 bp, Artificial Sequence
  derived and/or modified sequence
atgaatggccctgtggacggcctttgtgatcattccctgtccgaaggggtgttcatgttcacttctgagtcagtcggcgaggggcatcctgacaagatttgtgatcagataagcgacgccgtgctggacgcccatctcaagcaagatcctaacgcaaaggttgcttgtgaaactgtgtgtaagacaggtatggtcctactgtgcggagagatcacatcaatggccatggtggattatcagcgcgtcgttagggacaccatcaagcacataggctacgacgactccgcaaagggattcgatttcaaaacctgcaatgtcctggtcgccttggaacagcaatcccccgacatcgcccagtgcgtgcatcttgatcggaatgaagaagacgtgggtgctggggaccaaggacttatgtttggttatgccactgatgaaacggaggagtgtatgccactgacaatcatcctggctcataaactcaacgcacggatggctgatttacgaagatctggactgttaccctggctccggcctgacagcaagacccaggtgacagtgcagtacatgcaagacaacggcgcagtcatccctgttcgaatccacacaatcgtgatttcagttcaacacaacgaggacatcacgctggaggaaatgcgccgagcactgaaggagcaggtcattagagctgtggtgccagcaaaatacttggacgaagatacagtctaccacctccagccatcggggcgattcgttatcggcggcccccagggagatgcaggtgtgaccggcaggaaaataattgttgacacatacggcggatggggtgcacacggaggcggggcattcagcggtaaggattatactaaagtcgacaggtcagctgcctacgctgccagatgggtggccaagtccctggtcaaggccggactgtgccgacgggtgctggtacaggtgtcatatgctatcggggtggctgagccactgtccattagcatctttacttacggtacttcccaaaaaaccgaaagggaactgctggacgttgtgcacaaaaatttcgacctccgacctggcgtaattgttcgagatctggatttaaaaaagcctatctaccagaagactgcctgctacggacatttcggacgaagcgagttcccatgggaagtcccgcgcaaactggtattctag

SEQ ID NO: 282980 - DNA, 1188 bp, Artificial Sequence
  derived and/or modified sequence
atgaatggacccgtggatggtctgtgcgaccatagcctttcggaaggcgtatttatgttcacttcagaatccgtgggcgagggccatcccgacaagatctgtgatcagatttccgatgccgttctggatgcacatctgaaacaagatcccaacgctaaggtagcatgtgaaacagtttgcaagacaggcatggtcctgctctgcggcgaaataaccagcatggctatggtggactaccagcgggtcgtgcgggacacgataaaacacataggctacgatgacagtgcaaagggctttgacttcaagacatgcaacgtcctcgttgccctcgaacagcagtcgcctgatatagcccagtgtgtgcaccttgataggaacgaggaggacgtgggcgccggcgaccagggactgatgtttggctacgcaacggatgagacagaagaatgcatgcctctgacaatcatactggcccataagttgaacgcacgtatggcggatcttcgacgatcaggacttctgccctggttgcgtccggattccaagacgcaggtgactgtccaatacatgcaagacaacggagctgtcattcctgtgagaattcataccatcgtcatctcagttcagcataacgaggacatcactcttgaagagatgagacgggccttgaaggaacaggtcattagggcggttgtccccgccaagtatcttgatgaggacacagtttaccacctgcagccttccggaaggttcgtcattggaggacctcagggagacgctggtgtaaccggtagaaagattattgtggacacctacggcggatggggggctcacggcggtggcgcattctcaggcaaagactatactaaggtcgaccgctcagccgcttacgccgctcggtgggtagccaaaagtttggttaaggcgggtttgtgccggcgagtgctggtccaagtctcttatgctatcggagtcgccgagccattatcgatctccatttttacttatggtacttctcagaaaactgagcgcgaattattggatgtcgttcacaagaattttgatctaagacctggtgtgattgtgcgtgatctggatcttaagaagccaatatatcaaaagaccgcatgctatggacacttcggccggtcagaatttccatgggaagtgcctcgcaagttagtgttctag

SEQ ID NO: 282981 - DNA, 1188 bp, Artificial Sequence
  derived and/or modified sequence
atgaatggacctgtggatggcctgtgtgaccacagcctgtctgagggcgtcttcatgttcaccagcgagagcgtgggggagggccacccagacaagatctgtgaccagatcagtgatgctgtgctggatgcccacctgaagcaggaccccaatgccaaggtggcctgtgagaccgtgtgcaagacaggcatggtgctgctgtgtggggagatcacctccatggccatggtggactaccagagggtggtgcgggacaccatcaagcacatcggctatgatgattctgccaagggctttgacttcaagacctgcaatgtgctggtggccctggagcagcagagcccagacatcgcccagtgtgtgcacctggacagaaatgaggaggatgtgggcgctggggaccagggcctgatgtttggctacgccacagatgaaacagaggagtgcatgcccctgaccatcatcctggcccacaagctgaatgccaggatggctgacctgcggcgcagcggcctgctgccctggctgcggccagacagcaagacccaggtgacagtgcagtacatgcaggacaacggggccgtcatccctgtgcgcatccacaccatcgtcatctctgtgcagcacaatgaagacatcaccctggaggagatgagaagagccctgaaggagcaggtgatccgggctgtggtgcctgccaagtacctggatgaggacacagtgtaccacctgcagcccagcggccgcttcgtcatcggcggcccccagggagatgctggggtgacaggcaggaagatcatcgtggacacctatggaggctggggcgcccatggaggaggagccttcagcggcaaggactacaccaaggtggacagatctgctgcctatgctgcccgctgggtggccaagagcctggtgaaggccggcctgtgccggcgggtgctggtgcaggtgtcctatgccatcggcgtggccgagcccctgagcatcagcatcttcacctacggcaccagccagaagacagagcgggagctgctggatgtggtgcacaagaactttgacctgcggcctggggtcatcgtgcgggacctggacctgaagaagcccatctaccagaagacagcctgctacggccacttcggccgctctgagttcccctgggaggtgcccaggaagctggtgttctag

SEQ ID NO: 282982 - DNA, 1654 bp, Artificial Sequence
  derived and/or modified sequence
aaagacaagcctgttgggttgaaagaagaagaagaagaagaaaaaaaaactcaggcaaagtcacagcctcaaaattgttcactgaaagaagcgtgagtggagaagtgtgagaagatgaatggaccggtggatggcttgtgtgaccactctctaagtgaaggagtcttcatgttcacatcggagtctgtgggagagggacacccggataagatctgtgaccagatcagtgatgcagtgctggatgcccatctcaagcaagaccccaatgccaaggtggcctgtgagacagtgtgcaagaccggcatggtgctgctgtgtggtgagatcacctcaatggccatggtggactaccagcgggtggtgagggacaccatcaagcacatcggctacgatgactcagccaagggctttgacttcaagacttgcaacgtgctggtggctttggagcagcaatccccagatattgcccagtgcgtccatctggacagaaatgaggaggatgtgggggcaggagatcagggtttgatgttcggctatgctaccgacgagacagaggagtgcatgcccctcaccatcatccttgctcacaagctcaacgcccggatggcagacctcaggcgctccggcctcctcccctggctgcggcctgactctaagactcaggtgacagttcagtacatgcaggacaatggcgcagtcatccctgtgcgcatccacaccatcgtcatctctgtgcagcacaacgaagacatcacgctggaggagatgcgcagggccctgaaggagcaagtcatcagggccgtggtgccggccaagtacctggacgaagacaccgtctaccacctgcagcccagtgggcggtttgtcatcggaggtccccagggggatgcgggtgtcactggccgtaagattattgtggacacctatggcggctggggggctcatggtggtggggccttctctgggaaggactacaccaaggtagaccgctcagctgcatatgctgcccgctgggtggccaagtctctggtgaaagcagggctctgccggagagtgcttgtccaggtttcctatgccattggtgtggccgagccgctgtccatttccatcttcacctacggaacctctcagaagacagagcgagagctgctggatgtggtgcataagaacttcgacctccggccgggcgtcattgtcagggatttggacttgaagaagcccatctaccagaagacagcatgctacggccatttcggaagaagcgagttcccatgggaggttcccaggaagcttgtattttagagccagggggagctgggcctggtctcaccctggaggcacctggtggccatgctcctcttccccagacgcctggctgctgatcgccttccccacccaccaaccctcagggcaaagccaggtccctctcatttagcctgtcctgtcatcatcatggccagctggaggcaggggcttcctggtgctggaggttggatcttgatgtaaggatgggcatggtgttctcctgctgctccctcagactggggcaatgttaatttagtggaaaaggcacccccgtcaagagtgaattccctcactcgtctcccccaacagctggaccctgaggttactggaaattaggggattaacccac

SEQ ID NO: 282983 - DNA, 3410 bp, Artificial Sequence
  derived and/or modified sequence
atataggagtcgctcaggagcaagctgtggcaagctggagggagggacacatcccgtgttccatccactccctcccttctcagcagtcctcgcctgttctcacgtgctcacaggcagttaggcagaagtgatccccgtggctctgccaaagacaagcctgttgggttgaaagaagaagaagaagaagaaaaaaaaactcaggcaaagtcacagcctcaaaattgttcactgaaagaagcgtgagtggagaagtgtgagaagatgaatggaccggtggatggcttgtgtgaccactctctaagtgaaggagtcttcatgttcacatcggagtctgtgggagagggacacccggataagatctgtgaccagatcagtgatgcagtgctggatgcccatctcaagcaagaccccaatgccaaggtggcctgtgagacagtgtgcaagaccggcatggtgctgctgtgtggtgagatcacctcaatggccatggtggactaccagcgggtggtgagggacaccatcaagcacatcggctacgatgactcagccaagggctttgacttcaagacttgcaacgtgctggtggctttggagcagcaatccccagatattgcccagtgcgtccatctggacagaaatgaggaggatgtgggggcaggagatcagggtttgatgttcggctatgctaccgacgagacagaggagtgcatgcccctcaccatcatccttgctcacaagctcaacgcccggatggcagacctcaggcgctccggcctcctcccctggctgcggcctgactctaagactcaggtgacagttcagtacatgcaggacaatggcgcagtcatccctgtgcgcatccacaccatcgtcatctctgtgcagcacaacgaagacatcacgctggaggagatgcgcagggccctgaaggagcaagtcatcagggccgtggtgccggccaagtacctggacgaagacaccgtctaccacctgcagcccagtgggcggtttgtcatcggaggtccccagggggatgcgggtgtcactggccgtaagattattgtggacacctatggcggctggggggctcatggtggtggggccttctctgggaaggactacaccaaggtagaccgctcagctgcatatgctgcccgctgggtggccaagtctctggtgaaagcagggctctgccggagagtgcttgtccaggtttcctatgccattggtgtggccgagccgctgtccatttccatcttcacctacggaacctctcagaagacagagcgagagctgctggatgtggtgcataagaacttcgacctccggccgggcgtcattgtcagggatttggacttgaagaagcccatctaccagaagacagcatgctacggccatttcggaagaagcgagttcccatgggaggttcccaggaagcttgtattttagagccagggggagctgggcctggtctcaccctggaggcacctggtggccatgctcctcttccccagacgcctggctgctgatcgccttccccacccaccaaccctcagggcaaagccaggtccctctcatttagcctgtcctgtcatcatcatggccagctggaggcaggggcttcctggtgctggaggttggatcttgatgtaaggatgggcatggtgttctcctgctgctccctcagactggggcaatgttaatttagtggaaaaggcacccccgtcaagagtgaattccctcactcgtctcccccaacagctggaccctgaccagctccccctccctccccttgcctgtgccaggtgaggtcagcacatctcaacaggcctcagggctccttgtgggcctgggctcctggacccccctttcacaggcagccagtgccctgagccagggtctccagaaagccccacccaggccaggcatgtggcaggggttagagcaggactgatgtctcctaagcacctgtaatgtgcgagggacccagctaataactgatctcgttttttcttcactgcaacatgatgaggtagtaccttttatatcccatttatagatgggggaaagcaaagcacagagagtctggataacttccacagggtcccacagccacgtgtttagacctagatgtataactaggagctttgactcaggagcctgtgacataccccctcccccaccgttgtctcatgccagtaacaggctcaaacaatgacaaagcagattcagaaatgaggccatggactctgtcctgaaggcctgaggttactggaaattaggggattaacccactagctcttgttgagccgtgggcaattgtctgaaaagtgaagacagaaccacagggctattttgtttgcttcatgtgtcccagaagatgactgagggtgagttggcttacctggcccatcagggtaggctggagttagggactgaccagcagctttagaatcccagccccctgaccactcagagacatgcagagattgggtttttggacttctggggtaagtggtctaagtccagtccagtcctatctgggcttcctggagcagaagcagcaacttgtcctagcacagatggccagccccttagacagaggccctcaagtctttctctttccctggtcccttgtatcccctgcaggctgagtgcatttggagggagtgagtggccctttcggatccagggaggctggtcctatggcctcatgttaaataggcggggcttgccttctggtgttggacaagcttctgagacgtcatgaggagattctgcctttgccaggtgactgtctggggagcgggtctgctcccaaggggcctgagcagtccttggcctgctaaggtcttggaacttgcctgcctttccatccatggccagcagcacctgccctacctgccccacttgtccttagcctggacctctgacagcagcatctctaccttctccccagctcccaggaccacaggctcaggcaggggcctccatgggccccaggggaacactggggacttggcctctctctagggtacatggtgctgggagaggcagcccaggaagtctcatctggggagcaggcagccagcatctgggccttggcctggagcacaaagaccctggctttcattttctctcaggtgaaaggaaattaaggcaacaaaagaagcccggctcctggtcacctaggaagcctcagattccttcccatggagggagggagtggtttgcaggtggccaagttcctctaacttggctcacactcgacatgaaaattcagaattttatactttccctaccctctagagaaataagatcttttttgtcagtttgtttgtatgaaactaaagcctttatttgttaatagttcctgctaaaacaatgaataaaaactcaaggagcaacta

SEQ ID NO: 282984 - DNA, 1188 bp, Artificial Sequence
  derived and/or modified sequence
atgaacggccccgtggacggcctgtgcgaccacagcctgagcgagggggtctttatgtttacttctgaatccgtcggcgagggccaccccgataagatctgcgaccagatctccgacgctgtcttagacgcccacttgaagcaggatcctaacgctaaggtagcttgcgagaccgtgtgtaagacgggcatggtgttgctctgtggggagattacaagcatggccatggtggattaccagcgtgtggtgcgtgacacaatcaagcacattggttacgatgacagcgccaaggggtttgatttcaaaacatgcaatgtgctggtggccctcgaacaacagagccctgacatcgctcagtgcgtccacctagatagaaacgaggaggatgtcggcgctggcgaccagggactgatgtttggttatgccactgatgaaaccgaagagtgtatgccattaaccattatcttggcccacaagctgaatgcacgcatggccgatcttcggagatctggcttgctgccctggctgcgccctgatagcaagacgcaagtgacggtacagtatatgcaagacaacggagcagttatccctgtgagaatacacaccatagtgatctccgtgcagcacaatgaagacatcacccttgaggaaatgcgccgggcgctaaaggagcaggtgattcgggcagttgtccctgcaaaatacctagacgaggacactgtgtatcacctgcagccatcaggacggtttgttataggaggacctcagggagatgctggcgttacaggacgcaagatcattgttgacacttatggcggctggggagcccatgggggcggtgctttttctggcaaggactacacaaaagtcgatcgctccgccgcctatgccgccagatgggtggctaaatcattggtgaaggccggtttgtgccggcgggtgttagtgcaggtgtcgtatgcaataggagtggcggagcctctgtctatctctatctttacctatggaaccagtcagaaaacggagagagagctgctggacgtagtgcacaagaacttcgacctcagacctggagtgattgtccgcgatctggatctcaagaagccaatatatcagaagaccgcttgctacggccacttcggccgatcggaatttccatgggaagtaccccgtaagcttgtgttctag

SEQ ID NO: 282985 - DNA, 1188 bp, Artificial Sequence
  derived and/or modified sequence
atgaacggccccgtggacggcctgtgcgaccacagcctgagcgagggtgtctttatgtttacatctgaatctgttggcgaggggcatcctgacaagatttgtgatcagatctctgacgctgtgctagacgcccacctgaaacaagaccctaacgcaaaagtggcttgcgagacagtgtgcaagacaggtatggtacttttgtgtggtgaaattacctcaatggcaatggttgactaccagagagtggtgagggacactatcaaacacataggatatgacgactctgccaaaggatttgattttaagacttgcaacgtgctggtggctctcgagcagcaatctccagacattgcccagtgcgtgcacttagacaggaacgaggaagacgtgggcgcaggtgatcaggggcttatgtttggctacgctacagacgagactgaggagtgtatgccactcacaatcatcttagcgcacaagctcaacgctagaatggctgatttgcggcggagtggcctgctgccttggctgcgacccgattccaagacacaggtaaccgtccagtacatgcaagacaatggagccgtcattcccgttcgaatacacactatcgtgatctctgtgcagcacaatgaggacatcactctggaggagatgagacgggctcttaaagaacaagtgatcagggccgtagtcccagctaaatacttggatgaagacactgtgtaccatctacagccttcaggccgtttcgtgatcggagggccccagggagacgccggtgtaaccgggcgcaaaattattgtggacacttacggcggttggggcgcacatggcggcggtgcattctcgggcaaagactataccaaagtggaccgctcagctgcttacgcagcacggtgggtggccaaatcactcgtcaaggctggcttatgtcggcgcgttttggtacaggtctcctatgccataggggtagctgagcccctatccattagtatctttacatacggaacctcccaaaaaaccgagagggaactgcttgatgtagttcacaaaaacttcgatctgagacccggggtgattgttcgtgatctcgatcttaaaaaacccatctaccagaaaactgcatgctatggacacttcggcaggtcagagttcccatgggaggtcccacgcaagctcgtcttctag

SEQ ID NO: 282986 - DNA, 1188 bp, Artificial Sequence
  derived and/or modified sequence
atgaatgggccagtggacgggctctgcgatcacagcttatccgagggcgttttcatgttcaccagcgagtccgtaggcgagggtcaccctgataagatatgtgatcagatttccgacgcagttttagatgctcacctgaagcaagatccaaacgcgaaagtcgcgtgcgagacagtgtgtaagacagggatggtcttactgtgtggggagattactagtatggccatggttgactaccagagggttgtgagagacacgatcaagcatattggctacgacgactccgcaaagggctttgatttcaagacctgcaacgttcttgttgccctggagcagcaatctccggacattgcccaatgtgtgcatttggatcgaaacgaggaggatgtgggggcaggggatcagggcctaatgttcggttatgcgactgacgagacagaagagtgcatgccgctgaccataatcctcgcacacaaactaaacgcacgcatggccgatcttaggcggtccggccttcttccttggctgagacccgatagcaagactcaggttaccgttcaatacatgcaagataatggagctgtgatccccgtgcggatccatactatcgtcatatcagtgcagcataacgaagacatcacactggaagaaatgcgccgagctttgaaggagcaggtgattcgcgctgtggtgccggctaagtatttggacgaggatactgtctatcacctccagccttccggccgttttgtcattggcggacctcagggcgacgccggtgtcaccgggagaaaaatcattgtggatacctatgggggatggggcgcacacggaggtggggctttttccggaaaagactacacgaaggtcgaccggtcagcagcgtacgcagctagatgggttgccaaaagcttggtgaaggctgggctgtgcaggagggtgcttgtgcaagtttcctacgccattggtgtggccgagcctctaagtatctcaatcttcacctacggcacatcccaaaagaccgaacgggagctgcttgacgtggttcataagaattttgacttaaggcctggagtgatcgtaagggatttggatctaaaaaaacccatttatcaaaaaactgcgtgctacgggcacttcgggcgatcagagtttccctgggaggtgcctcgcaaacttgtattttag

SEQ ID NO: 282987 - DNA, 1188 bp, Artificial Sequence
  derived and/or modified sequence
atgaatggacccgttgacggactgtgtgatcattccctgtccgagggcgtctttatgtttacttctgagagcgtcggtgaagggcatcctgataagatctgcgaccaaatatccgatgccgtgctggacgcacatcttaagcaggaccccaatgcaaaagtggcctgtgagacagtgtgcaagacaggtatggtattgctttgcggagagataacctcaatggccatggtggattatcaacgggtagtgagagatacaataaagcatattggttacgacgactctgccaagggattcgacttcaaaacctgtaacgttctggtcgctctagagcaacagtcccctgacatcgcacagtgtgtacatctggatagaaacgaggaagacgttggtgctggggaccaagggttgatgttcggatatgccaccgatgagaccgaggagtgcatgcctctgacgatcatcctggcacacaaactcaacgccaggatggcagacctgagacgtagcgggcttttaccatggctccgccctgattccaagacacaggtaacggtgcaatacatgcaggataacggagccgtgatacctgtccgaatccacactatagtcatcagcgtacagcacaatgaagatatcacccttgaggagatgcgtagggcactaaaagagcaggtgattcgggctgttgtcccagccaaatatctggacgaggacactgtgtatcacctccagcccagtggacgatttgtaattggcggaccacagggcgacgctggagtgaccggacggaaaatcatcgtggatacttacgggggatggggggcacatggcggtggtgctttttccggaaaggactatacgaaggtggataggagcgccgcatacgcagcacgctgggtggctaaatctttggtgaaggccggactctgcaggcgcgtgctagttcaagtttcatacgctattggagtcgcagaacctctctccatcagcatcttcacttacggcacctcccagaaaaccgagcgcgagttactagatgtagtccacaagaatttcgacctgcggccaggcgttatcgtgagagatcttgatttaaaaaagcccatatatcagaagacagcctgttacggtcattttgggcgatctgagttcccttgggaggtgcccagaaagctggttttttag

SEQ ID NO: 282988 - DNA, 1188 bp, Artificial Sequence
  derived and/or modified sequence
atgaacggccccgtggacggcctgtgcgaccacagcctgagcgagggcgtgttcatgttcaccagcgagagcgtgggcgagggccaccccgacaagatctgcgaccagatcagcgacgccgtgctggacgcccacctgaagcaggaccccaacgccaaggtggcctgcgagaccgtgtgcaagaccggcatggtgctgctgtgcggcgagatcaccagcatggccatggtggactaccagagagtggtgagagacaccatcaagcacatcggctacgacgacagcgccaagggcttcgacttcaagacctgcaacgtgctggtggccctggagcagcagagccccgacatcgcccagtgcgtgcacctggacagaaacgaggaggacgtgggcgccggcgaccagggcctgatgttcggctacgccaccgacgagaccgaggagtgcatgcccctgaccatcatcctggcccacaagctgaacgccagaatggccgacctgagaagaagcggcctgctgccctggctgagacccgacagcaagacccaggtgaccgtgcagtacatgcaggacaacggcgccgtgatccccgtgagaatccacaccatcgtgatcagcgtgcagcacaacgaggacatcaccctggaggagatgagaagagccctgaaggagcaggtgatcagagccgtggtgcccgccaagtacctggacgaggacaccgtgtaccacctgcagcccagcggcagattcgtgatcggcggcccccagggcgacgccggcgtgaccggcagaaagatcatcgtggacacctacggcggctggggcgcccacggcggcggcgccttcagcggcaaggactacaccaaggtggacagaagcgccgcctacgccgccagatgggtggccaagagcctggtgaaggccggcctgtgcagaagagtgctggtgcaggtgagctacgccatcggcgtggccgagcccctgagcatcagcatcttcacctacggcaccagccagaagaccgagagagagctgctggacgtggtgcacaagaacttcgacctgagacccggcgtgatcgtgagagacctggacctgaagaagcccatctaccagaagaccgcctgctacggccacttcggcagaagcgagttcccctgggaggtgcccagaaagctggtgttctag

SEQ ID NO: 282989 - protein, 145 aa, Artificial Sequence
  derived and/or modified sequence
ESVGEGHPDKICDQISDAVLDAHLKQDPNAKVACGFDFKTCNVLVALEQQSPDIAQCVHLDRNEEDVGAGDQGLMFGYATDETEECMPLTIILAHKLNARMADLRRSGLLPWLRPDSKTQVTVQYMQDNGAVIPVRIHTIVISVQ

SEQ ID NO: 282990 - DNA, 438 bp, Artificial Sequence
  derived and/or modified sequence
gaatcagtaggcgagggacacccggataagatctgcgatcagatttcagacgccgtcttagatgcccaccttaagcaggacccaaatgcaaaggtggcatgcgggtttgactttaagacctgcaatgtcctggtcgccctggagcaacagagtcctgatattgcccaatgtgttcacctggaccgcaatgaagaggacgtaggagcgggggaccagggcctgatgtttggatacgccacagacgaaacagaagagtgtatgccgcttactataatcctcgctcataagctcaatgcaagaatggccgatctgcggcgctccggcttgttaccttggttacgacctgactccaagactcaggtgactgtgcaatacatgcaggataacggtgccgtcattccagtccgtatccatactatcgtgatttcagttcagtag

SEQ ID NO: 282991 - DNA, 438 bp, Artificial Sequence
  derived and/or modified sequence
gagagcgtgggggagggccacccagacaagatctgtgaccagatcagtgatgctgtgctggatgcccacctgaagcaggaccccaatgccaaggtggcctgtggctttgacttcaagacctgcaatgtgctggtggccctggagcagcagagcccagacatcgcccagtgtgtgcacctggacagaaatgaagaagatgtgggcgctggggaccagggcctgatgtttggctacgccacagatgaaacagaggagtgcatgcccctgaccatcatcctggcccacaagctgaatgccaggatggctgacctgcggcgcagcggcctgctgccctggctgcggccagacagcaagacccaggtgacagtgcagtacatgcaggacaatggagctgtgattcctgtgcgcatccacaccatcgtcatctctgtgcagtag

SEQ ID NO: 282992 - DNA, 435 bp, Artificial Sequence
  derived and/or modified sequence
gagtctgtgggagagggacacccggataagatctgtgaccagatcagtgatgcagtgctggatgcccatctcaagcaagaccccaatgccaaggtggcctgtggctttgacttcaagacttgcaacgtgctggtggctttggagcagcaatccccagatattgcccagtgcgtccatctggacagaaatgaggaggatgtgggggcaggagatcagggtttgatgttcggctatgctaccgacgagacagaggagtgcatgcccctcaccatcatccttgctcacaagctcaacgcccggatggcagacctcaggcgctccggcctcctcccctggctgcggcctgactctaagactcaggtgacagttcagtacatgcaggacaatggcgcagtcatccctgtgcgcatccacaccatcgtcatctctgtgcag

SEQ ID NO: 282993 - DNA, 438 bp, Artificial Sequence
  derived and/or modified sequence
gagagcgtgggcgagggccaccccgacaagatctgcgaccagatctcagatgcagtactcgacgctcacttgaagcaggatccaaacgctaaggtggcatgtgggtttgactttaagacttgcaacgtccttgtggccctggagcagcaaagcccagatatagcccaatgcgtgcatttggaccggaatgaagaagatgttggtgccggagatcagggcctgatgttcgggtatgccactgacgagacagaggagtgcatgcccctcaccatcattttggcacacaaactcaacgcaagaatggctgaccttcgtcgctcaggcctgttgccctggctgcggccggatagcaaaactcaggtcacagttcaatacatgcaggataacggagctgtaatcccagttagaattcacacgatagtcatctcggtccagtag

SEQ ID NO: 282994 - DNA, 438 bp, Artificial Sequence
  derived and/or modified sequence
gagagcgtcggcgaaggtcaccccgataagatttgcgaccagatcagcgacgcagtgctggatgcccaccttaagcaggatccgaacgccaaggtggcttgtggcttcgatttcaaaacttgtaatgtgctcgtggctttggagcagcaatctcccgatattgctcagtgtgtgcatctggaccggaacgaagaggacgtgggtgccggagaccagggactcatgttcggatacgcaacagatgagactgaggagtgtatgcccttaaccataatactggcacacaagctcaacgctaggatggccgacttgaggcggtcagggctgctaccgtggcttagacctgatagtaaaacacaagttactgtccagtatatgcaggataatggggctgtgattccggtaaggattcatacgatcgtaatcagtgttcagtag

SEQ ID NO: 282995 - DNA, 438 bp, Artificial Sequence
  derived and/or modified sequence
gagagcgtgggcgagggccaccccgacaagatctgcgaccagatcagcgacgccgtgctggacgcccacctgaagcaggaccccaacgccaaggtggcctgcggcttcgacttcaagacctgcaacgtgctggtggccctggagcagcagagccccgacatcgcccagtgcgtgcacctggacagaaacgaggaggacgtgggcgccggcgaccagggcctgatgttcggctacgccaccgacgagaccgaggagtgcatgcccctgaccatcatcctggcccacaagctgaacgccagaatggccgacctgagaagaagcggcctgctgccctggctgagacccgacagcaagacccaggtgaccgtgcagtacatgcaggacaacggcgccgtgatccccgtgagaatccacaccatcgtgatcagcgtgcagtag

SEQ ID NO: 282996 - protein, 900 aa, Artificial Sequence
  derived and/or modified sequence
MESCYNPGLDGIIEYDDFKLNSSIVEPKEPAPETADGPYLVIVEQPKQRGFRFRYGCEGPSHGGLPGASSEKGRKTYPTVKICNYEGPAKIEVDLVTHSDPPRAHAHSLVGKQCSELGICAVSVGPKDMTAQFNNLGVLHVTKKNMMGTMIQKLQRQRLRSRPQGLTEAEQRELEQEAKELKKVMDLSIVRLRFSAFLRASDGSFSLPLKPVISQPIHDSKSPGASNLKISRMDKTAGSVRGGDEVYLLCDKVQKDDIEVRFYEDDENGWQAFGDFSPTDVHKQYAIVFRTPPYHKMKIERPVTVFLQLKRKRGGDVSDSKQFTYYPLVEDKEEVQRKRRKALPTFSQPFGGGSHMGGGSGGAAGGYGGAGGGGSLGFFPSSLAYSPYQSGAGPMGCYPGGGGGAQMAATVPSRDSGEEAAEPSAPSRTPQCEPQAPEMLQRAREYNARLFGLAQRSARALLDYGVTADARALLAGQRHLLTAQDENGDTPLHLAIIHGQTSVIEQIVYVIHHAQDLGVVNLTNHLHQTPLHLAVITGQTSVVSFLLRVGADPALLDRHGDSAMHLALRAGAGAPELLRALLQSGAPAVPQLLHMPDFEGLYPVHLAVRARSPECLDLLVDSGAEVEATERQGGRTALHLATEMEELGLVTHLVTKLRANVNARTFAGNTPLHLAAGLGYPTLTRLLLKAGADIHAENEEPLCPLPSPPTSDSDSDSEGPEKDTRSSFRGHTPLDLTCSTKVKTLLLNAAQNTMEPPLTPPSPAGPGLSLGDTALQNLEQLLDGPEAQGSWAELAERLGLRSLVDTYRQTTSPSGSLLRSYELAGGDLAGLLEALSDMGLEEGVRLLRGPETRDKLPSTAEVKEDSAYGSQSVEQEAEKLGPPPEPPGGLCHGHPQPQVH

SEQ ID NO: 282997 - DNA, 2703 bp, Artificial Sequence
  derived and/or modified sequence
atggagagctgctacaaccccggcctggacggcatcatcgagtacgacgacttcaagctgaacagcagcatcgtggagcccaaggagcccgcccccgagaccgccgacggcccctacctggtgatcgtggagcagcccaagcagagaggcttcagattcagatacggctgcgagggccccagccacggcggcctgcccggcgccagcagcgagaagggcagaaagacctaccccaccgtgaagatctgcaactacgagggccccgccaagatcgaggtggacctggtgacccacagcgacccccccagagcccacgcccacagcctggtgggcaagcagtgcagcgagctgggcatctgcgccgtgagcgtgggccccaaggacatgaccgcccagttcaacaacctgggcgtgctgcacgtgaccaagaagaacatgatgggcaccatgatccagaagctgcagagacagagactgagaagcagaccccagggcctgaccgaggccgagcagagagagctggagcaggaggccaaggagctgaagaaggtgatggacctgagcatcgtgagactgagattcagcgccttcctgagagccagcgacggcagcttcagcctgcccctgaagcccgtgatcagccagcccatccacgacagcaagagccccggcgccagcaacctgaagatcagcagaatggacaagaccgccggcagcgtgagaggcggcgacgaggtgtacctgctgtgcgacaaggtgcagaaggacgacatcgaggtgagattctacgaggacgacgagaacggctggcaggccttcggcgacttcagccccaccgacgtgcacaagcagtacgccatcgtgttcagaacccccccctaccacaagatgaagatcgagagacccgtgaccgtgttcctgcagctgaagagaaagagaggcggcgacgtgagcgacagcaagcagttcacctactaccccctggtggaggacaaggaggaggtgcagagaaagagaagaaaggccctgcccaccttcagccagcccttcggcggcggcagccacatgggcggcggcagcggcggcgccgccggcggctacggcggcgccggcggcggcggcagcctgggcttcttccccagcagcctggcctacagcccctaccagagcggcgccggccccatgggctgctaccccggcggcggcggcggcgcccagatggccgccaccgtgcccagcagagacagcggcgaggaggccgccgagcccagcgcccccagcagaaccccccagtgcgagccccaggcccccgagatgctgcagagagccagagagtacaacgccagactgttcggcctggcccagagaagcgccagagccctgctggactacggcgtgaccgccgacgccagagccctgctggccggccagagacacctgctgaccgcccaggacgagaacggcgacacccccctgcacctggccatcatccacggccagaccagcgtgatcgagcagatcgtgtacgtgatccaccacgcccaggacctgggcgtggtgaacctgaccaaccacctgcaccagacccccctgcacctggccgtgatcaccggccagaccagcgtggtgagcttcctgctgagagtgggcgccgaccccgccctgctggacagacacggcgacagcgccatgcacctggccctgagagccggcgccggcgcccccgagctgctgagagccctgctgcagagcggcgcccccgccgtgccccagctgctgcacatgcccgacttcgagggcctgtaccccgtgcacctggccgtgagagccagaagccccgagtgcctggacctgctggtggacagcggcgccgaggtggaggccaccgagagacagggcggcagaaccgccctgcacctggccaccgagatggaggagctgggcctggtgacccacctggtgaccaagctgagagccaacgtgaacgccagaaccttcgccggcaacacccccctgcacctggccgccggcctgggctaccccaccctgaccagactgctgctgaaggccggcgccgacatccacgccgagaacgaggagcccctgtgccccctgcccagcccccccaccagcgacagcgacagcgacagcgagggccccgagaaggacaccagaagcagcttcagaggccacacccccctggacctgacctgcagcaccaaggtgaagaccctgctgctgaacgccgcccagaacaccatggagccccccctgaccccccccagccccgccggccccggcctgagcctgggcgacaccgccctgcagaacctggagcagctgctggacggccccgaggcccagggcagctgggccgagctggccgagagactgggcctgagaagcctggtggacacctacagacagaccaccagccccagcggcagcctgctgagaagctacgagctggccggcggcgacctggccggcctgctggaggccctgagcgacatgggcctggaggagggcgtgagactgctgagaggccccgagaccagagacaagctgcccagcaccgccgaggtgaaggaggacagcgcctacggcagccagagcgtggagcaggaggccgagaagctgggccccccccccgagccccccggcggcctgtgccacggccacccccagccccaggtgcactag

SEQ ID NO: 282998 - DNA, 2703 bp, Artificial Sequence
  derived and/or modified sequence
atggagtcttgctataatcctggactcgacggaatcatcgagtacgacgattttaagctgaactcttctatcgttgaacccaaagagccggccccagagaccgccgacgggccttacctagtgatcgtggagcagcccaaacaacggggctttaggttccgatacggctgtgaaggacccagccatgggggtcttccgggcgcatcgtcggaaaagggacggaaaacctatcctactgtgaagatctgtaattatgaagggcctgccaagatcgaagttgatctggttacacattccgatcctcctcgggcacacgcacactctcttgtgggaaagcaatgctcagagttggggatttgcgctgttagcgtgggacctaaagacatgaccgcacagttcaataatctgggggtgctgcatgtgaccaagaagaacatgatgggaactatgatccagaagctccagaggcaacggctgcgatcaagacctcaagggctgaccgaggcagagcagcgcgaactcgagcaggaggctaaggagctgaagaaggtcatggatctttccatcgtgcggctgcggtttagtgcctttctccgggcatctgatggatcattttcattgccacttaaacctgttatctcgcagcctattcacgatagtaaatcaccaggtgcgagcaaccttaaaatcagcagaatggacaagacagctggctcagtcagaggcggcgacgaggtgtacctgctgtgtgataaagttcagaaagacgacatagaagtccgcttttatgaggatgacgaaaacggatggcaggccttcggagatttcagccctaccgatgtccataagcagtacgcaattgtgttcaggacgcccccttaccataagatgaagatcgagcggccagtcaccgtctttctgcagctcaaaagaaagcgaggaggcgacgtgagcgacagcaaacaatttacatactacccattggtggaggacaaagaagaagttcagaggaagcggaggaaggctttgccgactttttcgcaaccctttggggggggaagtcatatgggaggcggcagtggaggcgcagccggaggttatgggggagctggaggcggcgggtctttgggattctttccctcaagtctggcatacagcccataccagagcggagcaggaccgatgggatgttacccagggggaggggggggtgcccagatggcagccaccgtaccctcacgcgactccggagaggaggccgccgaaccctcggccccgtcgcgaacaccacagtgtgaacctcaggcccccgaaatgttgcagagggcacgcgagtataacgcccgactgtttggcctcgcccagaggtccgccagagctctgctggattatggagtaaccgccgacgcccgggctctgttggctggccagcgacacttgctgaccgctcaggatgagaatggggacactcctctccacctggcaattattcacgggcagacctcagttattgagcaaatcgtttacgtgattcatcatgctcaggacctcggtgtggtgaacctcacaaatcatctgcaccagaccccgctgcatctcgccgtcatcaccggacagacgtccgtggtgagttttctgctcagggtgggcgctgatcccgcattgctggatcgccatggggattccgctatgcacttagcccttcgagccggcgccggcgcccctgaactgttacgcgctctgttgcagagcggggcacctgcagtccctcagttgcttcacatgccagattttgagggcctgtaccccgtccatctggcagtgcgcgcccgctcaccagaatgcttggacttgcttgtcgactcaggagcagaggtagaggccactgaacggcaggggggtcggaccgccttgcacctcgctactgaaatggaagagctaggcctggttacacaccttgtcactaagctgcgcgcaaatgtgaacgcccgcacattcgctggtaacaccccccttcatctggctgccggcttggggtatccaactttaacgcgcctcctgctgaaagccggggctgatattcacgcggaaaatgaagagcctctgtgtcccttaccctccccccccacatctgattccgatagcgattctgaaggaccagaaaaagatactagatctagttttagaggacacacacccctggacctgacttgcagtacaaaagtgaaaaccctgctgctcaatgccgcccagaacacaatggaacctcctttgactccaccctcccctgccggtcctgggttaagcctgggtgacactgccctccagaacctggagcagttgctggatggtcccgaagcccagggatcttgggctgaactggctgagcggctgggcctccggagtctggtggatacctaccgccaaaccacaagccctagtgggagcctgctgcgctcttatgagctggctggaggagacttggccggcctgcttgaggcactctctgacatgggactcgaggaaggggtgaggctgcttcgtggtcctgagactcgagataagcttccatccaccgcggaagtgaaggaggacagtgcatatggctcccagagtgtcgagcaggaggccgagaaactcgggccgccaccagagccacctggcggcctttgtcacgggcatcctcaaccccaagtccactag

SEQ ID NO: 282999 - DNA, 2703 bp, Artificial Sequence
  derived and/or modified sequence
atggagtcttgttataatccaggccttgatggcatcatcgagtacgacgactttaagctcaatagctcaatagtggagcccaaagagccggcaccagagactgctgacggcccttaccttgttatcgtagagcaaccaaaacagcggggcttccgtttcagatatgggtgcgaaggtccctctcacggggggttgcccggggcttcctcagaaaaggggcgaaaaacttatcctacagtgaagatttgtaactacgaggggccggccaaaattgaagtggacctcgtcacccatagcgacccccccagggctcatgcccatagcttagtaggaaaacaatgctccgaactgggaatctgtgcagtgagcgtaggtcccaaagatatgaccgcccaatttaataacctaggcgtactccacgttaccaaaaagaatatgatgggcaccatgatccagaaattacaacggcagcgcttgagaagccggcctcagggtctgaccgaggcagagcagcgggagttggagcaagaagccaaggagctgaaaaaggtgatggatctgagcatcgttagactccggttctcagccttcctgcgcgcttcggatgggtcattctcactaccgctgaagcccgtgatttctcagcctatccatgacagcaaaagccctggagcctctaacctgaaaatttcccgtatggataaaacggcgggatccgtgcgtggtggagacgaagtttacctgttgtgcgataaggtacagaaagatgatattgaagtgcggttttatgaggatgacgagaatggatggcaggccttcggcgatttcagccccaccgacgttcataagcagtacgccatcgtgttccggacgccaccgtatcacaagatgaagattgaacgtcccgttacggtctttttacaattgaagcgcaaacggggcggcgacgtttccgacagtaagcagttcacctattatccgcttgtcgaggataaggaggaggtccagcgaaaacggcgcaaggccttgccaactttttcccagcctttcgggggtggctcccacatgggaggaggaagtggtggtgccgcaggcggatatggaggtgcgggcggaggcggtagcttaggcttctttccatcctctttagcgtactcaccctaccagtccggagccggacccatggggtgttatccgggggggggggggggcgctcagatggccgcaactgtcccctcaagagacagtggtgaagaagctgccgagccctccgctccctcccggactccacagtgcgaacctcaggcaccagagatgctgcagagagcccgagaatataatgcccgactatttgggctggcacagcggtccgctagagcactactggactatggtgttacagctgacgctcgcgcccttttagcaggacagcgtcacctgctgactgcccaagatgaaaatggcgataccccattgcatctggccataatccacggtcagacaagtgtgatcgaacaaatcgtgtatgtgatccatcacgctcaggacctgggcgtagtgaacctgactaatcatctgcaccagacccccctacaccttgcagtcattacaggccagacctcagttgtcagctttttgctcagggtgggagcggatcccgctttgctggacagacatggcgattccgctatgcatcttgcactgagagccggagccggagcccctgagctgcttcgggccctcctgcagagtggcgctcccgccgtcccacagctgttgcacatgccggacttcgaagggctctatcctgtacaccttgccgtgcgcgcaagatcccccgagtgtctggacttactcgtggactcaggtgctgaggtagaggccaccgagcgccaggggggcagaactgccctgcaccttgccaccgagatggaggagctcgggttggtaacccacttagtgaccaaactccgcgccaatgtcaacgccagaacctttgcgggcaatactccactccacctggccgccggcctgggatatccaacgttaactcgtctactcttaaaagccggcgccgacattcacgccgagaacgaagaacctttgtgtcctttgccatctccaccgacatccgatagcgacagcgactctgaaggtccggaaaaggacacccggagctcgttccggggacacactccactagacctgacgtgttctactaaagtcaagactctcctcttgaatgctgcccagaacactatggaaccacctctgacgcctccatccccagcagggcccggactgtccctcggagacactgccttacaaaaccttgagcaactgctggacgggccggaagctcaaggatcttgggctgaattggctgagcggctcgggcttcgcagcctcgtggacacatatagacagacgacatccccttccgggagtctgttacggtcctatgagttagcaggcggtgacttggctggcttgctggaggcactgagcgatatgggcctcgaggaaggcgtacggcttcttcgggggcctgagacaagagataagctgcctagcaccgccgaggtgaaagaagactccgcctacggatctcagtcggtcgagcaggaagctgagaaactgggccctcccccggaaccgcccggagggctttgtcatggccatccacagcctcaggtgcactag

SEQ ID NO: 283000 - DNA, 2703 bp, Artificial Sequence
  derived and/or modified sequence
atggagagctgctacaaccctggcctggatggcatcattgaatatgatgacttcaagctgaacagcagcatcgtggagcccaaggagcccgcccctgagacagcagatggcccctacctggtgattgtggagcagcccaagcagaggggcttccgcttccgctatggctgtgagggccccagccacggcggcctgcccggggccagcagcgagaagggcaggaagacctaccccaccgtgaagatctgcaactatgagggccctgccaagattgaggtggacctggtgacccacagcgaccccccccgggcccacgcccacagcctggtgggcaagcagtgcagcgagctgggcatctgtgctgtgtctgtgggccccaaggacatgacagcccagttcaacaacctgggcgtgctgcacgtgaccaagaagaacatgatgggcaccatgatccagaagctgcagaggcagaggctgcggagccggccccagggcctgacagaagctgagcagcgggagctggagcaggaggccaaggagctgaagaaggtgatggacctgagcatcgtgcggctgcgcttcagcgccttcctgcgggccagtgatggcagcttcagcctgcccctgaagcctgtgatcagccagcccatccatgacagcaagagccctggggccagcaacctgaagatcagcaggatggacaagacagctggctctgtgagaggaggagatgaggtgtacctgctgtgtgacaaggtgcagaaggatgacatcgaggtgcgcttctatgaagatgatgaaaatggctggcaggcctttggagacttcagccccacagatgtgcacaagcagtatgccatcgtgttccgcaccccaccctaccacaagatgaagattgaaagacctgtgaccgtcttcctgcagctgaagaggaagagaggaggagatgtgtctgacagcaagcagttcacctactaccccctggtggaggacaaggaggaggtgcagaggaagaggaggaaggccctgcccaccttcagccagccctttggaggcggcagccacatgggcggcggcagcggcggggccgccggcggctatggaggagctgggggcggcggcagcctgggcttcttccccagcagcctggcctacagcccctaccagagcggggccggccccatgggctgctacccaggcggcggcggcggggcccagatggccgccaccgtgcccagccgggacagcggggaggaggccgctgagcccagcgcccccagcaggaccccccagtgtgagccccaggcccctgagatgctgcagagggcccgggagtacaatgcccggctgtttggcctggcccagaggtctgcccgggccctgctggactatggagtgacagcagatgcccgggccctgctggccggccagaggcacctgctgacagcccaggatgaaaatggagacacccccctgcacctggccatcatccacggccagaccagcgtcatcgagcagatcgtgtatgtgatccaccacgcccaggacctgggcgtggtgaacctgaccaaccacctgcaccagacccccctgcacctggccgtcatcaccggccagacctctgtggtgtccttcctgctgcgggtgggcgctgaccctgccctgctggacagacatggagacagcgccatgcacctggccctgcgggccggggccggggcccctgagctgctgcgggccctgctgcagagcggggccccagctgtgccccagctgctgcacatgccagactttgagggcctgtaccctgtgcacctggccgtgcgggcccggagccctgagtgcctggacctgctggtggacagcggggctgaggtggaggccacagagcggcagggcggccgcacagccctgcacctggccacagagatggaggagctgggcctggtgacccacctggtgaccaagctgcgggccaacgtgaatgcccggacctttgctggcaacacccccctgcacctggccgccggcctgggctaccccaccctgacccggctgctgctgaaggccggggctgacatccacgcagaaaatgaggagcccctgtgccccctgcccagcccccccaccagtgacagcgacagcgacagcgagggccctgagaaggacaccaggagcagcttccggggccacacccccctggacctgacctgcagcaccaaggtgaagaccctgctgctgaatgctgcccagaacaccatggagccccccctgaccccacccagccctgctggccctggcctgagcctgggggacacagccctgcagaacctggagcagctgctggatggccctgaggcccagggctcctgggccgagctggccgagcggctgggcctgcggagcctggtggacacctaccggcagaccaccagccccagcggcagcctgctgcggagctatgagctggccggcggggacctggccggcctgctggaggccctgagtgacatgggcctggaggagggcgtgcggctgctgcggggccctgagacccgggacaagctgcccagcacagctgaggtgaaggaggacagcgcctacggcagccagagcgtggagcaggaggccgagaagctgggccccccacctgagcccccaggcggcctgtgccacggccacccccagccccaggtgcactag

SEQ ID NO: 283001 - DNA, 2703 bp, Artificial Sequence
  derived and/or modified sequence
atggagagctgctacaaccccggcctggacggcatcatcgagtacgatgatttcaaattaaactcatccatcgttgagcctaaagagccggcgcccgaaactgcggacggaccctatctagtgatagtggagcagcccaagcagagagggttcaggttccgctacggttgcgaaggaccctcccacggaggcctccccggggcctcttcagaaaaaggccgcaagacctatccgaccgtcaagatctgtaattacgagggacccgcaaagatcgaggtcgacctcgtcactcacagcgatccacctcgagcgcacgcacacagcctggtcggcaaacaatgctcggagttaggcatctgtgccgtgagcgtgggtccgaaagacatgaccgctcagtttaacaacctgggtgtcctccatgtcaccaaaaagaatatgatgggcacaatgattcaaaaacttcaaagacaacgactgaggtctaggcctcaagggttaacagaagctgaacaacgggagctggagcaggaggctaaagagctcaaaaaggtgatggatttatcgatagtgcgactgagattcagcgcattcctcagagcctccgacggatcttttagcctgccactgaaaccagtgatcagtcagcccatacacgactccaagagtcctggcgcctcgaaccttaaaatctcacgcatggacaagactgctggcagcgttcggggaggggatgaagtttatctgctgtgtgacaaagtccagaaggacgatatcgaggtgaggttttatgaagatgacgaaaatggttggcaggccttcggggacttctcccctaccgatgtacacaagcagtatgcaattgtgttccgcacaccaccttaccataaaatgaaaattgagcgccctgtcacggtgttcctgcagctcaagagaaagcgtggtggtgatgtgtcagacagcaaacaattcacgtactaccccttggtggaggataaggaagaagtccagcgaaaacgacggaaggccctgccaacttttagccagccattcggaggcggctcacatatgggaggaggctctggaggagctgcaggggggtatggaggagcggggggcgggggttccctgggcttcttcccctctagcctggcatacagcccttatcaaagcggggccggccccatgggatgttaccctggagggggagggggcgcccagatggcagctaccgtgcccagccgcgattctggcgaggaagcggctgaaccctccgcacccagccgtactccacagtgcgaaccacaagcccccgagatgttgcaaagggcccgcgagtacaatgcacggctgttcggactggcacagcggtcagcacgtgctctgctggactacggggtgacagccgacgctcgcgcactactggccggtcagagacatctcttaactgcccaggacgagaacggggacacacctcttcatctagctatcatacacggccagacaagtgtaattgagcagatagtatacgtaattcatcacgcacaggacctaggagtggtcaaccttactaatcacctccaccagacgcccctgcatttagctgtgatcaccggtcagaccagcgtcgtctccttcctcctgagagtaggcgcagatcctgccctactggatcgacatggggatagcgctatgcacctcgccctgcgtgccggtgccggggcccccgagttgttgcgggccctgttacagtcaggtgcccccgccgtgccccaactgctgcacatgcccgactttgagggcctgtatccagtgcacctggcagttagggcccggtcgcctgagtgtcttgatctcttggtcgactctggcgcagaggtggaagcgacagagagacagggaggcaggaccgctctgcacttggcgaccgaaatggaggaacttggcctggtgacccatttggtgaccaagctgagagccaatgtcaacgcgcggacttttgccgggaatacgccgctccatttagctgccgggttgggctacccaactctgactaggctcctgctgaaagctggggccgacattcacgccgagaatgaggaaccactttgccccttaccctcccccccaaccagcgactccgactcggattctgagggacccgaaaaagataccaggagttccttccggggtcacacccccctcgacctgacctgcagcactaaagtgaagaccttgctgctgaatgccgctcaaaacaccatggagccccccctcacccccccttctcctgctgggcccggcctgagcttaggggacacagctctgcagaacctcgagcagctcctggacgggcccgaggcccaaggcagctgggctgagctcgcagagcgactaggcctgcgctcgctggtcgacacctatcgacaaaccacttcaccctctggcagtctgctacgctcctatgaattagccggaggggatctggcgggtctactcgaagccctttcagacatgggtctagaggagggcgtgagattgttaagaggaccggagactagggataagttgccaagcacggcagaggtgaaagaagattcagcatacggctcacagagtgttgaacaggaggctgaaaagctcggccctcctccagaacccccgggcggcttgtgtcatgggcaccctcagccacaggtgcattag

SEQ ID NO: 283002 - DNA, 2703 bp, Artificial Sequence
  derived and/or modified sequence
atggagagctgctacaaccccggcctggacggcatcatcgagtacgatgacttcaaactgaatagctctattgtagagcccaaagagcctgccccagaaactgcggacggcccctatctcgtaattgttgaacagcctaagcagaggggctttagattccgctatggatgtgaaggcccgtcccatggtggcctgcctggcgcctcctcagaaaagggcagaaaaacctatcccacagtcaaaatttgtaattatgagggccctgctaagattgaggtggaccttgtgacccacagtgacccacctcgagcccatgcccacagtttggtcggaaagcagtgctccgaactgggaatatgtgctgtctccgtcgggccgaaagatatgaccgctcaattcaacaacttgggcgtcctccatgtaactaagaagaatatgatgggcactatgattcagaagctccagcgacagcggctcaggtccagaccacagggcctgacagaggcggaacaacgggaattggagcaggaagctaaggaactgaagaaagttatggatctgtctattgtgcgcctgagatttagcgccttcctgcgagcctctgacggatcattctccctcccactgaagcctgttatatcccagccaatacacgattctaagtcacccggggctagcaatctgaagatttctagaatggacaagacagccggcagcgtgagaggcggcgacgaggtgtatctgctttgcgataaggtccagaaggacgacattgaagtacgcttctacgaagatgacgaaaacgggtggcaggcttttggggatttttctccaacagatgtgcataagcagtacgcaatagtgtttcgcacacccccgtatcacaagatgaaaatagagcgccctgtgactgtgtttcttcaacttaagcgaaaacgcggaggagatgtctcagactctaagcagttcacatattatcccctggtggaggataaggaggaggttcagcggaaaagacgcaaggcactaccaactttctcacaaccttttggagggggttctcacatgggcgggggatccgggggcgcagccggcggctatggcggggctggcggcggaggctcactcgggttttttccttcaagcctggcgtactcaccgtaccagtccggtgcggggcctatgggctgctacccaggtggcggtggaggagcacagatggccgcaacagtgccgtcaagggatagcggcgaggaggccgcagagccatcagccccttctcgcaccccacagtgtgagcctcaggcacctgaaatgcttcaacgcgccagagagtataacgcgcgcctgttcgggctggcacagaggtcagcccgggctcttcttgattacggggtaaccgctgatgcccgcgcactactggccggtcagcggcatctcctgacagcccaggatgagaatggagatactcccctccatcttgccatcattcacggtcagacctctgttattgaacagatcgtctacgtcattcatcacgctcaggacttgggagtagttaacctaaccaatcatttgcaccagactccactgcatctggccgtcattacaggacagactagcgtggtgtcctttttgctgcgagttggggcggatcctgcactgttagatcgtcacggggatagcgcgatgcacctggctctgagggccggggccggagcacctgagctcctcagggccctcttacagtccggagcgcctgcggtgccacagctgcttcatatgcctgactttgagggcttgtatcccgttcatttggccgttcgggcccgcagccccgaatgccttgatctattagtggattccggcgcagaggtggaagcaacagaacgtcaaggcggcagaacagccctgcatctagctacagagatggaggagctgggcctggtgacccacctggtgacaaaactccgtgcaaatgtgaacgcacggacatttgcaggcaacactccattgcatttagcggccggactcggctaccccactcttacgcgcttgctgctcaaggcaggagccgatatacacgcagagaacgaggaaccgctgtgtcctctcccctcacctccaaccagtgatagcgacagtgactctgagggaccggaaaaagatacccggtcctccttcagaggccacaccccgctggatctgacctgtagcacaaaagtcaaaacgctgctgcttaacgccgctcaaaatactatggaacctcctctgacccctccctctcctgcaggcccagggctatctctgggtgacactgcactccaaaacttagagcagctcttagacggacccgaagcacaggggtcctgggccgaattagcggaaagacttggcctaaggagcctagtggacacatatagacagacaactagcccaagcggatcactgttgcggagttacgagctcgccggcggcgaccttgctggccttctcgaagccctgagcgacatgggcctggaagagggggtgcggctgctgcgggggccagagacaagggacaagcttccttccaccgctgaggtcaaggaggatagcgcatatgggagccagtcagtggagcaagaggcggaaaagctcgggccaccccccgagccacccggaggcttgtgccatggacacccgcagccacaagtccactag

SEQ ID NO: 283003 - DNA, 2703 bp, Artificial Sequence
  derived and/or modified sequence
atggagtcctgttacaaccccggtttggatggaattatcgagtatgacgacttcaaactcaactcatcaattgtggaaccaaaggagcctgccccagagaccgccgatggaccctatcttgtgattgtcgagcagcccaagcagcggggatttcgtttccgttacgggtgcgagggcccatcccatgggggtcttcccggagcctcctcggaaaaaggacgcaagacatatcccacggtgaaaatctgcaactatgagggtcctgctaaaattgaagtggatcttgttacccactcagacccacccagagctcatgcacatagtctggtgggcaaacaatgctcggaactggggatctgtgcagtctccgtggggccaaaggacatgaccgcgcagttcaacaacctcggggtactccatgtgactaagaaaaacatgatgggaacaatgattcagaaactgcaaaggcagcgccttcgatcccggccacagggccttaccgaggcagaacagcgagaactcgaacaggaggctaaggagctgaagaaggttatggacttaagtatcgttcgtttacgtttcagtgccttcctgcgcgctagtgatggatcttttagcctacctttgaagcctgtcataagccaacccatccatgactccaagtcaccaggagcctctaatcttaagatctcacgcatggacaagaccgccggatctgtgcggggtggagatgaggtgtacctgctgtgtgataaggtccaaaaggacgacatcgaggtgcgcttctatgaggatgatgagaacggctggcaagcctttggcgacttcagcccaaccgatgtgcacaagcagtacgctatcgtattccggacacccccataccataaaatgaagattgaaagaccagtgactgtgtttttgcaacttaaacgcaaaagaggaggcgacgtgtctgattcgaaacaattcacatactacccgctggtggaggataaggaagaagtgcagagaaaaagacgcaaggcgcttcccactttttcacagccctttgggggtggaagtcatatggggggtgggtccggcggagccgctggaggttacggaggtgccggtgggggaggatcgttgggtttctttcctagtagcctggcatatagtccgtaccagtcaggcgctggacccatgggatgttaccccggaggcggaggaggcgcacagatggctgcgaccgttcccagccgagacagcggagaggaggcagctgaaccttcagctcccagtcgcactccacagtgcgagcctcaagcgccagaaatgttgcagcgggctagagaatataacgcccgtctgttcggactcgcccagcgtagcgccagagccttattagactacggtgtcacagctgatgctcgagcgctcttggcagggcaacggcaccttcttaccgcccaggatgagaatggcgacaccccgcttcacctggccatcatccatgggcaaactagcgtgatcgaacagatcgtatatgtgatccaccacgcacaggacctcggcgttgtaaacctaaccaaccatttacaccagacacctttacacctggcggtgataaccggacagaccagcgtggttagttttctgctgcgcgtgggggcagacccagcccttctcgaccggcacggtgactccgctatgcatctcgccttgagggcaggcgcaggtgctcccgagctcctccgagctcttctgcagtccggagcccctgccgtgcctcagctcctgcacatgcccgatttcgaggggctctatccagtgcatctggcggtcagagcaaggtcgcccgaatgcttggacttattagtggactccggcgcagaggttgaggccactgaacgacaaggaggacgcacggccctccacctggccaccgaaatggaggagctaggtctggtaacccacctagtcaccaaactccgagccaatgtgaatgcgcgaacttttgctgggaacaccccactgcatttagcggcaggccttggataccccacccttacaagactgcttctgaaggctggagctgacatccacgcagagaatgaggaaccactgtgtcccctccctagccctcctactagcgactccgactccgatagcgaagggccagagaaggacacaaggtcatcctttcggggacatactcccctagacctcacttgttccacaaaggtgaagaccttgctgcttaatgcagctcaaaataccatggagccaccccttacccccccaagccctgcgggtcccggactctccctcggtgacactgctctgcagaatcttgaacaattgctcgacggtcccgaggcccagggctcctgggcggaactggctgagcgcctgggtttgagatccttggttgatacctacagacaaaccacatctccttccggaagtctcctcagatcttacgaactggctggcggagacttggcgggtcttctagaggccctgtcggatatggggctagaagaaggtgtccgcctccttcggggacctgaaacaagagataagctaccaagtacggccgaagtcaaagaggactccgcatatgggagccagtctgtagagcaggaggctgagaaactcggcccacccccagagccccctggcggtctgtgccacggacacccccaaccccaagtacactag

SEQ ID NO: 283004 - DNA, 2703 bp, Artificial Sequence
  derived and/or modified sequence
atggagagttgttacaaccccggactggatggaatcatcgaatacgatgattttaagctaaattcctctatcgtggaacccaaggagccagcccctgagacagctgacggcccatacctagtcatagttgagcagccgaagcaacggggatttcggtttcgttacgggtgcgagggaccaagccatggaggcctgcccggtgcaagtagcgagaaaggccgaaaaacctaccctactgtaaagatttgtaattatgaaggtcccgcaaagatcgaggttgacctagtcacccatagcgatccgcctcgggctcacgcccacagcctcgttggcaagcagtgtagcgagcttggtatctgtgccgtgtctgttgggccaaaagacatgactgcgcagttcaataacttgggggtgctccatgtgacgaagaagaatatgatgggtaccatgatccaaaaactgcagagacaacgactccgctcacggcctcagggattgaccgaggctgagcaaagggagctagagcaagaagctaaagaattgaagaaagtaatggatctgtcaatcgtaagactccgtttttcagcctttctgagagcaagcgacggtagcttctcactcccactgaagccggtgatttcccagccaattcatgactctaagagtcccggagcatcaaatttaaagatctccagaatggataagaccgccggttctgtccgaggtggggatgaagtctacctgctgtgcgacaaagtccagaaagacgacatcgaagtgcggttctatgaagacgatgaaaacggatggcaggccttcggcgatttctcgcccaccgacgttcacaaacagtatgccatagtattccgcaccccgccataccacaagatgaagattgaaaggcccgtcacggtgttcctgcaacttaagaggaaacggggaggcgacgtctccgactctaaacagttcacctactacccccttgtcgaggataaggaggaggtgcagaggaagcgcaggaaagccctcccaacattctctcagccattcggtgggggaagtcacatgggagggggatctgggggtgcggcaggcggatatggaggggcaggagggggtggcagcttaggatttttcccctcctccctggcgtattctccttatcaaagtggggctggccctatggggtgctaccctggcggaggaggcggtgcacagatggctgctaccgtacctagcagagactctggggaagaggctgcagagcccagtgccccttcccgtaccccgcagtgcgagccccaggcccctgaaatgctgcagcgagctagagagtataacgcgaggctgtttgggttagcccaacgaagcgccagggccctcctggattatggcgttacggctgacgctcgcgctctcctggcagggcaacggcaccttttgaccgcacaggacgagaatggagacactccactgcacctggccattatccacgggcagacctccgtaatcgaacaaatcgtgtacgtgatacaccatgctcaagacctcggtgtggtgaatctgaccaaccacctgcaccaaacacctctacatttagcggttatcactggtcaaacctctgtggtgagcttcctgctccgagtgggagcggaccctgcactcctggatagacatggcgacagcgccatgcacctggcattgagggccggagctggcgctccggagcttctaagagctctgctacagtcgggcgcacccgcagtccctcagttgcttcatatgcctgatttcgagggtctgtaccccgtgcaccttgccgttagggccagaagccccgagtgcctcgacctcctggtggactcaggcgcagaagtggaggctactgaaaggcaggggggacgaacagctttgcatctggctactgagatggaagagctgggactagtaacacatttggtgactaagcttcgagcgaacgtgaatgcacgtacctttgctggcaacaccccactccacttggcagccggactcggttacccgacactgaccagactgctcctcaaagctggcgcagacattcacgccgagaacgaagagccgctttgtcccctgccatcccctcccacgagcgacagcgactccgactcggaaggaccagagaaggataccaggtcttctttcagaggacacacgcccctggacctaacctgcagcactaaggtgaaaactctactcctcaacgccgcacaaaacactatggagccaccccttacccctccttctcccgcaggacctggcctcagcctgggtgacacggctctacagaacttagagcagctgctggatggtcctgaggcccaggggagctgggccgagttagctgaaaggctaggactgagatcattagttgacacctatagacagaccacaagtccgtcagggtcacttcttaggagctatgagctggctgggggtgatctggcaggtcttctcgaagccttaagcgacatggggctggaggagggtgtaagattgctgcgcggaccagagacaagggataagctgcctagcaccgctgaggtgaaggaagactctgcttatggttctcagtcggttgagcaagaggctgaaaaattgggaccccctcctgagccccctggcggtctatgccacggccatccccagcctcaagtgcactag

SEQ ID NO: 283005 - DNA, 3014 bp, Artificial Sequence
  derived and/or modified sequence
actttcctgccccttccccggccaagcccaactccggatctcgctctccaccggatctcacccgccacacccggacaggcggctggaggaggcgggcgtctaaaattctgggaagcagaacctggccggagccactagacagagccgggcctagcccagagacatggagagttgctacaacccaggtctggatggtattattgaatatgatgatttcaaattgaactcctccattgtggaacccaaggagccagccccagaaacagctgatggcccctacctggtgatcgtggaacagcctaagcagagaggcttccgatttcgatatggctgtgaaggcccctcccatggaggactgcccggtgcctccagtgagaagggccgaaagacctatcccactgtcaagatctgtaactacgagggaccagccaagatcgaggtggacctggtaacacacagtgacccacctcgtgctcatgcccacagtctggtgggcaagcaatgctcggagctggggatctgcgccgtttctgtggggcccaaggacatgactgcccaatttaacaacctgggtgtcctgcatgtgactaagaagaacatgatggggactatgatacaaaaacttcagaggcagcggctccgctctaggccccagggccttacggaggccgagcagcgggagctggagcaagaggccaaagaactgaagaaggtgatggatctgagtatagtgcggctgcgcttctctgccttccttagagccagtgatggctccttctccctgcccctgaagccagtcatctcccagcccatccatgacagcaaatctccgggggcatcaaacctgaagatttctcgaatggacaagacagcaggctctgtgcggggtggagatgaagtttatctgctttgtgacaaggtgcagaaagatgacattgaggttcggttctatgaggatgatgagaatggatggcaggcctttggggacttctctcccacagatgtgcataaacagtatgccattgtgttccggacacccccctatcacaagatgaagattgagcggcctgtaacagtgtttctgcaactgaaacgcaagcgaggaggggacgtgtctgattccaaacagttcacctattaccctctggtggaagacaaggaagaggtgcagcggaagcggaggaaggccttgcccaccttctcccagcccttcgggggtggctcccacatgggtggaggctctgggggtgcagccgggggctacggaggagctggaggaggtggcagcctcggtttcttcccctcctccctggcctacagcccctaccagtccggcgcgggccccatgggctgctacccgggaggcgggggcggggcgcagatggccgccacggtgcccagcagggactccggggaggaagccgcggagccaagcgccccctccaggaccccccagtgcgagccgcaggccccggagatgctgcagcgagctcgagagtacaacgcgcgcctgttcggcctggcgcagcgcagcgcccgagccctactcgactacggcgtcaccgcggacgcgcgcgcgctgctggcgggacagcgccacctgctgacggcgcaggacgagaacggagacacaccactgcacctagccatcatccacgggcagaccagtgtcattgagcagatagtctatgtcatccaccacgcccaggacctcggcgttgtcaacctcaccaaccacctgcaccagacgcccctgcacctggcggtgatcacggggcagacgagtgtggtgagctttctgctgcgggtaggtgcagacccagctctgctggatcggcatggagactcagccatgcatctggcgctgcgggcaggcgctggtgctcctgagctgctgcgtgcactgcttcagagtggagctcctgctgtgccccagctgttgcatatgcctgactttgagggactgtatccagtacacctggcagtccgagcccgaagccctgagtgcctggatctgctggtggacagtggggctgaagtggaggccacagagcggcaggggggacgaacagccttgcatctagccacagagatggaggagctggggttggtcacccatctggtcaccaagctccgggccaacgtgaacgctcgcacctttgcgggaaacacacccctgcacctggcagctggactggggtacccgaccctcacccgcctccttctgaaggctggtgctgacatccatgctgaaaacgaggagcccctgtgcccactgccttcaccccctacctctgatagcgactcggactctgaagggcctgagaaggacacccgaagcagcttccggggccacacgcctcttgacctcacttgcagcaccaaggtgaagaccttgctgctaaatgctgctcagaacaccatggagccacccctgaccccgcccagcccagcagggccgggactgtcacttggtgatacagctctgcagaacctggagcagctgctagacgggccagaagcccagggcagctgggcagagctggcagagcgtctggggctgcgcagcctggtagacacgtaccgacagacaacctcacccagtggcagcctcctgcgcagctacgagctggctggcggggacctggcaggtctactggaggccctgtctgacatgggcctagaggagggagtgaggctgctgaggggtccagaaacccgagacaagctgcccagcacagcagaggtgaaggaagacagtgcgtacgggagccagtcagtggagcaggaggcagagaagctgggcccaccccctgagccaccaggagggctctgccacgggcacccccagcctcaggtgcactgacctgctgcctgcccccagcccccttcccggaccccctgtacagcgtccccacctatttcaaatcttatttaacaccccacacccacccctcagttgggacaaataaaggattctcatgggaaggggaggacccctccttcccaactta

SEQ ID NO: 283006 - DNA, 3101 bp, Artificial Sequence
  derived and/or modified sequence
cacggtgagtggctggattcagacccctgggtggccgggacaagagaaaagagggaggagggcctttagcggacagcgcctggggctggagagcagcagctgcacacagccggaaagggcgcgcaggcgacgacactcggatccacgtcgacaccgttgtacaaagatacgcggacccgcgggcgtctaaaattctgggaagcagaacctggccggagccactagacagagccgggcctagcccagagacatggagagttgctacaacccaggtctggatggtattattgaatatgatgatttcaaattgaactcctccattgtggaacccaaggagccagccccagaaacagctgatggcccctacctggtgatcgtggaacagcctaagcagagaggcttccgatttcgatatggctgtgaaggcccctcccatggaggactgcccggtgcctccagtgagaagggccgaaagacctatcccactgtcaagatctgtaactacgagggaccagccaagatcgaggtggacctggtaacacacagtgacccacctcgtgctcatgcccacagtctggtgggcaagcaatgctcggagctggggatctgcgccgtttctgtggggcccaaggacatgactgcccaatttaacaacctgggtgtcctgcatgtgactaagaagaacatgatggggactatgatacaaaaacttcagaggcagcggctccgctctaggccccagggccttacggaggccgagcagcgggagctggagcaagaggccaaagaactgaagaaggtgatggatctgagtatagtgcggctgcgcttctctgccttccttagagccagtgatggctccttctccctgcccctgaagccagtcatctcccagcccatccatgacagcaaatctccgggggcatcaaacctgaagatttctcgaatggacaagacagcaggctctgtgcggggtggagatgaagtttatctgctttgtgacaaggtgcagaaagatgacattgaggttcggttctatgaggatgatgagaatggatggcaggcctttggggacttctctcccacagatgtgcataaacagtatgccattgtgttccggacacccccctatcacaagatgaagattgagcggcctgtaacagtgtttctgcaactgaaacgcaagcgaggaggggacgtgtctgattccaaacagttcacctattaccctctggtggaagacaaggaagaggtgcagcggaagcggaggaaggccttgcccaccttctcccagcccttcgggggtggctcccacatgggtggaggctctgggggtgcagccgggggctacggaggagctggaggaggtggcagcctcggtttcttcccctcctccctggcctacagcccctaccagtccggcgcgggccccatgggctgctacccgggaggcgggggcggggcgcagatggccgccacggtgcccagcagggactccggggaggaagccgcggagccaagcgccccctccaggaccccccagtgcgagccgcaggccccggagatgctgcagcgagctcgagagtacaacgcgcgcctgttcggcctggcgcagcgcagcgcccgagccctactcgactacggcgtcaccgcggacgcgcgcgcgctgctggcgggacagcgccacctgctgacggcgcaggacgagaacggagacacaccactgcacctagccatcatccacgggcagaccagtgtcattgagcagatagtctatgtcatccaccacgcccaggacctcggcgttgtcaacctcaccaaccacctgcaccagacgcccctgcacctggcggtgatcacggggcagacgagtgtggtgagctttctgctgcgggtaggtgcagacccagctctgctggatcggcatggagactcagccatgcatctggcgctgcgggcaggcgctggtgctcctgagctgctgcgtgcactgcttcagagtggagctcctgctgtgccccagctgttgcatatgcctgactttgagggactgtatccagtacacctggcagtccgagcccgaagccctgagtgcctggatctgctggtggacagtggggctgaagtggaggccacagagcggcaggggggacgaacagccttgcatctagccacagagatggaggagctggggttggtcacccatctggtcaccaagctccgggccaacgtgaacgctcgcacctttgcgggaaacacacccctgcacctggcagctggactggggtacccgaccctcacccgcctccttctgaaggctggtgctgacatccatgctgaaaacgaggagcccctgtgcccactgccttcaccccctacctctgatagcgactcggactctgaagggcctgagaaggacacccgaagcagcttccggggccacacgcctcttgacctcacttgcagcaccaaggtgaagaccttgctgctaaatgctgctcagaacaccatggagccacccctgaccccgcccagcccagcagggccgggactgtcacttggtgatacagctctgcagaacctggagcagctgctagacgggccagaagcccagggcagctgggcagagctggcagagcgtctggggctgcgcagcctggtagacacgtaccgacagacaacctcacccagtggcagcctcctgcgcagctacgagctggctggcggggacctggcaggtctactggaggccctgtctgacatgggcctagaggagggagtgaggctgctgaggggtccagaaacccgagacaagctgcccagcacagcagaggtgaaggaagacagtgcgtacgggagccagtcagtggagcaggaggcagagaagctgggcccaccccctgagccaccaggagggctctgccacgggcacccccagcctcaggtgcactgacctgctgcctgcccccagcccccttcccggaccccctgtacagcgtccccacctatttcaaatcttatttaacaccccacacccacccctcagttgggacaaataaaggattctcatgggaaggggaggacccctccttcccaactta

SEQ ID NO: 283007 - protein, 852 aa, Artificial Sequence
  derived and/or modified sequence
MRGMAGPAIGAEGILTRECADQYGQGYPEEYEEHRGKGSFPAMITPAYQNAKKAHELASDIKYRQDFNKMKGAAHYHSLPAQDNLVLKQAQSVNKLVSEVEYKKDLESSRGHSINYCETPQFRNVSKISKFTSDNKYKENYQNHMRGRYEGVGMDRRTLHAMKVGSLASNVAYKADYKHDIVDYNYPATLTPSYQTAMKLVPLKDANYRQSIDKLKYSSVTDTPQIVQAKINAQQLSHVNYRADYEKNKLNYTLPQDVPQLVKAKTNAKLFSEVKYKEGWEKTKGKGFEMKLDAMSLLAAKASGELASNVHLLLSLKIKYKEEYEKTKGKAMGTADSRLLHSLQIAKMSSEVEYKKGFEESKTRFHLPMDMGVGWLTEGSLNLEQAKKAGQLVSEKNYRQRVDELKFTSVTDSSQMEHAKKSQELQSGVAYKAGNEQSVHQYTISKDEPLFLQARANAANLSEFLYRHDFVKERGKLIGPQSVRDDPRIQHCRRMGQLQSELQYRRGATSSQAQFHLPMDMVHLVHAKNAQALASDHDYRTQYHKFTALPEDLKMAWAKKAHALQSELRYKSDLIGMKGIGWLALRSPQMESAKKAGELISETKYRKKPDSIKFTTVVDSPDLVHAKNSYMHCNERMYRSGDAESLHRYTLIPDHPDFTRARLNALHLSDFRYKEAFLRDRGLQIGYRSVDDDPRMKHFLNVGRLQSDNEYKKDFAKSRSQFHSSTDQPGLLQAKRSQQLASDVHYRQPLPQPTCDPEQLGLRHAQKAHQLQSDVKYKSDLNLTRGVGWTPPGSYKVEMARRAAELANARGLGLQGAYRGAEAVEAGDHQSGEVNPDATEILHVKKKKALLL

SEQ ID NO: 283008 - DNA, 1735 bp, Artificial Sequence
  derived and/or modified sequence
agaggcagaggggtgggcgggctggcccatggctgagacctctctcccagagctggggggagaggacaaagccacgccttgccccagcatcctggagctggaggagctcctgcgggcagggaagtcttcttgcagccgtgtggacgaagtttggcccaaccttttcataggagatgcggccacggcaaacaaccgctttgagctgtggaagctgggcatcacccacgtgctgaacgccgcccacaagggcctctactgtcagggcggccctgacttctacggcagcagtgtgagctacctgggggtgccagcccacgacctccctgattttgacatcagtgcctacttctcctctgcggctgacttcatccaccgtgccctcaacacgcctggggccaaggtcctggtgcactgtgtggtgggcgtgagccgctctgccacgctggtcctggcctacctcatgctgcaccagcggctgtccctgcgccaggcggtgatcaccgtgaggcagcaccgatgggtcttccccaaccgaggcttcctgcaccagctctgcaggctggaccagcaactgcggggtgccggccagagctgaggggccagagctggtccttactccctgccatggggctctgccactttgccaccctggcactgatcctgctggtgctgctggaggctctggcccaggcggacacacagaagatggtggaagcccagcgtggggtcggccctagagcctgctactccatctggctcctcctggcgcctacaccccctctcagccactgtcttcagtctccacagaaacagcatcaagtgtgcggagacaggcggctgaaagccagcagcacgaactgcccgtcagagaagtgcacagcctgggccagatactcccacaggatggactcactgcagaagcaggacctccggaggcccaagatccatggggcagtccaggcatctccctaccagccgcccacattggcttcgctgcagcgcttgctgtgggtccgtcaggctgccacactgaaccatatcgatgaggtctggcccagcctcttcctgggagatgcgtacgcagcccgggacaagagcaagctgatccagctgggaatcacccacgttgtgaatgccgctgcaggcaagttccaggtggacacaggtgccaaattctaccgtggaatgtccctggagtactatggcatcgaggcggacgacaaccccttcttcgacctcagtgtctactttctgcctgttgctcgatacatccgagctgccctcagtgttccccaaggccgcgtgctggtacactgtgccatgggggtaagccgctctgccacacttgtcctggccttcctcatgatctgtgagaacatgacgctggtagaggccatccagacggtgcaggcccaccgcaatatctgccctaactcaggcttcctccggcagctccaggttctggacaaccgactggggcgggagacggggcggttctgatctggcaggcagccaggatccctgacccttggcccaaccccaccagcctggccctgggaacagcaggctctgctgtttctagtgaccctgagatgtaaacagcaagtgggggctgaggcagaggcagggatagctgggtggtgacctcttagcgggtggatttccctgacccaattcagagattctttatgcaaaagtgagttcagtccatctctataataaaatattcatcgtc

SEQ ID NO: 283009 - DNA, 1768 bp, Artificial Sequence
  derived and/or modified sequence
actggagaggcagagaggagtgaccacagaggcagaggggtgggcgggctggcccatggctgagacctctctcccagagctggggggagaggacaaagccacgccttgccccagcatcctggagctggaggagctcctgcgggcagggaagtcttcttgcagccgtgtggacgaagtttggcccaaccttttcataggagatgcggccacggcaaacaaccgctttgagctgtggaagctgggcatcacccacgtgctgaacgccgcccacaagggcctctactgtcagggcggccctgacttctacggcagcagtgtgagctacctgggggtgccagcccacgacctccctgattttgacatcagtgcctacttctcctctgcggctgacttcatccaccgtgccctcaacacgcctggggccaaggtcctggtgcactgtgtggtgggcgtgagccgctctgccacgctggtcctggcctacctcatgctgcaccagcggctgtccctgcgccaggcggtgatcaccgtgaggcagcaccgatgggtcttccccaaccgaggcttcctgcaccagctctgcaggctggaccagcaactgcggggtgccggccagagctgaggggccagagctggtccttactccctgccatggggctctgccactttgccaccctggcactgatcctgctggtgctgctggaggctctggcccaggcggacacacagaagatggtggaagcccagcgtggggtcggccctagagcctgctactccatctggctcctcctggcgcctacaccccctctcagccactgtcttcagtctccacagaaacagcatcaagtgtgcggagacaggcggctgaaagccagcagcacgaactgcccgtcagagaagtgcacagcctgggccagatactcccacaggatggactcactgcagaagcaggacctccggaggcccaagatccatggggcagtccaggcatctccctaccagccgcccacattggcttcgctgcagcgcttgctgtgggtccgtcaggctgccacactgaaccatatcgatgaggtctggcccagcctcttcctgggagatgcgtacgcagcccgggacaagagcaagctgatccagctgggaatcacccacgttgtgaatgccgctgcaggcaagttccaggtggacacaggtgccaaattctaccgtggaatgtccctggagtactatggcatcgaggcggacgacaaccccttcttcgacctcagtgtctactttctgcctgttgctcgatacatccgagctgccctcagtgttccccaaggccgcgtgctggtacactgtgccatgggggtaagccgctctgccacacttgtcctggccttcctcatgatctgtgagaacatgacgctggtagaggccatccagacggtgcaggcccaccgcaatatctgccctaactcaggcttcctccggcagctccaggttctggacaaccgactggggcgggagacggggcggttctgatctggcaggcagccaggatccctgacccttggcccaaccccaccagcctggccctgggaacagcaggctctgctgtttctagtgaccctgagatgtaaacagcaagtgggggctgaggcagaggcagggatagctgggtggtgacctcttagcgggtggatttccctgacccaattcagagattctttatgcaaaagtgagttcagtccatctctataataaaatattcatcgtcataaag

SEQ ID NO: 283010 - DNA, 1887 bp, Artificial Sequence
  derived and/or modified sequence
atggctccgagcgctgatcccggtatgagcaggatgttacccttccttctactgctgtggttcctgcccatcacagagggttcacagcgcgctgaacctatgttcaccgctgtcactaacagcgtgctacctcccgattacgatagcaaccccactcagctgaattatggagtcgctgtcacagatgttgatcatgacggcgactttgagattgttgtggctggctacaatggcccaaacctggtgcttaagtatgatcgtgcccagaaaagattggtgaatattgccgtggacgagaggtcgtccccttattacgctctgagggaccgacaaggtaatgctatcggggtcaccgcatgcgatatcgacggagatggtcgagaggaaatctattttttgaataccaacaacgccttcagtggtgtcgccacgtacacggacaaactgttcaaatttagaaacaataggtgggaggacatcctatccgatgaggtcaacgtggcccgaggtgtggcaagtctattcgctgggagatctgtggcatgcgtggatcgtaaaggaagtgggagatattcgatctatattgctaactatgcctatggcaacgtgggacccgatgccctgatcgaaatggaccccgaggcatcagatctctcccggggtatcctggctctccgcgacgtggcagccgaggccggagtcagcaaatacacaggtggccgaggcgtttcggtcggtccgatccttagctcctccgcatcggacatcttctgcgataacgagaacggccctaatttcttgtttcacaaccgtggtgacggaacctttgtggacgcagccgctagtgctggggttgatgacccacatcagcatggtcggggagttgctttggccgattttaaccgcgatgggaaggtggatatcgtctacggcaactggaacgggccacacagactttacctgcaaatgagtactcacggcaaagtgcgtttccgggatatagcatcacctaaattttcaatgccttctccagtcagaacagttatcacggctgactttgacaatgaccaagagctggagatcttcttcaacaatatcgcgtacagaagttcatccgccaaccgactttttcgggttattaggagagagcatggcgatccgctgatagaggagctcaaccctggtgacgcactggaacctgagggcagagggacgggcggtgtggtgaccgatttcgacggcgacgggatgctggatctgattttgagccacggagaatccatggctcaaccactttctgtgtttcggggtaatcagggtttcaacaacaactggctcagggttgtccctagaactaggtttggcgcttttgccagaggagctaaggtcgtactgtacaccaaaaagtcaggcgcacacctacgtattatcgacggtggtagtggctacctatgcgaaatggagcccgtggctcattttggcctaggtaaggacgaagcaagctccgtagaggtcacctggcctgatggcaagatggtttcgcgcaatgtcgcgtctggggagatgaactctgtgctcgagattctctacccaagggatgaggacacactgcaagatccagcccctctggagacacctatgaacgccagctcaagccactcatgcgcactggaaacgagcccgtacgttagcacacctatggaagccacaggcgcaggacccaccagatcagcggtgggcgctaccagtcctacgcgaatggcccagccggcatggggactgtcagcctctcatcgcgctccagcccctcctcctccacccctgttgctcccgcttcccctattactgccactcttggagcttcctctcttacatagatcttcgtag

SEQ ID NO: 283011 - DNA, 1575 bp, Artificial Sequence
  derived and/or modified sequence
tacgccctgcgcgaccgccaggggaatgcaattggggtgaccgcttgtgacatcgatggagacgggagggaggagatctactttctgaacaccaacaacgccttttcaggagttgcaacttacaccgataagttgtttaaattcaggaacaaccgctgggaggacattctctcggatgaggtgaacgtggcaagaggcgtggcgtccctgtttgcgggacgcagtgtcgcttgtgttgatagaaagggcagcgggaggtattccatttacattgctaattacgcttatgggaacgtgggcccagacgctctgatcgagatggaccccgaagctagcgacctgagcaggggaatcctcgcattgcgggacgttgctgccgaggctggcgtgtcgaaatatacgggcggaagaggagtgtctgtgggccctatcctgagctcctcagcgtccgacatattctgcgataacgagaacgggcctaattttctatttcacaacagaggtgatggaacctttgtcgacgcggctgctagcgctggtgtcgacgatccccatcagcacgggagaggggtcgccttggctgacttcaatcgggacggcaaggtggatatcgtgtacgggaactggaatggcccacatcgactttatttacaaatgtccacacacggcaaggtccgattcagagatatagcgagtccgaaatttagcatgccttcccctgtgagaaccgtcatcacagcagacttcgataacgatcaggaactggaaatcttcttcaataacatcgcctatagatccagcagtgccaatagacttttcagggtgatccgtagggaacacggagaccctctgatagaggaactaaacccaggggatgcgctcgagcctgaaggcaggggcaccggcggagttgtgactgactttgacggggacggaatgttggatctgatcttgtcacacggggaatctatggctcaacccctatcagtgtttcggggaaatcaagggtttaacaataattggctgagagttgtgcccaggacaaggtttggagcattcgccaggggtgccaaagtcgtactgtacactaagaagtccggcgcacatcttagaataattgacggcggatcaggctatctctgtgagatggaaccggttgcacatttcggattaggtaaagatgaagcctcaagcgttgaggtgacctggcccgacggaaagatggtatctcgcaatgtggcaagcggagagatgaactcggtactcgagatcctttatcccagggacgaagatacacttcaggacccagcacccctggaaactcctatgaatgcctcttccagtcattcctgtgcactggagacgtctccctacgtgtccaccccgatggaagcgacaggagcagggcctacacgatccgccgtgggagctacctctccaacccgtatggcgcagcccgcatggggacttagtgccagccacagggcccctgcacctccccctcctccattactgcttcccctcccactgctgctgccactccttgaactgccgctgctgcacaggtcatcttag

SEQ ID NO: 283012 - DNA, 2179 bp, Artificial Sequence
  derived and/or modified sequence
tacgcgctgcgggaccggcaggggaacgccatcggggtcacagcctgcgacatcgacggggacggccgggaggagatctacttcctcaacaccaataatgccttctcgggggtggccacgtacaccgacaagttgttcaagttccgcaataaccggtgggaagacatcctgagcgatgaggtcaacgtggcccgtggtgtggccagcctctttgccggacgctctgtggcctgtgtggacagaaagggctctggacgctactctatctacattgccaattacgcctacggtaatgtgggccctgatgccctcattgaaatggaccctgaggccagtgacctctcccggggcattctggcgctcagagatgtggctgctgaggctggggtcagcaaatatacagggggccgaggcgtcagcgtgggccccatcctcagcagcagtgcctcggatatcttctgcgacaatgagaatgggcctaacttccttttccacaaccggggcgatggcacctttgtggacgctgcggccagtgctggtgtggacgacccccaccagcatgggcgaggtgtcgccctggctgacttcaaccgtgatggcaaagtggacatcgtctatggcaactggaatggcccccaccgcctctatctgcaaatgagcacccatgggaaggtccgcttccgggacatcgcctcacccaagttctccatgccctcccctgtccgcacggtcatcaccgccgactttgacaatgaccaggagctggagatcttcttcaacaacattgcctaccgcagctcctcagccaaccgcctcttccgcgtcatccgtagagagcacggagaccccctcatcgaggagctcaatcccggcgacgccttggagcctgagggccggggcacagggggtgtggtgaccgacttcgacggagacgggatgctggacctcatcttgtcccatggagagtccatggctcagccgctgtccgtcttccggggcaatcagggcttcaacaacaactggctgcgagtggtgccacgcacccggtttggggcctttgccaggggagctaaggtcgtgctctacaccaagaagagtggggcccacctgaggatcatcgacgggggctcaggctacctgtgtgagatggagcccgtggcacactttggcctggggaaggatgaagccagcagtgtggaggtgacgtggccagatggcaagatggtgagccggaacgtggccagcggggagatgaactcagtgctggagatcctctacccccgggatgaggacacacttcaggacccagccccactggagacaccaatgaatgcatccagttcccattcgtgtgccctcgagacaagcccgtatgtgtcaacacctatggaagctacaggtgccggaccaacaagaagtgcagtcggggctacgagcccaacgaggatggcacagcctgcgtggggactctcggccagtcaccgggcccccgccccaccacccccaccgctgctgctgccactgccgctgctgctgccgctgctggagctgccactgctgcaccggtcctcgtagatggagatctcaatctggggtcggtggttaaggagagctgcgagcccagctgctgagcaggggtgggacatgaaccagcggatggagtccagcaggggagtgggaaagtgggcttgtgctgctgcctagacagtagggatgtaaaggcctgggagctagaccctccccaagcccatccatgcacattacttagctaacaattagggagactcgtaaggccaggccctgtgctgggcacatagctgtgatcacagcagacagggtcgctgccctgatggcgcttacattccagtgggtctaatgaccatatcttaggacacagatgtgcccagggaggtggtgtcactgcacaggaagtatgaggactttagtgtcctgagttcaaatcctgattcaggaactcacaaagctatgtgaccttacaccagtcacttaacttgttagccatccattatcgcatctgcaaaatggggattaagaatagaatcttggggttagtgtggagattagattaaatgtatgtaagacacttggcacaaaacctggcacatagtaaaggctcaataaaaacaagtgcctctcactgggctttgtcaacacgtga

SEQ ID NO: 283013 - DNA, 1887 bp, Artificial Sequence
  derived and/or modified sequence
atggctccaagcgctgaccctggtatgagtaggatgctacccttccttctgctcctctggttcctgcctatcaccgagggatcacagcgagcagaaccaatgtttactgcagtaaccaatagtgtgttacccccagattacgacagcaaccccacccagttgaattatggggtggcggtcacggatgtggaccacgatggggatttcgagattgttgtggctggatataacggccccaatctggtgctgaaatatgacagagcgcagaagaggctggtgaacatagccgttgatgagcgcagttccccatactacgcattgagggaccgacagggaaacgctataggggtgacggcgtgcgatattgatggagatgggcgcgaagaaatctattttcttaatactaacaatgcctttagcggtgtggccacctatacggataaactatttaagttcagaaataataggtgggaagatatcctatcagacgaggtcaacgtcgcacgtggcgttgcctccctcttcgccggacgatctgtagcctgtgttgacagaaagggctcagggcgatattcaatttacatagctaattatgcttatggaaacgtcggacccgatgcactcatcgagatggatccagaagcatctgacttgtcgagaggaattctggccctgcgagacgtcgctgcggaggcgggtgtctctaagtacaccggcggccgcggagtaagcgtggggccaattctctcctcctctgcttcagatatattctgcgacaacgagaacggccccaacttcctctttcacaatcgaggagacgggactttcgtggacgcagcagccagcgctggcgttgatgaccctcatcagcacggtcgaggtgtggccttggccgattttaaccgggacggtaaagtggacattgtctatggtaattggaacggcccccacagactatatcttcagatgtcaacccatgggaaagtcaggttccgagatattgcaagtcccaagttcagcatgccatctcccgtgcgcaccgtgataacggccgactttgacaatgatcaggagctggagatcttcttcaataacatcgcctatcggtcatccagcgctaacaggcttttccgcgtgatcagaagggagcatggtgaccccctcattgaggaacttaaccccggcgacgccttagaacctgaagggcgcgggaccggtggagtcgtgacagacttcgatggcgacggcatgctcgatctgatcttgagccatggcgagtcaatggcacaaccactgtctgtcttccgaggaaatcagggctttaacaataattggttgagggtggtaccaagaacacgctttggagcatttgcgagaggcgctaaagtcgtactttacaccaagaagtcaggggcccatctgagaatcatcgacggcggctccggttacctttgtgagatggaacccgtagcacactttggtctgggtaaagatgaagcaagctcagtcgaagttacgtggcccgatggtaagatggtgtccaggaacgtggcctcaggcgaaatgaattcagttcttgaaatcctttatcccagagatgaggacaccttgcaggatcccgctccactggagacaccgatgaacgccagcagttctcactcctgtgccttggagacctccccctacgtcagcacgccgatggaggcgaccggggcaggtcctactaggtcggctgtgggcgctacctctccaactagaatggctcagccagcctggggcttgtcagccagccatcgtgcacccgctccccctcctcctcccctcctgctcccactgcccctcctcttgccactattagaattacctctcctgcaccggtcaagttag

SEQ ID NO: 283014 - DNA, 1575 bp, Artificial Sequence
  derived and/or modified sequence
tacgccctcagagacaggcagggaaatgctattggagttaccgcttgcgacatagatggagacggcagggaagaaatctatttcttaaatacaaacaatgcattcagtggagttgctacatacacagataagctgtttaagttccgtaataaccggtgggaagatattctgtcagacgaagtcaacgttgcgaggggggtcgccagcctgtttgcaggtcggtctgtcgcctgcgtcgacaggaaaggctcagggcggtacagcatatacatcgctaattacgcttacggaaatgtgggacctgacgctctcattgagatggaccctgaagcatcagacttatctagaggcatcctggccctcagggatgtcgccgcggaggccggcgtcagcaaatatacaggcgggaggggagtatctgttggacccatcctcagttcatctgccagcgacattttttgcgataacgaaaatgggccaaactttttgttccacaacagaggtgatggaacatttgttgacgctgctgcaagtgcaggagtcgatgaccctcatcagcacggtagaggagtggctttggctgacttcaatagagacggcaaagtggacatagtctacggaaactggaatggcccccatcggttgtacctccagatgtcgactcacggaaaggtccggttccgcgacatcgcctctcctaaattctctatgccttctcccgtgcgaaccgtgatcaccgccgattttgacaacgatcaggagcttgagattttctttaataacatcgcctatcggagtagctccgccaacagactttttcgtgtaatcaggcgagaacatggggatccactaatcgaagaacttaaccctggggacgcactcgaacctgaaggcagaggaacgggaggcgtcgtcactgactttgacggagacggcatgcttgatctgatcctgtcgcatggagagtcgatggcgcaacccctgtcagtatttagaggaaatcagggctttaataataattggttgagagttgttcctaggacacggttcggagcgtttgcaaggggggccaaggtggtgctgtataccaagaaaagcggggcgcatctgcgcattatcgacggtggcagtggctatctatgcgagatggaacccgtcgcccatttcggtcttggaaaggatgaagcttctagtgttgaagtaacgtggccagatggaaagatggtgtctagaaacgtagcttccggtgagatgaattcagttctggagattctgtacccccgcgacgaggacactcttcaggacccagctcccttagagacaccgatgaatgctagttcaagccacagctgcgcactggaaacctcaccctatgtttccacaccaatggaagctaccggggcagggcctactcgctcagccgtaggcgcgactagtcctacccggatggcacagccggcatggggcttgtcggcgtcccaccgggcccccgctcctcctccacccccacttctcctgccgctacctctcctccttcctttactggaactgcctctcctgcaccgctcctcttag

SEQ ID NO: 283015 - DNA, 1887 bp, Artificial Sequence
  derived and/or modified sequence
atggccccttccgcagaccctgggatgtcgcgcatgctgccattcctactcctcctatggttcctcccaatcactgagggcagtcagcgagctgagcccatgtttacggcagtgacgaatagtgttttgccacctgattatgattccaatcccacacagcttaattatggagtggcagtgacagatgtggaccacgatggagatttcgaaatcgtcgttgccggctacaacggcccgaatctggtactgaagtacgaccgagcacagaaaagattagttaacatcgccgtggacgaaaggagttccccttattatgctctgagggatcgccagggaaatgccatcggcgtgaccgcatgtgacatcgacggcgatggccgcgaggaaatttacttcctaaacacgaataatgctttctcaggagtcgccacttacacagataagctattcaaattccggaataacagatgggaagacatccttagtgatgaagtcaatgtagcgagaggggtagctagtctctttgcaggaaggagcgttgcttgcgttgatcgcaagggaagtggacgctattctatctacatagccaactacgcgtacggaaacgtaggacccgatgccctaatcgaaatggaccctgaagcatcagacctgtccagagggatacttgccctgcgcgatgttgcagctgaagccggggtgtcaaagtacaccggaggccgcggcgtgtcagtgggaccaattctctccagtagtgcctccgatatcttctgtgacaacgagaatggccctaacttccttttccacaaccgcggagacggtacttttgtggatgctgccgcctcagcaggcgtggacgatccgcatcagcacggaagaggcgtggccctagccgacttcaatcgcgatgggaaggtagacattgtttacggcaactggaacggcccgcatagactttatctgcagatgagtacacacggaaaggtcaggttcagggatatcgctagccctaagttttccatgccaagcccagtgagaaccgtgatcacagcagattttgataatgatcaagagttagagattttttttaataatattgcctaccgctcttcatctgcaaatagactgtttcgagtgattaggcgggaacatggcgatcctctgattgaagagctgaatcctggagacgccctcgaacctgaagggcgggggaccggcggtgtggtgacagattttgacggcgacggcatgctcgatttaatccttagccacggcgaatcaatggcacagccccttagtgtttttcgcgggaaccagggattcaataacaactggctaagagttgtccccagaacccgattcggcgcgttcgccagaggcgccaaagtggttctctatactaaaaagagtggagcgcatttaagaattatcgatggaggctcaggatatctgtgcgaaatggaaccagtggcacattttgggcttggcaaggacgaggcctcttcagtagaagtgacctggcctgacggaaaaatggtaagcaggaacgtggcctccggcgagatgaacagtgtgctggaaatactgtacccccgcgatgaagacaccctgcaagacccagcccccctcgagacacctatgaacgcttcaagctcccattcctgcgctctggagacttcaccgtacgtgtccacccccatggaagcaactggcgctggtcccacaagatctgccgtgggcgcgactagtcccacccgtatggcacagccagcctggggcctctccgctagtcatagagctcccgctccccctcctcctcccctcctgctcccactgcccctcctcttgccactattagaattacctctcctgcaccggtcaagttag

SEQ ID NO: 283016 - DNA, 1575 bp, Artificial Sequence
  derived and/or modified sequence
tacgccctcagagacaggcagggaaatgctattggagttaccgcttgcgacatagatggagacggcagggaagaaatctatttcttaaatacaaacaatgcattcagtggagttgctacatacacagataagctgtttaagttccgtaataaccggtgggaagatattctgtcagacgaagtcaacgttgcgaggggggtcgccagcctgtttgcaggtcggtctgtcgcctgcgtcgacaggaaaggctcagggcggtacagcatatacatcgctaattacgcttacggaaatgtgggacctgacgctctcattgagatggaccctgaagcatcagacttatctagaggcatcctggccctcagggatgtcgccgcggaggccggcgtcagcaaatatacaggcgggaggggagtatctgttggacccatcctcagttcatctgccagcgacattttttgcgataacgaaaatgggccaaactttttgttccacaacagaggtgatggaacatttgttgacgctgctgcaagtgcaggagtcgatgaccctcatcagcacggtagaggagtggctttggctgacttcaatagagacggcaaagtcgatatcgtttacggaaattggaatggcccacaccggttatacctgcaaatgtctacccacgggaaggttcgcttcagagatattgcctctccaaagttctcgatgccttcccctgtacggaccgtaattaccgccgatttcgataacgatcaggaactggaaatcttctttaacaacattgcttacagatcctctagtgccaacagactgtttagagtgattagaagggaacacggcgatccacttatcgaagagctaaaccctggcgatgcactggaaccagaaggacgtggcacaggaggagtggtgactgactttgacggagatggcatgctcgatcttatcctgagtcacggcgagagcatggcacagcctttaagtgtttttagaggtaatcaaggcttcaacaataactggcttagggtcgtcccaagaactcgctttggagcgtttgcccgcggcgcaaaggtggttctatataccaagaaatccggagcacatcttcgtatcattgacggcggctcaggttacctgtgtgagatggaaccagtggcacacttcggcctcggcaaagatgaagcttcctctgtggaggtcacctggcctgatggtaagatggtaagccgaaatgtcgcctccggggagatgaattcagtgctggaaatcctatatcccagagacgaagacacgctgcaggaccccgccccactggagactccaatgaacgcgtcttctagtcactcatgcgcactggagactagtccttacgtgtccacaccaatggaagctactggagccggaccaacgcgtagtgctgtgggagctacctcccctacccgcatggctcaacccgcctggggcctgtccgcatctcacagagcccctgcccctccgccacctcctctcctgttaccactccccttactgctgccacttcttgaacttcctctcctacatagatctagttag

SEQ ID NO: 283017 - DNA, 2846 bp, Artificial Sequence
  derived and/or modified sequence
ctggctgccggctgctgccaccgcaatcccggctcctaaatcagcgcggggaggcgctccctccccacgcccggctctccgggctctcggggccgcgattggccgcgccggcgccccccaccccgggcccccggctccagctgccgcgccattggctgcgggcctccgccagcctttacataagaccgggcgcgctcgagtggagttgtataaagcgagcgcgcggcgtcggggcgggaggctcgaggccagcccgggaccggggctgggagcaagcaggcggcggcgccggcggcagaggcggcagcgagcgcccgcttcccacgcccctaggcggcggggccgagagcgggaggatggctccgagcgctgaccccggcatgtccaggatgttaccgttcctgctgctgctctggtttctgcccatcactgaggggtcccagcgggctgaacccatgttcactgcagtcaccaactcagttctgcctcctgactatgacagtaatcccacccagctcaactatggtgtggcagttactgatgtggaccatgatggggactttgagatcgtcgtggcggggtacaatggacccaacctggttctgaagtatgaccgggcccagaagcggctggtgaacatcgcggtcgatgagcgcagctcaccctactacgcgctgcgggaccggcaggggaacgccatcggggtcacagcctgcgacatcgacggggacggccgggaggagatctacttcctcaacaccaataatgccttctcgggggtggccacgtacaccgacaagttgttcaagttccgcaataaccggtgggaagacatcctgagcgatgaggtcaacgtggcccgtggtgtggccagcctctttgccggacgctctgtggcctgtgtggacagaaagggctctggacgctactctatctacattgccaattacgcctacggtaatgtgggccctgatgccctcattgaaatggaccctgaggccagtgacctctcccggggcattctggcgctcagagatgtggctgctgaggctggggtcagcaaatatacagggggccgaggcgtcagcgtgggccccatcctcagcagcagtgcctcggatatcttctgcgacaatgagaatgggcctaacttccttttccacaaccggggcgatggcacctttgtggacgctgcggccagtgctggtgtggacgacccccaccagcatgggcgaggtgtcgccctggctgacttcaaccgtgatggcaaagtggacatcgtctatggcaactggaatggcccccaccgcctctatctgcaaatgagcacccatgggaaggtccgcttccgggacatcgcctcacccaagttctccatgccctcccctgtccgcacggtcatcaccgccgactttgacaatgaccaggagctggagatcttcttcaacaacattgcctaccgcagctcctcagccaaccgcctcttccgcgtcatccgtagagagcacggagaccccctcatcgaggagctcaatcccggcgacgccttggagcctgagggccggggcacagggggtgtggtgaccgacttcgacggagacgggatgctggacctcatcttgtcccatggagagtccatggctcagccgctgtccgtcttccggggcaatcagggcttcaacaacaactggctgcgagtggtgccacgcacccggtttggggcctttgccaggggagctaaggtcgtgctctacaccaagaagagtggggcccacctgaggatcatcgacgggggctcaggctacctgtgtgagatggagcccgtggcacactttggcctggggaaggatgaagccagcagtgtggaggtgacgtggccagatggcaagatggtgagccggaacgtggccagcggggagatgaactcagtgctggagatcctctacccccgggatgaggacacacttcaggacccagccccactggagacaccaatgaatgcatccagttcccattcgtgtgccctcgagacaagcccgtatgtgtcaacacctatggaagctacaggtgccggaccaacaagaagtgcagtcggggctacgagcccaacgaggatggcacagcctgcgtggggactctcggccagtcaccgggcccccgccccaccacccccaccgctgctgctgccactgccgctgctgctgccgctgctggagctgccactgctgcaccggtcctcgtagatggagatctcaatctggggtcggtggttaaggagagctgcgagcccagctgctgagcaggggtgggacatgaaccagcggatggagtccagcaggggagtgggaaagtgggcttgtgctgctgcctagacagtagggatgtaaaggcctgggagctagaccctccccaagcccatccatgcacattacttagctaacaattagggagactcgtaaggccaggccctgtgctgggcacatagctgtgatcacagcagacagggtcgctgccctgatggcgcttacattccagtgggtctaatgaccatatcttaggacacagatgtgcccagggaggtggtgtcactgcacaggaagtatgaggactttagtgtcctgagttcaaatcctgattcaggaactcacaaagctatgtgaccttacaccagtcacttaacttgttagccatccattatcgcatctgcaaaatggggattaagaatagaatcttggggttagtgtggagattagattaaatgtatgtaagacacttggcacaaaacctggcacatagtaaaggctcaataaaaacaagtgcctctcactgggctttgtcaacacgtg

SEQ ID NO: 283018 - DNA, 1887 bp, Artificial Sequence
  derived and/or modified sequence
atggcccccagcgccgaccccggcatgagcagaatgctgcccttcctgctgctgctgtggttcctgcccatcaccgagggcagccagagagccgagcccatgttcaccgccgtgaccaacagcgtgctgccccccgactacgacagcaaccccacccagctgaactacggcgtggccgtgaccgacgtggaccacgacggcgacttcgagatcgtggtggccggctacaacggccccaacctggtgctgaagtacgacagagcccagaagagactggtgaacatcgccgtggacgagagaagcagcccctactacgccctgagagacagacagggcaacgccatcggcgtgaccgcctgcgacatcgacggcgacggcagagaggagatctacttcctgaacaccaacaacgccttcagcggcgtggccacctacaccgacaagctgttcaagttcagaaacaacagatgggaggacatcctgagcgacgaggtgaacgtggccagaggcgtggccagcctgttcgccggcagaagcgtggcctgcgtggacagaaagggcagcggcagatacagcatctacatcgccaactacgcctacggcaacgtgggccccgacgccctgatcgagatggaccccgaggccagcgacctgagcagaggcatcctggccctgagagacgtggccgccgaggccggcgtgagcaagtacaccggcggcagaggcgtgagcgtgggccccatcctgagcagcagcgccagcgacatcttctgcgacaacgagaacggccccaacttcctgttccacaacagaggcgacggcaccttcgtggacgccgccgccagcgccggcgtggacgacccccaccagcacggcagaggcgtggccctggccgacttcaacagagacggcaaggtggacatcgtgtacggcaactggaacggcccccacagactgtacctgcagatgagcacccacggcaaggtgagattcagagacatcgccagccccaagttcagcatgcccagccccgtgagaaccgtgatcaccgccgacttcgacaacgaccaggagctggagatcttcttcaacaacatcgcctacagaagcagcagcgccaacagactgttcagagtgatcagaagagagcacggcgaccccctgatcgaggagctgaaccccggcgacgccctggagcccgagggcagaggcaccggcggcgtggtgaccgacttcgacggcgacggcatgctggacctgatcctgagccacggcgagagcatggcccagcccctgagcgtgttcagaggcaaccagggcttcaacaacaactggctgagagtggtgcccagaaccagattcggcgccttcgccagaggcgccaaggtggtgctgtacaccaagaagagcggcgcccacctgagaatcatcgacggcggcagcggctacctgtgcgagatggagcccgtggcccacttcggcctgggcaaggacgaggccagcagcgtggaggtgacctggcccgacggcaagatggtgagcagaaacgtggccagcggcgagatgaacagcgtgctggagatcctgtaccccagagacgaggacaccctgcaggaccccgcccccctggagacccccatgaacgccagcagcagccacagctgcgccctggagaccagcccctacgtgagcacccccatggaggccaccggcgccggccccaccagaagcgccgtgggcgccaccagccccaccagaatggcccagcccgcctggggcctgagcgccagccacagagcccccgcccccccccccccccccctgctgctgcccctgcccctgctgctgcccctgctggagctgcccctgctgcacagaagcagctag

SEQ ID NO: 283019 - DNA, 1575 bp, Artificial Sequence
  derived and/or modified sequence
tacgccctgagagacagacagggcaacgccatcggcgtgaccgcctgcgacatcgacggcgacggcagagaggagatctacttcctgaacaccaacaacgccttcagcggcgtggccacctacaccgacaagctgttcaagttcagaaacaacagatgggaggacatcctgagcgacgaggtgaacgtggccagaggcgtggccagcctgttcgccggcagaagcgtggcctgcgtggacagaaagggcagcggcagatacagcatctacatcgccaactacgcctacggcaacgtgggccccgacgccctgatcgagatggaccccgaggccagcgacctgagcagaggcatcctggccctgagagacgtggccgccgaggccggcgtgagcaagtacaccggcggcagaggcgtgagcgtgggccccatcctgagcagcagcgccagcgacatcttctgcgacaacgagaacggccccaacttcctgttccacaacagaggcgacggcaccttcgtggacgccgccgccagcgccggcgtggacgacccccaccagcacggcagaggcgtggccctggccgacttcaacagagacggcaaggtggacatcgtgtacggcaactggaacggcccccacagactgtacctgcagatgagcacccacggcaaggtgagattcagagacatcgccagccccaagttcagcatgcccagccccgtgagaaccgtgatcaccgccgacttcgacaacgaccaggagctggagatcttcttcaacaacatcgcctacagaagcagcagcgccaacagactgttcagagtgatcagaagagagcacggcgaccccctgatcgaggagctgaaccccggcgacgccctggagcccgagggcagaggcaccggcggcgtggtgaccgacttcgacggcgacggcatgctggacctgatcctgagccacggcgagagcatggcccagcccctgagcgtgttcagaggcaaccagggcttcaacaacaactggctgagagtggtgcccagaaccagattcggcgccttcgccagaggcgccaaggtggtgctgtacaccaagaagagcggcgcccacctgagaatcatcgacggcggcagcggctacctgtgcgagatggagcccgtggcccacttcggcctgggcaaggacgaggccagcagcgtggaggtgacctggcccgacggcaagatggtgagcagaaacgtggccagcggcgagatgaacagcgtgctggagatcctgtaccccagagacgaggacaccctgcaggaccccgcccccctggagacccccatgaacgccagcagcagccacagctgcgccctggagaccagcccctacgtgagcacccccatggaggccaccggcgccggccccaccagaagcgccgtgggcgccaccagccccaccagaatggcccagcccgcctggggcctgagcgccagccacagagcccccgcccccccccccccccccctgctgctgcccctgcccctgctgctgcccctgctggagctgcccctgctgcacagaagcagctag

SEQ ID NO: 283020 - DNA, 1887 bp, Artificial Sequence
  derived and/or modified sequence
atggctcccagcgccgatcctggaatgagtcgaatgctaccctttttgcttctcctgtggttcctgcctattaccgagggtagccaacgagccgaacccatgttcactgctgtcaccaattccgttttgccaccagattacgactccaacccaacccagttaaattatggagtggcagttactgatgtggaccatgacggggactttgagattgtggtagcagggtacaacggacccaatctggtgttgaaatacgatagggcccagaaacggctagtcaatattgctgtggatgagcgcagctcaccatactatgctttaagggatcggcaagggaatgcgataggtgtcacagcttgtgatatcgatggcgatggcagagaagaaatctattttcttaacacgaataacgcattttccggtgtagccacttatactgacaaactattcaaattccggaacaacaggtgggaggacatcctctctgatgaagttaacgtggccaggggcgtggcaagcctatttgcaggacggtccgtggcttgcgtagaccgaaaaggaagcgggaggtacagtatctatatcgctaattacgcttatggtaatgtggggccagatgccctcattgaaatggaccctgaagcctctgatttaagtaggggcattctcgctttgcgtgatgtggctgccgaagctggagtaagtaagtatacagggggtaggggggtgtcggtggggcctatcttatcctcctcagccagtgacattttctgtgacaatgagaacggaccaaattttctgttccacaatagaggtgacggcaccttcgtggatgccgcagcgtccgctggggtggatgatccacaccagcacgggagaggagtagcgctcgccgacttcaatcgggatggaaaggtggacatcgtctacgggaattggaatggcccgcacagactgtacctgcagatgagcactcacgggaaggtgaggttccgtgacatcgccagccctaaattttcgatgccatctccggtgagaaccgtgattacggctgactttgataatgaccaagagctcgaaatattttttaacaacatcgcatacagaagttccagcgctaatcggctttttcgggtgattcgcagagagcacggggatccccttattgaggagttgaaccctggagatgcgctggaaccagaaggacgcggtactgggggagtagtgacagacttcgatggggatggcatgctcgatttgatactgtctcatggtgagagcatggctcaaccgctgtctgtgtttcgagggaatcagggatttaacaataactggcttagagtagttccaaggaccaggtttggtgcatttgcccgtggggcaaaggtagttctctacacaaaaaagagcggcgcccacctccgaataatagatgggggttcaggatatctgtgcgaaatggaaccagttgcacacttcggacttggcaaggacgaagctagtagcgtcgaggttacatggcctgatggaaaaatggtcagtcgcaacgtcgcctctggggaaatgaacagcgtgctagagatcctgtacccgagggatgaagacacattgcaagatcccgcccctttggagacgcccatgaatgccagcagctcacacagttgtgcccttgaaacatcgccttacgtctccacccccatggaagcgaccggagcgggccccaccaggtcagccgttggggcgaccagccccactcggatggcccagccagcatggggtctttctgcttcacatcgcgccccagctccaccacccccgcccctgctgctgcccctccctctgcttctgccccttctggagctgcccctgcttcacagatcaagctag

SEQ ID NO: 283021 - DNA, 1575 bp, Artificial Sequence
  derived and/or modified sequence
tatgccctgagggataggcagggaaatgcaattggagtaacggcttgtgatatcgatggggatggacgggaggaaatctacttcctcaacactaacaatgcgttctccggtgtcgcgacctataccgacaaattgttcaaatttcggaataacaggtgggaggatatattgtcagacgaggtgaatgtcgctcgcggagttgcttctctgttcgctggacggagcgtggcctgtgtggaccgaaagggcagcggccggtatagcatatacatcgctaactacgcctacggaaacgttggcccagacgcgttgatcgaaatggaccctgaggcgagcgatctctcccgaggtatactcgccctgcgggatgtagccgctgaagctggcgtcagcaagtacacaggaggcaggggcgtgtccgtgggtcccatactctcttctagcgcttccgatattttttgtgacaacgagaatggacctaacttcctgttccataatcggggcgatgggacattcgtggatgcagccgcatcagcaggtgtggacgatccccaccagcacggtcgaggggtcgccctcgctgacttcaaccgagacggtaaggttgacatcgtttatggcaattggaacgggcctcatcggttataccttcaaatgtcaacacacggtaaagtacgcttccgggacattgcttcgcccaagttcagcatgcctagtcccgtgcggacagtaatcacagctgattttgataacgaccaggagctagagattttctttaataatattgcataccgctcatcatccgccaaccgtttattcagggttatccgcagggagcacggtgaccccctgatagaggagttgaatcctggcgacgcactcgagccagagggacgaggcaccgggggcgtagttactgattttgacggagatggcatgctggatctgatcctgtctcatggcgagtcaatggcccagccgctaagcgtatttagaggaaaccagggcttcaacaacaactggctgagggtggttccaaggacgaggttcggagccttcgcacggggagccaaagtggtattgtacactaaaaagtccggggcccatcttcgcatcattgatggcggctctggctatttgtgcgagatggaaccagttgctcacttcggcctggggaaggacgaggcctcatccgtggaagtgacatggccggacgggaaaatggtgagccgcaatgttgccagcggtgaaatgaatagcgtgctagaaattctgtatccccgggatgaagatacactgcaggaccctgcaccactcgagacccccatgaatgcgtcatcgagccatagctgcgccctggaaacatctccgtatgtgtcaacacctatggaggccacaggggctgggccgacgcggagcgctgtaggtgccaccagtcctacaaggatggcacaaccggcctgggggctgtcggcatctcacagagcaccagcgcccccccctccaccgttactgctccctctcccactactgcttccactgctcgaattgccgcttctgcaccggtccagctag

SEQ ID NO: 283022 - DNA, 1887 bp, Artificial Sequence
  derived and/or modified sequence
atggcccccagcgctgaccccggcatgagcaggatgctgcccttcctgctgctgctgtggttcctgcccatcacagagggcagccagagagctgagcccatgttcaccgctgtgaccaacagcgtgctgcccccagactatgacagcaaccccacccagctgaactacggcgtggccgtgacagatgtggaccatgatggagactttgaaattgtggtggccggctacaacggccccaacctggtgctgaagtatgaccgggcccagaagaggctggtgaacattgctgtggatgagaggagcagcccctactatgccctgcgggaccggcagggcaatgccatcggcgtgacagcctgtgacattgatggagatggccgggaggagatctacttcctgaacaccaacaatgccttcagcggcgtggccacctacacagacaagctgttcaagttcaggaacaaccgctgggaggacatcctgagtgatgaggtgaatgtggcccggggcgtggccagcctgtttgctggccgctctgtggcctgtgtggacaggaagggcagcggccgctacagcatctacatcgccaactatgcctatggaaatgtgggcccagatgccctgattgagatggaccctgaggccagtgacctgagccggggcatcctggccctgagagatgtggccgctgaggccggcgtgtccaagtacacaggaggccggggcgtgtctgtgggccccatcctgagcagcagcgccagtgacatcttctgtgacaatgaaaatggccccaacttcctgttccacaacagaggagatggcacctttgtggatgctgctgccagcgctggggtggatgacccccaccagcacggccggggcgtggccctggccgacttcaacagagatggcaaggtggacatcgtgtatggcaactggaatggcccccaccggctgtacctgcagatgagcacccacggcaaggtgcgcttccgggacatcgccagccccaagttctccatgcccagccctgtgaggacagtcatcacagctgactttgacaatgaccaggagctggagatcttcttcaacaacatcgcctaccgcagcagcagcgccaacagactcttccgggtcatcagaagagagcacggggaccccctgattgaggagctgaaccctggagatgccctggagcctgagggccggggcactggaggagtggtgacagactttgatggagatggcatgctggacctgatcctgagccacggggagagcatggcccagcccctgtctgtgttccggggcaaccagggcttcaacaacaactggctgcgggtggtgcccaggaccaggtttggagcctttgcccggggggccaaggtggtgctgtacaccaagaagagcggggcccacctgcgcatcattgatggcggcagcggctacctgtgtgagatggagcctgtggcccacttcggcctgggcaaggatgaggccagctctgtggaggtgacctggccagatggcaagatggtgtccagaaatgtggccagcggggagatgaacagcgtgctggagatcctgtaccccagagatgaggacaccctgcaggaccctgcccccctggagacccccatgaatgccagcagcagccacagctgtgccctggagaccagcccctacgtgtccacccccatggaggccaccggggccggccccaccaggtctgctgtgggcgccaccagccccaccaggatggcccagcctgcctggggcctgagcgccagccaccgggccccagcccctcctcctccacccctgctgctgcccctgcccctgctgctgcccctgctggagctgcccctgctgcacaggagcagctag

SEQ ID NO: 283023 - DNA, 1575 bp, Artificial Sequence
  derived and/or modified sequence
tatgccctgcgggaccggcagggcaatgccatcggcgtgacagcctgtgacattgatggagatggccgggaggagatctacttcctgaacaccaacaatgccttcagcggcgtggccacctacacagacaagctgttcaagttcaggaacaaccgctgggaggacatcctgagtgatgaggtgaatgtggcccggggcgtggccagcctgtttgctggccgctctgtggcctgtgtggacaggaagggcagcggccgctacagcatctacatcgccaactatgcctatggaaatgtgggcccagatgccctgattgagatggaccctgaggccagtgacctgagccggggcatcctggccctgagagatgtggccgctgaggccggcgtgtccaagtacacaggaggccggggcgtgtctgtgggccccatcctgagcagcagcgccagtgacatcttctgtgacaatgaaaatggccccaacttcctgttccacaacagaggagatggcacctttgtggatgctgctgccagcgctggggtggatgacccccaccagcacggccggggcgtggccctggccgacttcaacagagatggcaaggtggacatcgtgtatggcaactggaatggcccccaccggctgtacctgcagatgagcacccacggcaaggtgcgcttccgggacatcgccagccccaagttctccatgcccagccctgtgaggacagtcatcacagctgactttgacaatgaccaggagctggagatcttcttcaacaacatcgcctaccgcagcagcagcgccaacagactcttccgggtcatcagaagagagcacggggaccccctgattgaggagctgaaccctggagatgccctggagcctgagggccggggcactggaggagtggtgacagactttgatggagatggcatgctggacctgatcctgagccacggggagagcatggcccagcccctgtctgtgttccggggcaaccagggcttcaacaacaactggctgcgggtggtgcccaggaccaggtttggagcctttgcccggggggccaaggtggtgctgtacaccaagaagagcggggcccacctgcgcatcattgatggcggcagcggctacctgtgtgagatggagcctgtggcccacttcggcctgggcaaggatgaggccagctctgtggaggtgacctggccagatggcaagatggtgtccagaaatgtggccagcggggagatgaacagcgtgctggagatcctgtaccccagagatgaggacaccctgcaggaccctgcccccctggagacccccatgaatgccagcagcagccacagctgtgccctggagaccagcccctacgtgtccacccccatggaggccaccggggccggccccaccaggtctgctgtgggcgccaccagccccaccaggatggcccagcctgcctggggcctgagcgccagccaccgggccccagcccctcctcctccacccctgctgctgcccctgcccctgctgctgcccctgctggagctgcccctgctgcacaggagcagctag

SEQ ID NO: 283024 - DNA, 1887 bp, Artificial Sequence
  derived and/or modified sequence
atggcccccagcgccgaccccggcatgagccggatgctgcccttcctgctgctgctatggttcctccccataaccgaaggttcccagagggcggagcccatgtttacagccgtgacaaacagcgtgttgccacctgactatgattccaatcctacacagctaaattacggagtagcggttacggacgtcgaccacgatggagacttcgaaatcgtcgtggccggatacaacgggcctaacctggttttgaaatacgatcgcgcccagaagcggctggtgaacattgcggtagacgagcggtcctcaccttactatgccctgcgggaccgacagggaaacgccatcggcgtgacagcttgtgacatagacggtgatggcagagaggagatctattttctgaataccaacaacgctttcagcggagtcgccacttacacagataagctcttcaagtttagaaacaatagatgggaggacattctgtccgatgaagttaacgtggccaggggagtcgcttctctctttgcaggccgcagcgtggcctgtgtggataggaagggctcaggacgctactcgatttatattgcaaattacgcctatggcaacgtgggccccgacgctctgattgagatggaccccgaggcctctgacttgtccaggggtattctggccctgcgcgacgtcgcagccgaagccggtgtgtcaaagtacaccgggggacgaggtgtgagcgtgggtccaatcctgagcagttctgccagtgacatcttttgcgataacgaaaacggtcctaatttcctgttccataaccgtggcgacggcacgtttgttgacgccgctgcgtcagctggggtcgacgacccgcaccagcacggacgcggcgtggctctggcagactttaaccgcgatggcaaagtagatatagtttatggcaattggaacggccctcacagactctacctccaaatgtcgactcatggaaaggttcggttccgggacattgcctccccgaaattttcaatgccctcccctgtcaggactgtaattaccgccgatttcgacaacgatcaggagcttgaaatttttttcaacaacatcgcgtatcgctcaagcagcgcgaatcgcttgttcagggtgatacgaagggagcatggtgatccactgatcgaagaattgaacccgggcgacgcgctggaaccagaggggcggggcaccggaggcgtggtgactgatttcgatggggatgggatgcttgacttaattttgtctcatggggagagcatggcgcagcccttgtccgtcttccgagggaatcagggctttaataataactggctgagagttgtgcctcgaactcgctttggcgcattcgcccgcggcgccaaggtagttctttataccaaaaaaagcggggcccacttaaggattattgatgggggcagcggatatctctgcgaaatggaacccgtcgctcacttcggtcttggcaaggatgaagcatccagcgtggaagtgacttggcctgatggcaaaatggtctcaagaaatgtagcctccggggaaatgaacagcgttcttgagatcttataccctcgggacgaagacacgctccaagatcctgctcctctggaaacaccaatgaacgctagctccagtcactcctgtgcgctcgagacctccccctacgtgtctacaccaatggaggctaccggagctggacccacaagaagcgctgtaggagcgacatcacctaccaggatggcacagcctgcatggggactcagtgcatcacacagggcgcccgcacccccacctcctcccctgttgctcccattgcctctcctactgccactgttggagctgcccctgcttcaccggtccagttag

SEQ ID NO: 283025 - DNA, 1575 bp, Artificial Sequence
  derived and/or modified sequence
tacgccctgcgggaccggcagggcaacgccatcggcgtgaccgcctgcgatatcgatggagatgggcgcgaagagatttactttctgaatacaaacaacgcattttcaggggtggcgacctatacagacaaactattcaagttccgcaacaaccggtgggaggatattctgtccgatgaggtgaatgtggcgcggggagtggccagcttgtttgccggccggagcgttgcctgtgtggaccggaaaggtagcggtcgctacagcatttatatagccaactacgcgtacggtaatgttgggcccgatgccttgatcgaaatggacccagaagcgagcgaccttagccgtggcatcctagccctacgcgatgttgctgcagaagctggggtatctaaatacacagggggcaggggagttagcgtcggacccattctgtccagttccgcaagcgacatcttctgcgacaatgagaacggccccaacttccttttccataaccgcggcgacgggacattcgtcgatgccgccgcgagtgccggcgtggacgatccacaccagcacggacggggggttgcgctagcagacttcaatagggatggcaaagttgacatcgtctatggcaactggaacgggccacacaggctgtacctgcagatgtcaacacacgggaaggtgcgattccgagatattgcctcccctaaattctctatgccatctcctgtcagaacagtgatcacagctgacttcgataacgatcaagagctggaaattttttttaataacatcgcatatcgcagctcatctgcaaataggttgtttcgtgtgatcaggagggagcatggcgaccccttaatagaggaacttaaccccggggatgcccttgagccagaggggagggggacaggtggcgtggtcaccgactttgacggagatggtatgcttgatctcattctgtcgcacggagagagcatggctcagcctctcagtgtttttagaggcaatcagggattcaacaataactggctccgagtcgtacctcggaccagattcggggcattcgctagaggggctaaggtcgtactctataccaaaaaaagtggggctcatttaaggatcatcgatgggggttcgggatacttgtgcgagatggaacccgtggctcacttcggcctgggcaaggatgaggcaagctcagtcgaagtgacttggcccgacgggaaaatggtcagccgcaacgtggcttctggggagatgaattccgtcctcgagatcctttatcctagggacgaggacaccctccaagacccagcacccttagaaacgcctatgaatgcttctagcagtcactcctgtgcactggagacttctccctatgtttccaccccaatggaggcgaccggggctgggccaactcgctccgcagtgggcgctactagccctacccgcatggcccagcccgcttggggtttgtctgcctcacacagagctcccgcccccccgcctcctccactactcctgccactgccactcttgctgcctctcctggaacttccccttttgcaccgctccagctag

SEQ ID NO: 283026 - RNA, 1887 nt, Artificial Sequence
  derived and/or modified sequence
auggcuccaagcgcugacccugguaugaguaggaugcuacccuuccuucugcuccucugguuccugccuaucaccgagggaucacagcgagcagaaccaauguuuacugcaguaaccaauaguguguuacccccagauuacgacagcaaccccacccaguugaauuaugggguggcggucacggauguggaccacgauggggauuucgagauuguuguggcuggauauaacggccccaaucuggugcugaaauaugacagagcgcagaagaggcuggugaacauagccguugaugagcgcaguuccccauacuacgcauugagggaccgacagggaaacgcuauaggggugacggcgugcgauauugauggagaugggcgcgaagaaaucuauuuucuuaauacuaacaaugccuuuagcgguguggccaccuauacggauaaacuauuuaaguucagaaauaauaggugggaagauauccuaucagacgaggucaacgucgcacguggcguugccucccucuucgccggacgaucuguagccuguguugacagaaagggcucagggcgauauucaauuuacauagcuaauuaugcuuauggaaacgucggacccgaugcacucaucgagauggauccagaagcaucugacuugucgagaggaauucuggcccugcgagacgucgcugcggaggcgggugucucuaaguacaccggcggccgcggaguaagcguggggccaauucucuccuccucugcuucagauauauucugcgacaacgagaacggccccaacuuccucuuucacaaucgaggagacgggacuuucguggacgcagcagccagcgcuggcguugaugacccucaucagcacggucgagguguggccuuggccgauuuuaaccgggacgguaaaguggacauugucuaugguaauuggaacggcccccacagacuauaucuucagaugucaacccaugggaaagucagguuccgagauauugcaagucccaaguucagcaugccaucucccgugcgcaccgugauaacggccgacuuugacaaugaucaggagcuggagaucuucuucaauaacaucgccuaucggucauccagcgcuaacaggcuuuuccgcgugaucagaagggagcauggugacccccucauugaggaacuuaaccccggcgacgccuuagaaccugaagggcgcgggaccgguggagucgugacagacuucgauggcgacggcaugcucgaucugaucuugagccauggcgagucaauggcacaaccacugucugucuuccgaggaaaucagggcuuuaacaauaauugguugagggugguaccaagaacacgcuuuggagcauuugcgagaggcgcuaaagucguacuuuacaccaagaagucaggggcccaucugagaaucaucgacggcggcuccgguuaccuuugugagauggaacccguagcacacuuuggucuggguaaagaugaagcaagcucagucgaaguuacguggcccgaugguaagaugguguccaggaacguggccucaggcgaaaugaauucaguucuugaaauccuuuaucccagagaugaggacaccuugcaggaucccgcuccacuggagacaccgaugaacgccagcaguucucacuccugugccuuggagaccucccccuacgucagcacgccgauggaggcgaccggggcagguccuacuaggucggcugugggcgcuaccucuccaacuagaauggcucagccagccuggggcuugucagccagccaucgugcacccgcucccccuccuccuccccuccugcucccacugccccuccucuugccacuauuagaauuaccucuccugcaccggucaaguuag

SEQ ID NO: 283027 - RNA, 1575 nt, Artificial Sequence
  derived and/or modified sequence
uacgcccucagagacaggcagggaaaugcuauuggaguuaccgcuugcgacauagauggagacggcagggaagaaaucuauuucuuaaauacaaacaaugcauucaguggaguugcuacauacacagauaagcuguuuaaguuccguaauaaccggugggaagauauucugucagacgaagucaacguugcgaggggggucgccagccuguuugcaggucggucugucgccugcgucgacaggaaaggcucagggcgguacagcauauacaucgcuaauuacgcuuacggaaaugugggaccugacgcucucauugagauggacccugaagcaucagacuuaucuagaggcauccuggcccucagggaugucgccgcggaggccggcgucagcaaauauacaggcgggaggggaguaucuguuggacccauccucaguucaucugccagcgacauuuuuugcgauaacgaaaaugggccaaacuuuuuguuccacaacagaggugauggaacauuuguugacgcugcugcaagugcaggagucgaugacccucaucagcacgguagaggaguggcuuuggcugacuucaauagagacggcaaaguggacauagucuacggaaacuggaauggcccccaucgguuguaccuccagaugucgacucacggaaagguccgguuccgcgacaucgccucuccuaaauucucuaugccuucucccgugcgaaccgugaucaccgccgauuuugacaacgaucaggagcuugagauuuucuuuaauaacaucgccuaucggaguagcuccgccaacagacuuuuucguguaaucaggcgagaacauggggauccacuaaucgaagaacuuaacccuggggacgcacucgaaccugaaggcagaggaacgggaggcgucgucacugacuuugacggagacggcaugcuugaucugauccugucgcauggagagucgauggcgcaaccccugucaguauuuagaggaaaucagggcuuuaauaauaauugguugagaguuguuccuaggacacgguucggagcguuugcaaggggggccaagguggugcuguauaccaagaaaagcggggcgcaucugcgcauuaucgacgguggcaguggcuaucuaugcgagauggaacccgucgcccauuucggucuuggaaaggaugaagcuucuaguguugaaguaacguggccagauggaaagauggugucuagaaacguagcuuccggugagaugaauucaguucuggagauucuguacccccgcgacgaggacacucuucaggacccagcucccuuagagacaccgaugaaugcuaguucaagccacagcugcgcacuggaaaccucacccuauguuuccacaccaauggaagcuaccggggcagggccuacucgcucagccguaggcgcgacuaguccuacccggauggcacagccggcauggggcuugucggcgucccaccgggcccccgcuccuccuccacccccacuucuccugccgcuaccucuccuccuuccuuuacuggaacugccucuccugcaccgcuccucuuag

SEQ ID NO: 283028 - RNA, 1887 nt, Artificial Sequence
  derived and/or modified sequence
auggccccuuccgcagacccugggaugucgcgcaugcugccauuccuacuccuccuaugguuccucccaaucacugagggcagucagcgagcugagcccauguuuacggcagugacgaauaguguuuugccaccugauuaugauuccaaucccacacagcuuaauuauggaguggcagugacagauguggaccacgauggagauuucgaaaucgucguugccggcuacaacggcccgaaucugguacugaaguacgaccgagcacagaaaagauuaguuaacaucgccguggacgaaaggaguuccccuuauuaugcucugagggaucgccagggaaaugccaucggcgugaccgcaugugacaucgacggcgauggccgcgaggaaauuuacuuccuaaacacgaauaaugcuuucucaggagucgccacuuacacagauaagcuauucaaauuccggaauaacagaugggaagacauccuuagugaugaagucaauguagcgagagggguagcuagucucuuugcaggaaggagcguugcuugcguugaucgcaagggaaguggacgcuauucuaucuacauagccaacuacgcguacggaaacguaggacccgaugcccuaaucgaaauggacccugaagcaucagaccuguccagagggauacuugcccugcgcgauguugcagcugaagccggggugucaaaguacaccggaggccgcggcgugucagugggaccaauucucuccaguagugccuccgauaucuucugugacaacgagaauggcccuaacuuccuuuuccacaaccgcggagacgguacuuuuguggaugcugccgccucagcaggcguggacgauccgcaucagcacggaagaggcguggcccuagccgacuucaaucgcgaugggaagguagacauuguuuacggcaacuggaacggcccgcauagacuuuaucugcagaugaguacacacggaaaggucagguucagggauaucgcuagcccuaaguuuuccaugccaagcccagugagaaccgugaucacagcagauuuugauaaugaucaagaguuagagauuuuuuuuaauaauauugccuaccgcucuucaucugcaaauagacuguuucgagugauuaggcgggaacauggcgauccucugauugaagagcugaauccuggagacgcccucgaaccugaagggcgggggaccggcgguguggugacagauuuugacggcgacggcaugcucgauuuaauccuuagccacggcgaaucaauggcacagccccuuaguguuuuucgcgggaaccagggauucaauaacaacuggcuaagaguuguccccagaacccgauucggcgcguucgccagaggcgccaaagugguucucuauacuaaaaagaguggagcgcauuuaagaauuaucgauggaggcucaggauaucugugcgaaauggaaccaguggcacauuuugggcuuggcaaggacgaggccucuucaguagaagugaccuggccugacggaaaaaugguaagcaggaacguggccuccggcgagaugaacagugugcuggaaauacuguacccccgcgaugaagacacccugcaagacccagccccccucgagacaccuaugaacgcuucaagcucccauuccugcgcucuggagacuucaccguacguguccacccccauggaagcaacuggcgcuggucccacaagaucugccgugggcgcgacuagucccacccguauggcacagccagccuggggccucuccgcuagucauagagcucccgcucccccuccuccuccccuccugcucccacugccccuccucuugccacuauuagaauuaccucuccugcaccggucaaguuag

SEQ ID NO: 283029 - RNA, 1575 nt, Artificial Sequence
  derived and/or modified sequence
uacgcccucagagacaggcagggaaaugcuauuggaguuaccgcuugcgacauagauggagacggcagggaagaaaucuauuucuuaaauacaaacaaugcauucaguggaguugcuacauacacagauaagcuguuuaaguuccguaauaaccggugggaagauauucugucagacgaagucaacguugcgaggggggucgccagccuguuugcaggucggucugucgccugcgucgacaggaaaggcucagggcgguacagcauauacaucgcuaauuacgcuuacggaaaugugggaccugacgcucucauugagauggacccugaagcaucagacuuaucuagaggcauccuggcccucagggaugucgccgcggaggccggcgucagcaaauauacaggcgggaggggaguaucuguuggacccauccucaguucaucugccagcgacauuuuuugcgauaacgaaaaugggccaaacuuuuuguuccacaacagaggugauggaacauuuguugacgcugcugcaagugcaggagucgaugacccucaucagcacgguagaggaguggcuuuggcugacuucaauagagacggcaaagucgauaucguuuacggaaauuggaauggcccacaccgguuauaccugcaaaugucuacccacgggaagguucgcuucagagauauugccucuccaaaguucucgaugccuuccccuguacggaccguaauuaccgccgauuucgauaacgaucaggaacuggaaaucuucuuuaacaacauugcuuacagauccucuagugccaacagacuguuuagagugauuagaagggaacacggcgauccacuuaucgaagagcuaaacccuggcgaugcacuggaaccagaaggacguggcacaggaggaguggugacugacuuugacggagauggcaugcucgaucuuauccugagucacggcgagagcauggcacagccuuuaaguguuuuuagagguaaucaaggcuucaacaauaacuggcuuagggucgucccaagaacucgcuuuggagcguuugcccgcggcgcaaaggugguucuauauaccaagaaauccggagcacaucuucguaucauugacggcggcucagguuaccugugugagauggaaccaguggcacacuucggccucggcaaagaugaagcuuccucuguggaggucaccuggccugaugguaagaugguaagccgaaaugucgccuccggggagaugaauucagugcuggaaauccuauaucccagagacgaagacacgcugcaggaccccgccccacuggagacuccaaugaacgcgucuucuagucacucaugcgcacuggagacuaguccuuacguguccacaccaauggaagcuacuggagccggaccaacgcguagugcugugggagcuaccuccccuacccgcauggcucaacccgccuggggccuguccgcaucucacagagccccugccccuccgccaccuccucuccuguuaccacuccccuuacugcugccacuucuugaacuuccucuccuacauagaucuaguuag

SEQ ID NO: 283030 - DNA, 342 bp, Artificial Sequence
  derived and/or modified sequence
atgcataccgtcccctggggcgtcgacttcgcactgatcgccatgaagaactttatcagtcagtggagttccttctttcggagcggaatgggcaagtcacaaacaggatacctgcctcgggtgcctagagaacagccctttgcggcaggcctgtgggggttggctgccgcactgtcacacctagccgtcaacgccttcagtctgctgtgccctcctttgccgaagacgtcatgctcccttaatccccatggtgacgtggagagcaggaaggtccacgcaacggttgaaaacgtctacatctccgcactaaaccttccgtgggtgcgagtcaagtggtgttag

SEQ ID NO: 283031 - protein, 232 aa, Artificial Sequence
  derived and/or modified sequence
MAQVLIVGAGMTGSLCAALLRRQTSGPLYLAVWDKAEDSGAEVYFRHRVTQINLRDDKWEVSKQTGSPEQFDLIVLTMPVPEILQLQGDITTLISECQRQQLEAVSYSSRYALGLFYEAGTKIDVPWAGQYITSNPCIRFVSIDNKKRNIESSEIGPSLVIHTTVPFGVTYLEHSIEDVQELVFQQLENILPGLPQPIATKCQKWRHSQVPSAGVILGCAKSPWMMAIGFPI

SEQ ID NO: 283032 - DNA, 699 bp, Artificial Sequence
  derived and/or modified sequence
atggcccaggtgcttatcgtaggtgccgggatgacgggctcactctgtgcagctctcctgcgccggcagacatccggcccactctacctggctgtttgggacaaggcagaggactctggtgcggaggtctacttccgccatagggtaacccagatcaacctgcgcgatgataagtgggaggtatcaaagcagaccgggagccctgaacagtttgacttaattgtcctaacgatgccagttccggagatactccagctgcagggggatatcaccaccctcatcagcgagtgccagagacagcagctggaggcggtctcctatagcagtaggtatgccttgggactcttttacgaggcaggaaccaagatcgatgtcccctgggctggacagtacataacaagtaatccctgtatcaggtttgtctctattgacaacaagaaaaggaatatagagagtagcgaaattgggccctcactggtaatccacactacagtaccctttggagtgacctatttagagcactctattgaagatgtgcaagaattggtatttcagcaactcgagaatatcctgccaggcttgccccagcccattgccaccaaatgccagaaatggagacatagccaggtaccctccgctggagtaatcctcggatgcgccaaaagtccatggatgatggcgatcggcttcccaatatag

SEQ ID NO: 283033 - DNA, 699 bp, Artificial Sequence
  derived and/or modified sequence
atggcccaggtgctgattgtgggcgccggcatgacaggcagcctgtgtgccgccctgctgcggcggcagaccagcggccccctgtacctggccgtgtgggacaaggcagaagattctggagctgaggtgtacttccgccaccgggtgacccagatcaacctgagagatgacaagtgggaggtgtccaagcagacaggcagccctgagcagtttgacctgattgtgctgaccatgcctgtgcctgagatcctgcagctgcagggcgacatcaccaccctcatcagcgagtgccagaggcagcagctggaggccgtgtcctacagcagccgctatgccctgggcctcttctatgaagctggcaccaagattgatgtgccctgggccggccagtacatcaccagcaacccctgcatccgctttgtgtccattgacaacaagaagaggaacatcgagagcagcgagatcggccccagcctggtgatccacaccaccgtgccctttggagtgacctacctggagcacagcattgaagatgtgcaggagctggtgttccagcagctggagaacatcctgcccggcctgccccagcccatcgccaccaagtgccagaagtggaggcacagccaggtgcccagcgctggggtcatcctgggctgtgccaagagcccctggatgatggccatcggcttccccatctag

SEQ ID NO: 283034 - DNA, 699 bp, Artificial Sequence
  derived and/or modified sequence
atggcccaggtgctgatcgtgggcgccggcatgaccggcagcctgtgtgccgcactgttgcgccgccagacctccgggcccctatacctggccgtctgggataaggccgaggattctggagctgaggtttacttcagacatagagtcactcagatcaatctacgtgacgataaatgggaagtgtcaaaacaaactggttcaccagaacagttcgacttaattgtcctgacaatgcctgtgccagagatccttcagcttcagggagacatcactacactgatttcagaatgtcaacgtcaacagttggaagcagtgtcatattcttctcgctatgccctgggcctattctacgaagccggaacaaaaattgatgtgccctgggcggggcagtacattaccagcaatccttgcatccggttcgtgtctatcgataataagaagcgcaacattgaaagtagtgaaatcggaccttccttggttatccatacaaccgtgcctttcggcgtaacctacctcgaacactcaatagaggatgtacaagaacttgtgtttcaacagttggagaatatcctgccggggctcccccagcccattgcaaccaaatgtcagaagtggcgccattcgcaagtgccttcagctggagtcattttaggatgtgcaaaatccccgtggatgatggctataggctttcctatatag

SEQ ID NO: 283035 - DNA, 699 bp, Artificial Sequence
  derived and/or modified sequence
atggcccaggtcctcattgtgggtgcaggcatgacaggatctctttgcgctgcacttctgcggagacagacctccggcccactctacctagcagtatgggataaggcggaggacagcggcgcagaggtgtactttcggcatcgtgtaacccaaatcaatttacgcgatgacaaatgggaagtcagcaagcagaccgggtcgcctgagcaatttgacctgatagtccttactatgccagtgccagaaatactgcagctccaaggagacataacgacgctgattagtgaatgtcaacggcagcagctcgaggcagtgtcgtatagttcgcgatatgctctgggtctgttttacgaggctggcacgaaaatcgatgtgccctgggccggacaatatattactagcaacccctgcattcgatttgtcagtatcgataataaaaagcgcaacattgaaagtagtgagattgggccatcgctagtgatacacacaactgttcctttcggggttacttatctcgagcactccattgaggatgtccaggaattagtttttcagcaactcgagaacatcctgcctggcctgccccagcctatagctacaaagtgccaaaagtggcgccactctcaggtgccaagtgccggagtgatattggggtgtgcaaagagcccgtggatgatggctattggttttccaatctag

SEQ ID NO: 283036 - DNA, 699 bp, Artificial Sequence
  derived and/or modified sequence
atggcgcaggtgctgatcgtgggcgccgggatgacaggaagcttgtgcgctgcgctgctgaggaggcagacgtccggtcccttgtaccttgctgtgtgggacaaggctgaggactcaggtgcagaagtctacttcagacatcgtgtgacacagatcaacctaagagatgacaaatgggaagtatccaaacaaacaggctcccctgagcagtttgatcttattgttctcacaatgccagttcctgagattctgcagcttcaaggtgacatcaccaccttaattagtgaatgccaaaggcagcaactggaggctgtgagctactcctctcgatatgctctgggcctcttttatgaagctggtacgaagattgatgtcccttgggctgggcagtacatcaccagtaatccctgcatacgcttcgtctccattgataataagaagcgcaatatagagtcatcagaaattgggccttccctcgtgattcacaccactgtcccatttggagttacatacttggaacacagcattgaggatgtgcaagagttagtcttccagcagctggaaaacattttgccgggtttgcctcagccaattgctaccaaatgccaaaaatggagacattcacaggtaccaagtgctggtgtgattctaggatgtgcgaagagcccctggatgatggcgattggatttcccatctga

SEQ ID NO: 283037 - DNA, 699 bp, Artificial Sequence
  derived and/or modified sequence
atggcccaggtgctgatcgtgggcgccggcatgaccggcagcctgtgcgccgccctgctgagaagacagaccagcggccccctgtacctggccgtgtgggacaaggccgaggacagcggcgccgaggtgtacttcagacacagagtgacccagatcaacctgagagacgacaagtgggaggtgagcaagcagaccggcagccccgagcagttcgacctgatcgtgctgaccatgcccgtgcccgagatcctgcagctgcagggcgacatcaccaccctgatcagcgagtgccagagacagcagctggaggccgtgagctacagcagcagatacgccctgggcctgttctacgaggccggcaccaagatcgacgtgccctgggccggccagtacatcaccagcaacccctgcatcagattcgtgagcatcgacaacaagaagagaaacatcgagagcagcgagatcggccccagcctggtgatccacaccaccgtgcccttcggcgtgacctacctggagcacagcatcgaggacgtgcaggagctggtgttccagcagctggagaacatcctgcccggcctgccccagcccatcgccaccaagtgccagaagtggagacacagccaggtgcccagcgccggcgtgatcctgggctgcgccaagagcccctggatgatggccatcggcttccccatctag

SEQ ID NO: 283038 - DNA, 1170 bp, Artificial Sequence
  derived and/or modified sequence
atggaaaagcagaacatgttcctgcacggtagctacatcctgcgcgaggacgtgcggactgcaaacgttattgctgctgaagccgttacttgtctggtgatcgatcgcgactcattcaagcatctgattggagggttagacgatgtcagcaacaaggcctacgaggatgctgaagccaaagctaagtacgaagccgaggccgccttcttcgcaaacctgaaactctctgactttaatattattgatacattgggcgtcggcgggttcggtagagtggagttggtgcagcttaaatccgaggagtctaagacgttcgcaatgaagatactcaaaaaaaggcacatcgtcgacacacgccagcaggagcatatccgctcagaaaaacagattatgcagggagcccattccgactttattgtcagactctatcgtactttcaaggactcaaaatatctgtacatgttaatggaagcctgcctgggcggtgaattgtggaccattctaagagatagagggtctttcgaggattcgactacacgtttttatactgcatgtgtagttgaggctttcgcgtacctgcattccaaagggattatttaccgagacctgaagccggagaacctgatcctggatcataggggctacgccaaactggtggacttcggattcgcaaagaagatcggctttggcaaaaaaacctggacattctgtggaacgcctgagtacgtagcaccggagatcatcctcaataagggtcacgacatctccgccgattactggtctcttggaatactcatgtacgaactgctgacaggttcccctccctttagcggccccgaccccatgaaaacttacaatatcatattacgcgggatcgacatgattgagttccccaagaaaatagcgaagaacgctgccaacttgattaagaaattgtgcagagacaatccttctgagcggctgggaaatcttaaaaacggcgtaaaggacatccaaaaacacaaatggtttgaaggcttcaactgggagggcctccgcaagggcacgctcaccccaccaattatccctagcgtagccagcccaactgacacaagcaatttcgattcttttccagaagataacgacgaacctcctccagatgataattctgggtgggacattgatttttag

SEQ ID NO: 283039 - DNA, 852 bp, Artificial Sequence
  derived and/or modified sequence
atgaaaatactgaagaaacgacacatcgttgacacacggcaacaagaacacatccgctccgaaaagcagattatgcagggcgcccactccgacttcattgtgcgcctgtacagaaccttcaaggatagcaagtatctgtacatgctcatggaggcttgtctggggggagaactgtggaccattttgagagaccgtgggtcttttgaagattcaactacaagattttacaccgcctgcgtagttgaggcttttgcatatctgcacagcaagggcattatctatagggacttgaaaccggaaaacctcatcctggaccaccgcgggtacgccaaacttgtagatttcggattcgctaaaaaaatagggtttgggaagaaaacatggactttctgcggaacgcccgagtatgtggcccctgagatcatcttaaacaaaggtcacgatatcagcgctgattactggtccctgggaattttaatgtacgaactcttaacgggatctccaccgttctcaggacctgaccctatgaagacgtacaacatcatactaaggggcatagacatgattgaattccccaagaaaatcgccaagaacgcggccaacctgatcaagaaactgtgtagagacaacccatccgagcggttaggcaacctcaaaaatggtgtcaaggatatccagaaacacaagtggttcgagggctttaactgggagggtctccgaaaaggaacattaactcctccgataataccttccgtcgccagccccacagatactagcaacttcgactcctttcccgaagacaacgacgaaccgccgcctgacgataattcgggttgggacattgacttttag

SEQ ID NO: 283040 - DNA, 1170 bp, Artificial Sequence
  derived and/or modified sequence
atggagaagcagaacatgttcctgcacggcagctacatcctgcgggaggatgtgaggacagccaacgtgattgctgctgaggccgtgacctgcctggtgattgaccgggacagcttcaagcacctgattggaggcctggatgatgtgagcaacaaggcctatgaagatgctgaggccaaggccaagtatgaagctgaggccgccttctttgccaacctgaagctgagtgacttcaacatcatcgacaccctgggcgtgggcggcttcggccgggtggagctggtgcagctgaagtctgaggagagcaagacctttgccatgaagatcctgaagaagaggcacatcgtggacacccggcagcaggagcacatccgctctgagaagcagatcatgcagggcgcccacagcgacttcatcgtgcggctgtaccgcaccttcaaggacagcaagtacctgtacatgctgatggaggcctgcctgggcggggagctgtggaccatcctgcgggaccggggcagctttgaggacagcaccacccgcttctacacagcctgtgtggtggaggcctttgcctacctgcacagcaagggcatcatctacagagacctgaagccagagaacctgatcctggaccaccggggctacgccaagctggtggactttggatttgccaagaagattggatttgggaagaagacctggaccttctgtggcaccccagaatatgtggcccctgagatcatcctgaacaagggccatgacatctctgctgactactggagcctgggcatcctgatgtatgagctgctgaccggcagcccccccttcagcggccctgaccccatgaagacctacaacatcatcctgcggggcatcgacatgattgagttccccaagaagatcgccaagaatgctgccaacctgatcaagaagctgtgccgggacaaccccagcgagcggctgggcaacctgaagaatggagtgaaggacatccagaagcacaagtggtttgagggcttcaactgggagggcctgaggaagggcaccctgaccccacccatcatccccagcgtggccagccccacagacaccagcaactttgacagcttccctgaggacaatgatgagcccccaccagatgacaacagcggctgggacatcgacttctag

SEQ ID NO: 283041 - DNA, 852 bp, Artificial Sequence
  derived and/or modified sequence
atgaagatcctgaagaagaggcacatcgtggacacccggcagcaggagcacatccgctctgagaagcagatcatgcagggcgcccacagcgacttcatcgtgcggctgtaccgcaccttcaaggacagcaagtacctgtacatgctgatggaggcctgcctgggcggggagctgtggaccatcctgcgggaccggggcagctttgaggacagcaccacccgcttctacacagcctgtgtggtggaggcctttgcctacctgcacagcaagggcatcatctacagagacctgaagccagagaacctgatcctggaccaccggggctacgccaagctggtggactttggatttgccaagaagattggatttgggaagaagacctggaccttctgtggcaccccagaatatgtggcccctgagatcatcctgaacaagggccatgacatctctgctgactactggagcctgggcatcctgatgtatgagctgctgaccggcagcccccccttcagcggccctgaccccatgaagacctacaacatcatcctgcggggcatcgacatgattgagttccccaagaagatcgccaagaatgctgccaacctgatcaagaagctgtgccgggacaaccccagcgagcggctgggcaacctgaagaatggagtgaaggacatccagaagcacaagtggtttgagggcttcaactgggagggcctgaggaagggcaccctgaccccacccatcatccccagcgtggccagccccacagacaccagcaactttgacagcttccctgaggacaatgatgagcccccaccagatgacaacagcggctgggacatcgacttctag

SEQ ID NO: 283042 - DNA, 1170 bp, Artificial Sequence
  derived and/or modified sequence
atggagaagcagaacatgttcctgcacggcagctacatcctgcgggaagatgttcggaccgcaaatgtcatagcagcagaagctgtcacatgtctcgttatagaccgggactcttttaagcacctgattggcggcctcgacgatgtctctaataaagcttatgaggatgcagaggcaaaagccaagtacgaggccgaggctgcttttttcgccaatctgaaattaagcgacttcaatattattgatacgttaggagtaggggggttcgggagggtggagctagtccagctgaagagcgaagagtctaagactttcgccatgaagatacttaaaaagagacatatcgtagacaccaggcagcaggaacacatcagaagcgaaaagcagattatgcaaggggcacattccgatttcatcgtcaggctgtaccgaaccttcaaagactccaaatacttatacatgcttatggaagcttgcctggggggcgaactgtggaccattctccgggatcgtgggtcttttgaagattcaaccacccgcttctataccgcatgtgtagtcgaagcctttgcgtatttacacagcaaaggaatcatctaccgggatctgaagccagagaacctgatcctggaccaccgtggatacgcaaagctggttgatttcggattcgccaagaagataggattcgggaagaaaacttggaccttctgcggcacccccgaatacgtcgcccccgagataatcctgaacaagggccacgacatttcagctgactactggagccttggaatcttgatgtacgagttacttaccggatcacctcccttttcagggcccgatcctatgaaaacgtacaatatcatcctacgcgggattgacatgatcgagttccctaagaaaattgccaaaaacgccgccaatttaatcaagaagctgtgccgtgacaacccaagtgagcggttaggaaatctcaagaacggagtaaaggatatccagaagcataagtggttcgagggattcaattgggaagggctcaggaaaggcactttaaccccccccattattcctagtgtggcaagccctaccgataccagcaattttgatagttttcccgaggataacgacgaaccaccccctgatgacaatagcggatgggacattgacttttag

SEQ ID NO: 283043 - DNA, 852 bp, Artificial Sequence
  derived and/or modified sequence
atgaagatcctgaagaagcggcacatcgtggacacccggcagcaggagcatattaggagcgaaaaacaaatcatgcagggagcgcattctgatttcatcgttcgattgtatagaacattcaaggactccaagtacctgtatatgttgatggaagcttgcctgggaggagagttgtggacaatcctgcgggatcgagggagctttgaagattctaccacacgcttttacaccgcctgtgttgtggaggctttcgcctatttgcatagcaaaggtatcatttacagagacttaaagcctgaaaacctcatacttgaccatagaggttacgctaaattggtggattttggttttgcaaagaaaataggatttggcaaaaaaacttggaccttctgtggtaccccggagtacgtggccccagagataattttgaataaaggccatgacatttcagcagactattggtctttgggaatcttgatgtatgagttactcactgggtctccaccgttttccggtccagatccaatgaagacctacaacatcattctaagaggaatcgatatgatcgaattccccaaaaagatcgctaagaatgctgctaatctcatcaaaaaattatgcagagataacccaagcgagcggcttggaaacctgaaaaacggcgttaaagacattcagaaacacaagtggttcgaaggatttaactgggaggggttgcgcaaaggcaccctgaccccacccattattccgtctgtggcctcgccgaccgataccagtaacttcgatagcttccccgaggacaatgatgagcccccgcctgatgataacagtggctgggacatcgatttctag

SEQ ID NO: 283044 - DNA, 1170 bp, Artificial Sequence
  derived and/or modified sequence
atggagaagcagaacatgtttctacacgggagttatattctgcgggaggacgtcagaactgccaatgtcatcgccgcagaggccgttacctgcctcgtgattgacagagacagctttaagcaccttattggaggcctggacgacgtatccaataaggcttacgaggacgctgaagcaaaagccaaatacgaagcagaggcagctttctttgctaacctgaagctgtccgactttaatataatagacacattgggggttggaggctttgggcgtgtggagctggttcagcttaagtcagaggagtccaagaccttcgccatgaagattcttaaaaagcggcacattgtcgacactcgacaacaggagcacattcgctcagaaaaacagatcatgcagggtgcccacagtgactttattgtcagactgtatcggacatttaaagatagtaagtacctctacatgttaatggaggcctgtctaggtggggagctgtggaccatcctgcgcgatcgaggctccttcgaggacagtaccactcggttttatactgcatgtgtggttgaagccttcgcttatctccactctaaaggtattatctatagagatttgaagcccgagaacctgattctagatcacagggggtacgcaaagctcgttgatttcggctttgctaaaaaaataggcttcggaaagaagacctggacgttctgtggaacccccgagtacgtagccccagagattatactcaataaaggccatgacatcagtgcagattactggtccctgggaatccttatgtacgagttgttgacgggcagcccacctttttccggaccagaccctatgaaaacttacaatataatccttcgcggaatcgatatgatcgagttcccgaaaaagattgctaaaaacgcagccaaccttattaagaagctctgcagggacaatccatctgaaaggctcgggaatctgaagaacggtgtcaaggatattcagaagcacaaatggttcgaaggatttaactgggagggattacggaagggcactttaacgccacctatcatcccgtcagtggcaagtcctactgatacatccaactttgacagcttccctgaggataacgatgagcctccaccagacgacaactctggttgggatattgacttttag

SEQ ID NO: 283045 - DNA, 852 bp, Artificial Sequence
  derived and/or modified sequence
atgaaaatcttaaagaaaaggcatatcgtggacacacgccagcaagaacatattaggagtgaaaagcagatcatgcaaggggcacattccgacttcatcgttcgcctctacagaaccttcaaagatagcaaatatctctacatgctgatggaggcatgcctcggcggagagttgtggacgatactgcgcgaccggggttcgtttgaggactctaccacacggttttacactgcatgtgtggtagaggcctttgcctacctgcacagcaagggtattatctacagggacctcaaaccagaaaatctcattttggaccaccgcggatacgcaaaacttgttgatttcggatttgctaagaagatcggatttggtaagaaaacctggaccttttgcggaactcccgagtatgttgcgcctgagatcatcctaaacaaggggcacgatatatctgctgactattggtccctgggtatccttatgtatgaattattaacgggttcccctccttttagtggccctgaccctatgaagacctacaatatcatcctgagggggattgatatgatcgagtttccaaaaaagattgctaagaatgccgcaaacctgatcaaaaagctgtgcagagataacccctctgaacgtcttggcaatcttaaaaatggagtgaaggacatccagaagcacaaatggttcgaaggcttcaactgggagggattgagaaaaggaactcttactcctcctataattccctccgtggcgagccccaccgacacgagcaacttcgattcatttcccgaggataatgacgaaccaccccctgacgataatagcggttgggatatcgacttttag

SEQ ID NO: 283046 - DNA, 1755 bp, Artificial Sequence
  derived and/or modified sequence
attcataggaggcacacataaataatgttggtttaattaattaaattaacaaaaggctgcacctgaagttcagacttggtaaagcaggattttacacattaatttgagaagatctggagacccactatgaaaatggagaatatattatcaggcaaggtgcaagaggggacaccttctttatcatcagcaaaggaacggtaaatgtcactcgtgaagactcaccgagtgaagacccagtctttcttagaactttaggaaaaggagactggtttggagagaaagccttgcaggggcatttgggaaatactgatggagaagcaaaacatgtttcttcatggatcttacattctgagggaagatgtgagaacagcaaacgtaattgctgcagaagctgtaacctgccttgtgattgacagagactcttttaaacatttgattggagggctggatgatgtttctaataaagcatatgaagatgcagaagctaaagcaaaatatgaagctgaagcggctttcttcgccaacctgaagctgtctgatttcaacatcattgatacccttggagttggaggtttcggacgagtagaactggtccagttgaaaagtgaagaatccaaaacgtttgcaatgaagattctcaagaaacgtcacattgtggacacaagacagcaggagcacatccgctcagagaagcagatcatgcagggggctcattccgatttcatagtgagactgtacagaacatttaaggacagcaaatatttgtatatgttgatggaagcttgtctaggtggagagctctggaccattctcagggatagaggttcgtttgaagattctacaaccagattttacacagcatgtgtggtagaagcttttgcctatctgcattccaaaggaatcatttacagggacctcaagccagaaaatctcatcctagatcaccgaggttatgccaaactggttgattttggctttgcaaagaaaataggatttggaaagaaaacatggactttttgtgggactccagagtatgtagccccagagatcatcctgaacaaaggccatgacatttcagccgactactggtcactgggaatcctaatgtatgaactcctgactggcagcccacctttctcaggcccagatcctatgaaaacctataacatcatattgagggggattgacatgatagaatttccaaagaagattgccaaaaatgctgctaatttaattaaaaaactatgcagggacaatccatcagaaagattagggaatttgaaaaatggagtaaaagacattcaaaagcacaaatggtttgagggctttaactgggaaggcttaagaaaaggtaccttgacacctcctataataccaagtgttgcatcacccacagacacaagtaattttgacagtttccctgaggacaacgatgaaccaccacctgatgacaactcaggatgggatatagacttctaatgtatttctcttacctgcttctgccttgctgaagacagctttttctgagacacagctgccagcaaacctgagggaaagagagaagattagtgctcggggtcaccatgatgcctttgatcgatgctgctccagtaactacagtggcattaggacttaccgcttagatgacaatagtgctctttacatgttttctgtttgaacctaaaatagcagttgacatggtggtcctgaagcaaagcctttcaccagtaaaagatgttttctattgttgcaatg

SEQ ID NO: 283047 - DNA, 1170 bp, Artificial Sequence
  derived and/or modified sequence
atggagaagcagaacatgttcctgcacggcagctacatcctgagagaggacgtgagaaccgccaacgtgatcgccgccgaggccgtgacctgcctggtgatcgacagagacagcttcaagcacctgatcggcggcctggacgacgtgagcaacaaggcctacgaggacgccgaggccaaggccaagtacgaggccgaggccgccttcttcgccaacctgaagctgagcgacttcaacatcatcgacaccctgggcgtgggcggcttcggcagagtggagctggtgcagctgaagagcgaggagagcaagaccttcgccatgaagatcctgaagaagagacacatcgtggacaccagacagcaggagcacatcagaagcgagaagcagatcatgcagggcgcccacagcgacttcatcgtgagactgtacagaaccttcaaggacagcaagtacctgtacatgctgatggaggcctgcctgggcggcgagctgtggaccatcctgagagacagaggcagcttcgaggacagcaccaccagattctacaccgcctgcgtggtggaggccttcgcctacctgcacagcaagggcatcatctacagagacctgaagcccgagaacctgatcctggaccacagaggctacgccaagctggtggacttcggcttcgccaagaagatcggcttcggcaagaagacctggaccttctgcggcacccccgagtacgtggcccccgagatcatcctgaacaagggccacgacatcagcgccgactactggagcctgggcatcctgatgtacgagctgctgaccggcagcccccccttcagcggccccgaccccatgaagacctacaacatcatcctgagaggcatcgacatgatcgagttccccaagaagatcgccaagaacgccgccaacctgatcaagaagctgtgcagagacaaccccagcgagagactgggcaacctgaagaacggcgtgaaggacatccagaagcacaagtggttcgagggcttcaactgggagggcctgagaaagggcaccctgaccccccccatcatccccagcgtggccagccccaccgacaccagcaacttcgacagcttccccgaggacaacgacgagcccccccccgacgacaacagcggctgggacatcgacttctag

SEQ ID NO: 283048 - DNA, 852 bp, Artificial Sequence
  derived and/or modified sequence
atgaagatcctgaagaagagacacatcgtggacaccagacagcaggagcacatcagaagcgagaagcagatcatgcagggcgcccacagcgacttcatcgtgagactgtacagaaccttcaaggacagcaagtacctgtacatgctgatggaggcctgcctgggcggcgagctgtggaccatcctgagagacagaggcagcttcgaggacagcaccaccagattctacaccgcctgcgtggtggaggccttcgcctacctgcacagcaagggcatcatctacagagacctgaagcccgagaacctgatcctggaccacagaggctacgccaagctggtggacttcggcttcgccaagaagatcggcttcggcaagaagacctggaccttctgcggcacccccgagtacgtggcccccgagatcatcctgaacaagggccacgacatcagcgccgactactggagcctgggcatcctgatgtacgagctgctgaccggcagcccccccttcagcggccccgaccccatgaagacctacaacatcatcctgagaggcatcgacatgatcgagttccccaagaagatcgccaagaacgccgccaacctgatcaagaagctgtgcagagacaaccccagcgagagactgggcaacctgaagaacggcgtgaaggacatccagaagcacaagtggttcgagggcttcaactgggagggcctgagaaagggcaccctgaccccccccatcatccccagcgtggccagccccaccgacaccagcaacttcgacagcttccccgaggacaacgacgagcccccccccgacgacaacagcggctgggacatcgacttctag

SEQ ID NO: 283049 - protein, 1104 aa, Artificial Sequence
  derived and/or modified sequence
MSVKSPFNVMSRNNLEAPPCKMTEPFNFEKNENKLPPHESLRSPGTLPNHPNFRLKSSENGNKKNNFLLCEQTKQYLASQEDNSVSSNPNGINGEVVGSKGDRKKLPAGNSVSPPSAESNSPPKEVNIKPGNNVRPAKSKKLNKLVENSLSISNPGLFTSLGPPLRSTTCHRCGLFGSLRCSQCKQTYYCSTACQRRDWSAHSIVCRPVQPNFHKLENKSSIETKDVEVNNKSDCPLGVTKEIAIWAERIMFSDLRSLQLKKTMEIKGTVTEFKHPGDFYVQLYSSEVLEYMNQLSASLKETYANVHEKDYIPVKGEVCIAKYTVDQTWNRAIIQNVDVQQKKAHVLYIDYGNEEIIPLNRIYHLNRNIDLFPPCAIKCFVANVIPAEGNWSSDCIKATKPLLMEQYCSIKIVDILEEEVVTFAVEVELPNSGKLLDHVLIEMGYGLKPSGQDSKKENADQSDPEDVGKMTTENNIVVDKSDLIPKVLTLNVGDEFCGVVAHIQTPEDFFCQQLQSGRKLAELQASLSKYCDQLPPRSDFYPAIGDICCAQFSEDDQWYRASVLAYASEESVLVGYVDYGNFEILSLMRLCPIIPKLLELPMQAIKCVLAGVKPSLGIWTPEAICLMKKLVQNKIITVKVVDKLENSSLVELIDKSETPHVSVSKVLLDAGFAVGEQSMVTDKPSDVKETSVPLGVEGKVNPLEWTWVELGVDQTVDVVVCVIYSPGEFYCHVLKEDALKKLNDLNKSLAEHCQQKLPNGFKAEIGQPCCAFFAGDGSWYRALVKEILPNGHVKVHFVDYGNIEEVTADELRMISSTFLNLPFQGIRCQLADIQSRNKHWSEEAITRFQMCVAGIKLQARVVEVTENGIGVELTDLSTCYPRIISDVLIDEHLVLKSASPHKDLPNDRLVNKHELQVHVQGLQATSSAEQWKTIELPVDKTIQANVLEIISPNLFYALPKGMPENQEKLCMLTAELLEYCNAPKSRPPYRPRIGDACCAKYTSDDFWYRAVVLGTSDTDVEVLYADYGNIETLPLCRVQPITSSHLALPFQIIRCSLEEKMYRMNCCCTELQKQVEKHEHILLFLLNNSTNQNKFIEMKKLLKS

SEQ ID NO: 283050 - protein, 1113 aa, Artificial Sequence
  derived and/or modified sequence
MSVKSPFNVMSRNNLEAPPCKMTEPFNFEKNENKLPPHESLRSPGTLPNHPNFRLKSSENGNKKNNFLLCEQTKQYLASQEDNSVSSNPNGINGEVVGSKGDRKKLPAGNSVSPPSAESNSPPKEVNIKPGNNVRPAKSKKLNKLVENSLSISNPGLFTSLGPPLRSTTCHRCGLFGSLRCSQCKQTYYCSTACQRRDWSAHSIVCRPVQPNFHKLENKSSIETKDVEVNNKSDCPLGVTKEIAIWAERIMFSDLRSLQLKKTMEIKGTVTEFKHPGDFYVQLYSSEVLEYMNQLSASLKETYANVHEKDYIPVKGEVCIAKYTVDQTWNRAIIQNVDVQQKKAHVLYIDYGNEEIIPLNRIYHLNRNIDLFPPCAIKCFVANVIPAEGNWSSDCIKATKPLLMEQYCSIKIVDILEEEVVTFAVEVELPNSGKLLDHVLIEMGYGLKPSGQDSKKENADQSDPEDVGKMTTENNIVVDKSDLIPKVLTLNVGDEFCGVVAHIQTPEDFFCQQLQSGRKLAELQASLSKYCDQLPPRSDFYPAIGDICCAQFSEDDQWYRASVLAYASEESVLVGYVDYGNFEILSLMRLCPIIPKLLELPMQAIKCVLAGVKPSLGIWTPEAICLMKKLVQNKIITVKVVDKLENSSLVELIDKSETPHVSVSKVLLDAGFAVGEQSMVTDKPSDVKETSVPLGVEGKVNPLEWTWVELGVDQTVDVVVCVIYSPGEFYCHVLKEDALKKLNDLNKSLAEHCQQKLPNGFKAEIGQPCCAFFAGDGSWYRALVKEILPNGHVKVHFVDYGNIEEVTADELRMISSTFLNLPFQGIRCQLADIQSRNKHWSEEAITRFQMCVAGIKLQARVVEVTENGIGVELTDLSTCYPRIISDVLIDEHLVLKSASPHKDLPNDRLVNKHELQVHVQGLQATSSAEQWKTIELPVDKTIQANVLEIISPNLFYALPKGMPENQEKLCMLTAELLEYCNAPKSRPPYRPRIGDACCAKYTSDDFWYRAVVLGTSDTDVEVLYADYGNIETLPLCRVQPITSSHLALPFQIIRCSLEEKMYRMNCCCTELQKQVEKHEHILLFLLNNSTNQNKFIEMKKLLKKTASLGGKPL

SEQ ID NO: 283051 - DNA, 3315 bp, Artificial Sequence
  derived and/or modified sequence
atgagcgtgaagagccccttcaacgtgatgagcagaaacaacctggaggcccccccctgcaagatgaccgagcccttcaacttcgagaagaacgagaacaagctgcccccccacgagagcctgagaagccccggcaccctgcccaaccaccccaacttcagactgaagagcagcgagaacggcaacaagaagaacaacttcctgctgtgcgagcagaccaagcagtacctggccagccaggaggacaacagcgtgagcagcaaccccaacggcatcaacggcgaggtggtgggcagcaagggcgacagaaagaagctgcccgccggcaacagcgtgagcccccccagcgccgagagcaacagcccccccaaggaggtgaacatcaagcccggcaacaacgtgagacccgccaagagcaagaagctgaacaagctggtggagaacagcctgagcatcagcaaccccggcctgttcaccagcctgggcccccccctgagaagcaccacctgccacagatgcggcctgttcggcagcctgagatgcagccagtgcaagcagacctactactgcagcaccgcctgccagagaagagactggagcgcccacagcatcgtgtgcagacccgtgcagcccaacttccacaagctggagaacaagagcagcatcgagaccaaggacgtggaggtgaacaacaagagcgactgccccctgggcgtgaccaaggagatcgccatctgggccgagagaatcatgttcagcgacctgagaagcctgcagctgaagaagaccatggagatcaagggcaccgtgaccgagttcaagcaccccggcgacttctacgtgcagctgtacagcagcgaggtgctggagtacatgaaccagctgagcgccagcctgaaggagacctacgccaacgtgcacgagaaggactacatccccgtgaagggcgaggtgtgcatcgccaagtacaccgtggaccagacctggaacagagccatcatccagaacgtggacgtgcagcagaagaaggcccacgtgctgtacatcgactacggcaacgaggagatcatccccctgaacagaatctaccacctgaacagaaacatcgacctgttccccccctgcgccatcaagtgcttcgtggccaacgtgatccccgccgagggcaactggagcagcgactgcatcaaggccaccaagcccctgctgatggagcagtactgcagcatcaagatcgtggacatcctggaggaggaggtggtgaccttcgccgtggaggtggagctgcccaacagcggcaagctgctggaccacgtgctgatcgagatgggctacggcctgaagcccagcggccaggacagcaagaaggagaacgccgaccagagcgaccccgaggacgtgggcaagatgaccaccgagaacaacatcgtggtggacaagagcgacctgatccccaaggtgctgaccctgaacgtgggcgacgagttctgcggcgtggtggcccacatccagacccccgaggacttcttctgccagcagctgcagagcggcagaaagctggccgagctgcaggccagcctgagcaagtactgcgaccagctgccccccagaagcgacttctaccccgccatcggcgacatctgctgcgcccagttcagcgaggacgaccagtggtacagagccagcgtgctggcctacgccagcgaggagagcgtgctggtgggctacgtggactacggcaacttcgagatcctgagcctgatgagactgtgccccatcatccccaagctgctggagctgcccatgcaggccatcaagtgcgtgctggccggcgtgaagcccagcctgggcatctggacccccgaggccatctgcctgatgaagaagctggtgcagaacaagatcatcaccgtgaaggtggtggacaagctggagaacagcagcctggtggagctgatcgacaagagcgagaccccccacgtgagcgtgagcaaggtgctgctggacgccggcttcgccgtgggcgagcagagcatggtgaccgacaagcccagcgacgtgaaggagaccagcgtgcccctgggcgtggagggcaaggtgaaccccctggagtggacctgggtggagctgggcgtggaccagaccgtggacgtggtggtgtgcgtgatctacagccccggcgagttctactgccacgtgctgaaggaggacgccctgaagaagctgaacgacctgaacaagagcctggccgagcactgccagcagaagctgcccaacggcttcaaggccgagatcggccagccctgctgcgccttcttcgccggcgacggcagctggtacagagccctggtgaaggagatcctgcccaacggccacgtgaaggtgcacttcgtggactacggcaacatcgaggaggtgaccgccgacgagctgagaatgatcagcagcaccttcctgaacctgcccttccagggcatcagatgccagctggccgacatccagagcagaaacaagcactggagcgaggaggccatcaccagattccagatgtgcgtggccggcatcaagctgcaggccagagtggtggaggtgaccgagaacggcatcggcgtggagctgaccgacctgagcacctgctaccccagaatcatcagcgacgtgctgatcgacgagcacctggtgctgaagagcgccagcccccacaaggacctgcccaacgacagactggtgaacaagcacgagctgcaggtgcacgtgcagggcctgcaggccaccagcagcgccgagcagtggaagaccatcgagctgcccgtggacaagaccatccaggccaacgtgctggagatcatcagccccaacctgttctacgccctgcccaagggcatgcccgagaaccaggagaagctgtgcatgctgaccgccgagctgctggagtactgcaacgcccccaagagcagacccccctacagacccagaatcggcgacgcctgctgcgccaagtacaccagcgacgacttctggtacagagccgtggtgctgggcaccagcgacaccgacgtggaggtgctgtacgccgactacggcaacatcgagaccctgcccctgtgcagagtgcagcccatcaccagcagccacctggccctgcccttccagatcatcagatgcagcctggaggagaagatgtacagaatgaactgctgctgcaccgagctgcagaagcaggtggagaagcacgagcacatcctgctgttcctgctgaacaacagcaccaaccagaacaagttcatcgagatgaagaagctgctgaagagctag

SEQ ID NO: 283052 - DNA, 3342 bp, Artificial Sequence
  derived and/or modified sequence
atgagcgtgaagagccccttcaacgtgatgagcagaaacaacctggaggcccccccctgcaagatgaccgagcccttcaacttcgagaagaacgagaacaagctgcccccccacgagagcctgagaagccccggcaccctgcccaaccaccccaacttcagactgaagagcagcgagaacggcaacaagaagaacaacttcctgctgtgcgagcagaccaagcagtacctggccagccaggaggacaacagcgtgagcagcaaccccaacggcatcaacggcgaggtggtgggcagcaagggcgacagaaagaagctgcccgccggcaacagcgtgagcccccccagcgccgagagcaacagcccccccaaggaggtgaacatcaagcccggcaacaacgtgagacccgccaagagcaagaagctgaacaagctggtggagaacagcctgagcatcagcaaccccggcctgttcaccagcctgggcccccccctgagaagcaccacctgccacagatgcggcctgttcggcagcctgagatgcagccagtgcaagcagacctactactgcagcaccgcctgccagagaagagactggagcgcccacagcatcgtgtgcagacccgtgcagcccaacttccacaagctggagaacaagagcagcatcgagaccaaggacgtggaggtgaacaacaagagcgactgccccctgggcgtgaccaaggagatcgccatctgggccgagagaatcatgttcagcgacctgagaagcctgcagctgaagaagaccatggagatcaagggcaccgtgaccgagttcaagcaccccggcgacttctacgtgcagctgtacagcagcgaggtgctggagtacatgaaccagctgagcgccagcctgaaggagacctacgccaacgtgcacgagaaggactacatccccgtgaagggcgaggtgtgcatcgccaagtacaccgtggaccagacctggaacagagccatcatccagaacgtggacgtgcagcagaagaaggcccacgtgctgtacatcgactacggcaacgaggagatcatccccctgaacagaatctaccacctgaacagaaacatcgacctgttccccccctgcgccatcaagtgcttcgtggccaacgtgatccccgccgagggcaactggagcagcgactgcatcaaggccaccaagcccctgctgatggagcagtactgcagcatcaagatcgtggacatcctggaggaggaggtggtgaccttcgccgtggaggtggagctgcccaacagcggcaagctgctggaccacgtgctgatcgagatgggctacggcctgaagcccagcggccaggacagcaagaaggagaacgccgaccagagcgaccccgaggacgtgggcaagatgaccaccgagaacaacatcgtggtggacaagagcgacctgatccccaaggtgctgaccctgaacgtgggcgacgagttctgcggcgtggtggcccacatccagacccccgaggacttcttctgccagcagctgcagagcggcagaaagctggccgagctgcaggccagcctgagcaagtactgcgaccagctgccccccagaagcgacttctaccccgccatcggcgacatctgctgcgcccagttcagcgaggacgaccagtggtacagagccagcgtgctggcctacgccagcgaggagagcgtgctggtgggctacgtggactacggcaacttcgagatcctgagcctgatgagactgtgccccatcatccccaagctgctggagctgcccatgcaggccatcaagtgcgtgctggccggcgtgaagcccagcctgggcatctggacccccgaggccatctgcctgatgaagaagctggtgcagaacaagatcatcaccgtgaaggtggtggacaagctggagaacagcagcctggtggagctgatcgacaagagcgagaccccccacgtgagcgtgagcaaggtgctgctggacgccggcttcgccgtgggcgagcagagcatggtgaccgacaagcccagcgacgtgaaggagaccagcgtgcccctgggcgtggagggcaaggtgaaccccctggagtggacctgggtggagctgggcgtggaccagaccgtggacgtggtggtgtgcgtgatctacagccccggcgagttctactgccacgtgctgaaggaggacgccctgaagaagctgaacgacctgaacaagagcctggccgagcactgccagcagaagctgcccaacggcttcaaggccgagatcggccagccctgctgcgccttcttcgccggcgacggcagctggtacagagccctggtgaaggagatcctgcccaacggccacgtgaaggtgcacttcgtggactacggcaacatcgaggaggtgaccgccgacgagctgagaatgatcagcagcaccttcctgaacctgcccttccagggcatcagatgccagctggccgacatccagagcagaaacaagcactggagcgaggaggccatcaccagattccagatgtgcgtggccggcatcaagctgcaggccagagtggtggaggtgaccgagaacggcatcggcgtggagctgaccgacctgagcacctgctaccccagaatcatcagcgacgtgctgatcgacgagcacctggtgctgaagagcgccagcccccacaaggacctgcccaacgacagactggtgaacaagcacgagctgcaggtgcacgtgcagggcctgcaggccaccagcagcgccgagcagtggaagaccatcgagctgcccgtggacaagaccatccaggccaacgtgctggagatcatcagccccaacctgttctacgccctgcccaagggcatgcccgagaaccaggagaagctgtgcatgctgaccgccgagctgctggagtactgcaacgcccccaagagcagacccccctacagacccagaatcggcgacgcctgctgcgccaagtacaccagcgacgacttctggtacagagccgtggtgctgggcaccagcgacaccgacgtggaggtgctgtacgccgactacggcaacatcgagaccctgcccctgtgcagagtgcagcccatcaccagcagccacctggccctgcccttccagatcatcagatgcagcctggaggagaagatgtacagaatgaactgctgctgcaccgagctgcagaagcaggtggagaagcacgagcacatcctgctgttcctgctgaacaacagcaccaaccagaacaagttcatcgagatgaagaagctgctgaagaagaccgccagcctgggcggcaagcccctgtag

SEQ ID NO: 283053 - DNA, 3315 bp, Artificial Sequence
  derived and/or modified sequence
atgagcgtcaaaagccccttcaatgtcatgtctcgaaataatttggaagctcctccgtgcaaaatgacagaaccctttaacttcgagaaaaatgaaaacaaactgccaccccatgaatctctgaggtctccagggaccctgccaaaccaccccaatttcaggctaaaatccagcgagaacggaaacaagaaaaataactttctgctttgcgaacaaacgaaacagtacctggcctcacaggaggacaactcggtctcgtcaaatccaaatggcatcaacggtgaggtcgtggggagcaagggcgataggaaaaagctgcccgccggtaatagtgttagcccaccctcagccgaatcgaatagtccacctaaagaggtgaatatcaagccaggcaacaatgtgcgcccagcaaagtccaagaagttaaacaagctggttgagaattctctctctattagcaacccgggattgttcacctcattggggcctcctctcaggagtaccacgtgtcatagatgtggcctcttcgggtctttaagatgtagccagtgcaagcagacatactactgcagtaccgcttgccagaggcgggactggagtgcccacagcattgtctgcaggcccgtccaacctaatttccacaaactcgagaataagagctctatcgagactaaggatgtggaagtcaacaataaaagcgactgccctctgggcgtcacaaaagaaattgccatttgggccgaaagaattatgttttccgacctgaggagcctgcagctgaaaaaaacaatggaaattaagggaaccgtgactgagttcaaacatccgggagacttttatgttcaattatactctagcgaggtgctggaatacatgaatcagctctccgccagcctgaaggagacgtacgccaatgtgcatgagaaagactatatcccggtgaagggagaggtctgtattgcaaaatacaccgtggaccagacttggaacagggctataattcaaaacgtggatgtgcagcagaagaaggcgcatgtcctctacatagattatggaaacgaagaaataatcccgcttaatagaatatatcatctgaatcgtaatatcgatctgttcccaccatgcgcaattaagtgctttgtcgcaaacgtgatccccgccgaaggtaattggtcatcggactgtattaaggccaccaagccactgcttatggagcagtattgctctatcaagatcgtcgatattttggaggaagaagtggtgacatttgccgtggaagttgaactgccaaacagcggaaaactgctcgatcacgtccttattgaaatggggtacgggctgaagcctagcgggcaggacagtaagaaagaaaacgccgatcagagtgatcccgaggacgtgggaaaaatgactacagaaaacaatattgtggtcgacaagtccgatttaattcctaaggtcctgactctgaatgtgggcgacgagttctgtggtgtggtcgctcatattcagacacccgaggattttttttgtcagcagcttcagagtggcagaaagcttgccgagctccaagcgtcactctccaagtattgcgaccagttgcctccacgctcagatttctaccctgctatcggagatatttgctgcgctcagttctcagaagacgatcagtggtaccgggcgtccgtgttggcctatgccagcgaggaatcagttctggtgggttatgtagattatggaaattttgaaatacttagtctcatgcggctttgccccattatcccgaaactgctggaattgcccatgcaagctataaaatgcgtgctggccggcgtaaaaccaagcttgggcatatggacaccggaagcaatctgtctgatgaagaagttggtgcagaacaagataatcactgtgaaagtagttgacaaactggagaacagctcgctcgtggagttgattgataagagcgaaaccccccatgtgtctgtttctaaagtactgctagatgcagggtttgctgttggggaacaaagtatggtgacggacaaaccatccgatgtcaaagaaacatcagtgcctctgggtgtcgaaggcaaggtgaatccactggagtggacctgggtggaattaggagttgatcagacagttgatgtcgttgtctgcgtgatctacagtccaggcgagttttattgtcatgtgttgaaagaggatgcactgaaaaagctcaatgacctgaacaagtccttggccgaacactgccagcaaaaacttccaaacggttttaaggccgagattggccagccctgttgcgcctttttcgccggggacggctcttggtaccgtgcactggtgaaagaaatcttgcccaatgggcatgtgaaggtgcactttgtagattatggtaatatcgaggaggtgaccgcagatgaactgaggatgatatcaagtaccttcctgaatctgcccttccaaggcattcggtgtcagttggcagacatccaaagtcgcaataaacactggtcagaagaggcaattacaaggtttcagatgtgtgtggccggcattaaattacaggccagggtggtggaggtgaccgaaaacgggattggcgtcgagctgacagatttgtcaacatgctatccaagaattataagcgatgtgctgattgatgagcatttggtgctcaagtccgcttcaccacacaaggatctccctaacgaccgcctggtgaataagcacgaactacaggtgcacgtgcagggcctgcaagctactagttcagccgagcagtggaagacaatcgagctgcctgtggacaagacaattcaagcaaacgtgctggaaattatttctccaaatctattttacgcactgcccaaaggaatgcccgagaaccaggaaaaactgtgtatgctcacagctgagcttctggagtactgtaatgccccaaaatctcggccgccctatagaccccgtataggagatgcgtgctgcgccaagtacacaagtgacgacttctggtacagggctgtggtgctggggacttccgatacagacgtggaggtgctgtatgctgactacgggaacatcgaaacacttccgctctgccgcgtgcagccgatcacctcctcccatctagctctgccctttcagattataaggtgctctcttgaagagaaaatgtaccgcatgaattgctgttgcacagagttgcagaagcaggtcgagaaacacgaacatatcctgttgtttctgctcaataacagcactaaccaaaataaattcatagagatgaaaaagctactgaagtcatag

SEQ ID NO: 283054 - DNA, 3342 bp, Artificial Sequence
  derived and/or modified sequence
atgtccgtgaaatcccctttcaacgtcatgagtcgcaacaacctggaggctcctccctgtaaaatgacagagcctttcaactttgagaagaacgaaaataaactccccccccatgaatccctgagaagccccggtaccctgccgaaccaccccaactttagattgaagtcatccgaaaacgggaataaaaaaaacaattttctgctatgcgaacaaaccaaacagtatctggctagccaggaagataactcagtctcttctaacccaaatgggatcaatggcgaggtcgttgggtcaaaaggcgaccgcaaaaaactcccagccggaaatagtgtttcccccccttccgctgagagcaacagtccacctaaagaagtgaatattaagcccgggaacaacgtcagaccagcaaagtccaagaaactgaacaagctagttgagaactccctgtcaatctccaatcctgggctcttcacctcccttggaccccccctaagaagcaccacatgccataggtgtggcttatttggctcactcaggtgcagccagtgtaagcagacctattactgctcaactgcatgtcagcggcgcgactggtctgcacatagtatcgtttgccgtccagttcagccaaattttcacaaactcgagaataagtcttccattgagactaaagatgtcgaggtcaacaataaaagcgattgccccttgggcgttaccaaagagattgccatttgggcggagcggattatgttctctgacttgagatcactgcagctgaagaagacaatggagattaagggaactgtgacagagttcaaacaccctggtgatttctatgtgcaactatatagcagcgaagtcctggaatacatgaatcagttaagcgctagtctgaaagagacatatgccaacgtacatgagaaagattatatcccagtgaagggcgaggtctgtatcgctaaatacaccgtggaccagacctggaaccgcgccattattcagaatgttgacgtgcagcagaaaaaggctcacgtcctatatatagattacgggaatgaagaaatcatccctctgaataggatttaccacctgaaccggaatatcgatctgttcccaccttgcgctattaaatgctttgttgcaaatgtgattcctgcagaagggaactggagttcagactgcattaaagcaacaaagccactgctgatggagcaatattgtagcattaagatcgtggacatccttgaagaagaggtggtgactttcgcggtggaggtggaacttcctaactctgggaagctcctagaccacgtccttattgagatgggatacggactgaagcctagcgggcaagatagtaaaaaggaaaacgccgatcaaagcgaccccgaggacgtcgggaagatgacaaccgagaacaacattgtggtggacaagagtgatctcattcctaaggtgcttactctgaatgtaggagacgagttttgcggcgtcgtggcgcacatccaaacaccagaggattttttctgccaacagctacagagtggacggaaattggcagagctacaggccagcctgtccaaatattgtgatcagctgcccccacggtctgacttctacccggctatcggagacatctgctgtgcccaattcagtgaggacgaccagtggtaccgggcgtctgttcttgcatatgcctctgaggagtccgtgctcgtcgggtacgtggattatgggaattttgagatactgagcctcatgcgcttgtgtcctattatccctaaactgttggagctccccatgcaggctatcaaatgcgtactggcaggagtcaagcccagcctgggtatttggacgcccgaggccatttgcctcatgaagaaactggtccaaaacaagataataacagtgaaagtagtggataaactagaaaattcttcactagtggaactcatcgataagagcgaaacaccgcacgtcagtgtttccaaagtcctgcttgatgctggcttcgcggtgggggagcagagcatggtgacagacaagccctctgatgttaaggagacctcagtcccactgggcgtcgaagggaaggtgaaccctcttgagtggacctgggtcgagctgggtgtggaccagaccgtggacgtggttgtgtgtgtcatctacagtcctggggagttttattgccatgtattaaaagaggatgccctgaaaaaacttaatgacttaaataagtccctcgccgaacactgtcagcagaaactcccaaacggctttaaggccgaaattggccagccatgttgcgcattcttcgcgggggacgggtcctggtatagggctctggtgaaagagatcctgcctaatgggcacgtgaaagtgcactttgtcgattacggtaacattgaagaggtgaccgcagacgagctgaggatgatctctagcacctttctcaacctgccttttcaagggatcaggtgtcagttggcggacatacaatctaggaataagcactggtccgaggaggccatcactagatttcagatgtgcgtagccggaattaagttgcaggcacgcgttgtggaggtgacagagaacgggatcggcgtcgaattaacggacctctctacgtgttatccccgcatcatctcggatgtgctgatcgacgagcacctggtgcttaaaagtgcttctccccataaagaccttccaaatgatcgccttgttaataagcatgagctgcaagttcacgtccaggggctacaggctacaagttctgccgaacagtggaagactattgaactcccagtggataagaccatccaggctaacgttctagagatcatcagcccaaatcttttctacgcactgcctaagggtatgccagagaatcaggagaaactttgtatgttaacagctgaacttttagaatactgcaatgccccaaaatccagaccaccgtataggcctagaataggtgacgcatgttgtgctaagtacacatctgacgatttttggtaccgggctgtcgtcctgggaacatcggacacagatgttgaggtgctctatgctgattacggtaatatcgagacacttccgctttgtcgcgtgcagcccatcacgtcaagccacttagcccttccgtttcaaataattcgctgctccttagaagaaaagatgtaccgtatgaattgctgctgtaccgagctgcagaaacaggttgaaaagcacgagcacatactactctttctgctcaacaattctactaaccagaacaagttcatcgagatgaagaaactgcttaagaaaacagcgtcccttggcggaaaacctctgtag

SEQ ID NO: 283055 - DNA, 3315 bp, Artificial Sequence
  derived and/or modified sequence
atgtctgtgaagagccccttcaacgtgatgagcaggaacaacctggaggccccaccctgcaagatgacagagcccttcaactttgagaagaatgaaaacaagctgccccctcatgagagcctgcggagccctggcaccctgcccaaccaccccaacttccggctgaagagcagtgaaaatggaaacaagaagaacaacttcctgctgtgtgagcagaccaagcagtacctggccagccaggaggacaacagcgtgagcagcaaccccaacggcatcaatggagaggtggtgggcagcaagggggacaggaagaagctgcctgctggcaacagcgtgagcccccccagcgctgagagcaacagcccccccaaggaggtgaacatcaagccaggcaacaacgtgcggcctgccaagagcaagaagctgaacaagctggtggagaacagcctgagcatcagcaaccctggcctcttcaccagcctgggcccccccctgcggagcaccacctgccaccgctgtggcctgtttggcagcctgcgctgcagccagtgcaagcagacctactactgcagcacagcctgccagaggcgggactggagcgcccacagcatcgtgtgcaggcctgtgcagcccaacttccacaagctggagaacaagagcagcattgagaccaaggatgtggaggtgaacaacaagagtgactgccccctgggcgtgaccaaggagatcgccatctgggccgagcgcatcatgttcagtgacctgcggagcctgcagctgaagaagaccatggagatcaagggcaccgtgacagagttcaagcaccctggggacttctacgtgcagctgtacagcagcgaggtgctggagtacatgaaccagctgagcgccagcctgaaggagacctacgccaacgtgcatgagaaggactacatccctgtgaagggggaggtgtgcatcgccaagtacacagtggaccagacctggaacagagccatcatccagaatgtggatgtgcagcagaagaaggcccacgtgctgtacattgattatggaaatgaggagatcatccccctgaaccgcatctaccacctgaacagaaatattgacctcttccccccctgtgccatcaagtgctttgtggccaacgtcatcccagctgagggcaactggagcagtgactgcatcaaggccaccaagcccctgctgatggagcagtactgcagcatcaagatcgtggacatcctggaggaggaggtggtgacctttgctgtggaggtggagctgcccaacagcggcaagctgctggaccacgtgctgattgagatgggctacggcctgaagcccagcggccaggacagcaagaaggaaaatgctgaccagagcgaccctgaagatgtgggcaagatgaccacagagaacaacatcgtggtggacaagagtgacctgatccccaaggtgctgaccctgaatgtgggagatgagttctgtggggtggtggcccacatccagaccccagaggacttcttctgccagcagctgcagagcggcaggaagctggccgagctgcaggccagcctgagcaagtactgtgaccagctgcccccaagaagtgacttctacccagccatcggggacatctgctgtgcccagttctctgaagatgaccagtggtaccgggcctctgtgctggcctatgccagcgaggagagcgtgctggtgggctacgtggactatggcaactttgagatcctgagcctgatgaggctgtgccccatcatccccaagctgctggagctgcccatgcaggccatcaagtgtgtgctggccggcgtgaagcccagcctgggcatctggaccccagaggccatctgcctgatgaagaagctggtgcagaacaagatcatcaccgtgaaggtggtggacaagctggagaacagcagcctggtggagctgattgacaagtctgagaccccccacgtgtctgtgtccaaggtgctgctggatgctggctttgctgtgggggagcagagcatggtgacagacaagcccagtgatgtgaaggagacctctgtgcccctgggcgtggagggcaaggtgaaccccctggagtggacctgggtggagctgggcgtggaccagacagtggatgtggtggtgtgtgtgatctacagccctggagagttctactgccacgtgctgaaggaggatgccctgaagaagctgaatgacctgaacaagagcctggccgagcactgccagcagaagctgcccaacggcttcaaggccgagatcggccagccctgctgtgccttctttgctggagatggctcctggtaccgggccctggtgaaggagatcctgcccaacggccacgtgaaggtgcactttgtggactatggcaacatcgaggaggtgacagcagatgagctgaggatgatcagcagcaccttcctgaacctgcccttccagggcatccgctgccagctggccgacatccagagcaggaacaagcactggagcgaggaggccatcacccgcttccagatgtgtgtggccggcatcaagctgcaggcccgggtggtggaggtgacagaaaatggaattggagtggagctgacagacctgagcacctgctacccccgcatcatcagtgatgtgctgattgatgagcacctggtgctgaagagcgccagcccccacaaggacctgcccaatgaccggctggtgaacaagcatgagctgcaggtgcacgtgcagggcctgcaggccaccagcagcgctgagcagtggaagaccatcgagctgcctgtggacaagaccatccaggccaacgtgctggagatcatcagccccaacctcttctacgccctgcccaagggcatgcctgagaaccaggagaagctgtgcatgctgacagctgagctgctggagtactgcaatgcccccaagagcaggcctccctaccggcccagaattggagatgcctgctgtgccaagtacaccagtgatgacttctggtacagagctgtggtgctgggcaccagtgacacagatgtggaggtgctgtatgctgactatggcaacatcgagaccctgcccctgtgccgggtgcagcccatcaccagcagccacctggccctgcccttccagatcatccgctgcagcctggaggagaagatgtacaggatgaactgctgctgcacagagctgcagaagcaggtggagaagcatgagcacatcctgctcttcctgctgaacaacagcaccaaccagaacaagttcatcgagatgaagaagctgctgaagagctag

SEQ ID NO: 283056 - DNA, 3342 bp, Artificial Sequence
  derived and/or modified sequence
atgtctgtgaagagccccttcaacgtgatgagcaggaacaacctggaggccccaccctgcaagatgacagagcccttcaactttgagaagaatgaaaacaagctgccccctcatgagagcctgcggagccctggcaccctgcccaaccaccccaacttccggctgaagagcagtgaaaatggaaacaagaagaacaacttcctgctgtgtgagcagaccaagcagtacctggccagccaggaggacaacagcgtgagcagcaaccccaacggcatcaatggagaggtggtgggcagcaagggggacaggaagaagctgcctgctggcaacagcgtgagcccccccagcgctgagagcaacagcccccccaaggaggtgaacatcaagccaggcaacaacgtgcggcctgccaagagcaagaagctgaacaagctggtggagaacagcctgagcatcagcaaccctggcctcttcaccagcctgggcccccccctgcggagcaccacctgccaccgctgtggcctgtttggcagcctgcgctgcagccagtgcaagcagacctactactgcagcacagcctgccagaggcgggactggagcgcccacagcatcgtgtgcaggcctgtgcagcccaacttccacaagctggagaacaagagcagcattgagaccaaggatgtggaggtgaacaacaagagtgactgccccctgggcgtgaccaaggagatcgccatctgggccgagcgcatcatgttcagtgacctgcggagcctgcagctgaagaagaccatggagatcaagggcaccgtgacagagttcaagcaccctggggacttctacgtgcagctgtacagcagcgaggtgctggagtacatgaaccagctgagcgccagcctgaaggagacctacgccaacgtgcatgagaaggactacatccctgtgaagggggaggtgtgcatcgccaagtacacagtggaccagacctggaacagagccatcatccagaatgtggatgtgcagcagaagaaggcccacgtgctgtacattgattatggaaatgaggagatcatccccctgaaccgcatctaccacctgaacagaaatattgacctcttccccccctgtgccatcaagtgctttgtggccaacgtcatcccagctgagggcaactggagcagtgactgcatcaaggccaccaagcccctgctgatggagcagtactgcagcatcaagatcgtggacatcctggaggaggaggtggtgacctttgctgtggaggtggagctgcccaacagcggcaagctgctggaccacgtgctgattgagatgggctacggcctgaagcccagcggccaggacagcaagaaggaaaatgctgaccagagcgaccctgaagatgtgggcaagatgaccacagagaacaacatcgtggtggacaagagtgacctgatccccaaggtgctgaccctgaatgtgggagatgagttctgtggggtggtggcccacatccagaccccagaggacttcttctgccagcagctgcagagcggcaggaagctggccgagctgcaggccagcctgagcaagtactgtgaccagctgcccccaagaagtgacttctacccagccatcggggacatctgctgtgcccagttctctgaagatgaccagtggtaccgggcctctgtgctggcctatgccagcgaggagagcgtgctggtgggctacgtggactatggcaactttgagatcctgagcctgatgaggctgtgccccatcatccccaagctgctggagctgcccatgcaggccatcaagtgtgtgctggccggcgtgaagcccagcctgggcatctggaccccagaggccatctgcctgatgaagaagctggtgcagaacaagatcatcaccgtgaaggtggtggacaagctggagaacagcagcctggtggagctgattgacaagtctgagaccccccacgtgtctgtgtccaaggtgctgctggatgctggctttgctgtgggggagcagagcatggtgacagacaagcccagtgatgtgaaggagacctctgtgcccctgggcgtggagggcaaggtgaaccccctggagtggacctgggtggagctgggcgtggaccagacagtggatgtggtggtgtgtgtgatctacagccctggagagttctactgccacgtgctgaaggaggatgccctgaagaagctgaatgacctgaacaagagcctggccgagcactgccagcagaagctgcccaacggcttcaaggccgagatcggccagccctgctgtgccttctttgctggagatggctcctggtaccgggccctggtgaaggagatcctgcccaacggccacgtgaaggtgcactttgtggactatggcaacatcgaggaggtgacagcagatgagctgaggatgatcagcagcaccttcctgaacctgcccttccagggcatccgctgccagctggccgacatccagagcaggaacaagcactggagcgaggaggccatcacccgcttccagatgtgtgtggccggcatcaagctgcaggcccgggtggtggaggtgacagaaaatggaattggagtggagctgacagacctgagcacctgctacccccgcatcatcagtgatgtgctgattgatgagcacctggtgctgaagagcgccagcccccacaaggacctgcccaatgaccggctggtgaacaagcatgagctgcaggtgcacgtgcagggcctgcaggccaccagcagcgctgagcagtggaagaccatcgagctgcctgtggacaagaccatccaggccaacgtgctggagatcatcagccccaacctcttctacgccctgcccaagggcatgcctgagaaccaggagaagctgtgcatgctgacagctgagctgctggagtactgcaatgcccccaagagcaggcctccctaccggcccagaattggagatgcctgctgtgccaagtacaccagtgatgacttctggtacagagctgtggtgctgggcaccagtgacacagatgtggaggtgctgtatgctgactatggcaacatcgagaccctgcccctgtgccgggtgcagcccatcaccagcagccacctggccctgcccttccagatcatccgctgcagcctggaggagaagatgtacaggatgaactgctgctgcacagagctgcagaagcaggtggagaagcatgagcacatcctgctcttcctgctgaacaacagcaccaaccagaacaagttcatcgagatgaagaagctgctgaagaagacagccagcctgggcggcaagcccctgtag

SEQ ID NO: 283057 - DNA, 3315 bp, Artificial Sequence
  derived and/or modified sequence
atgagcgtgaagagccccttcaacgtgatgagccggaacaacctggaagcccctccatgcaaaatgacagaaccttttaacttcgagaagaacgaaaacaaactgccgccccatgagtcattgaggtctccaggaacactgccaaaccatccaaatttccgactcaagtcatcagaaaatggcaacaaaaagaacaacttccttttatgtgagcagaccaagcagtacctggcaagccaggaggacaacagcgtttcgagcaaccctaatggaattaacggagaggtcgttggaagtaagggagatagaaaaaagctgcccgctggaaactctgtatctcccccatcagcagagtccaatagcccaccgaaagaggtgaatattaaaccaggcaataacgtgcgacccgccaagagcaagaagctgaacaaactggtggaaaacagtttgtctatcagcaatcctgggttgttcacaagcctcgggcctccgctgcgttcaacgacttgccaccgctgcggactgtttggcagcctgaggtgctctcagtgtaaacagacatactattgctccaccgcctgtcaacgtagagactggtcagctcattcaattgtttgccggccagtgcaacccaatttccataaacttgaaaacaaaagctctatcgagacgaaagacgtggaagtgaataacaaaagtgattgtcctttgggcgtgacaaaggagatcgccatatgggctgaacgaatcatgttttctgatctccgcagcctccagttgaagaagactatggagattaaagggacggtgactgagtttaagcaccccggcgacttttatgtgcagctatattctagcgaagtgctggagtatatgaatcagctgtctgcctctctcaaggagacgtatgcgaacgtccatgagaaggattatataccggtgaagggagaagtgtgcatcgctaagtataccgttgaccagacctggaatagagctattattcagaacgtggacgtgcaacagaaaaaggcgcacgtgctttatatcgactatggcaacgaggagatcatccccctgaataggatatatcatctgaataggaacatagatctgttccccccatgcgctatcaaatgtttcgtagcgaacgtgatcccggctgaggggaactggtccagcgattgtatcaaagctaccaaacctctccttatggagcagtactgcagtatcaagatcgtggacatcctggaagaagaggtggttacattcgccgtcgaggtggaacttcccaacagtggtaagctgcttgaccatgtgctgatcgaaatgggctatgggctgaaaccttctgggcaggacagcaaaaaagaaaatgctgatcaaagcgatcccgaggacgtgggcaagatgacaacggagaacaatatcgtggtggataagagcgatctgattccaaaggtgctgaccctgaatgttggggatgaattttgtggagtagttgctcacatacaaactccagaggattttttctgtcaacagctgcaatcagggcgtaagctggctgaattgcaggcatctctgagcaagtattgcgaccagttacccccacggtcagatttttatcccgccataggcgacatttgttgtgcgcagttttccgaggatgaccagtggtaccgggcttcagtgctcgcctacgcatccgaagagtcggtgctggttggctacgtcgactatggaaatttcgagatccttagcctgatgaggctgtgccctatcattccaaagctgctggagctgcccatgcaagccattaagtgcgtcctcgcaggggtcaagccatctctgggtatttggactcccgaggccatctgtttgatgaagaagttagtacaaaataagataattaccgttaaggtggtggacaagcttgaaaactcctctctggttgagcttatcgacaaatcagagacacctcatgtttcagtgtccaaagtgctgcttgacgcaggcttcgctgttggcgaacagtcaatggtgacagataaaccttctgacgtaaaagaaacatctgtgccactgggtgtcgaggggaaggtaaatcctctcgagtggacttgggtggagctgggagtggatcagaccgttgatgtcgtggtgtgcgttatatattcacctggtgaattctactgccatgtgcttaaagaggatgcacttaaaaaactcaatgacttgaataagtcccttgccgagcattgtcagcagaagctacctaacggctttaaggccgagattggacagccttgctgtgcgtttttcgccggggacggttcttggtacagggctctcgtgaaagaaatactgcccaatggacatgtcaaggtgcattttgtggactatggaaacatcgaagaagtaacagccgacgagttgaggatgatcagttcaactttcctcaacttgccttttcagggcatccgctgccagctggccgacattcagtccagaaataagcattggtccgaagaggcaattaccaggttccagatgtgtgttgccggaatcaagcttcaagctcgcgttgtcgaagttactgagaacggaattggagtcgagttgactgatctgtcaacctgctacccgcggataataagtgatgtgctcatcgatgagcacctcgtgctgaaatcagcaagtccccataaagacctccccaacgacagactggtaaataagcacgagctgcaggttcacgtgcagggattgcaagccaccagctcagccgagcagtggaaaactattgagcttcctgtggacaagacgatccaggctaatgtactggagatcatttctcccaaccttttttacgccctcccaaagggcatgcctgaaaatcaggagaagttatgcatgcttacagctgagcttctcgaatattgcaatgctcctaagtcccgtccaccctacaggcctcgaatcggagatgcttgttgcgccaaatatacctctgacgatttttggtatagagccgtggtgttagggacctcagacaccgacgttgaggttctgtacgcagattacgggaatattgagactctgccgctctgtagagttcaaccaattaccagctctcatcttgcacttcctttccaaattattcggtgttctcttgaagagaaaatgtataggatgaattgctgctgcaccgaactgcagaaacaggtcgaaaagcatgaacacatcctgctgtttctactgaataattcaaccaatcaaaataaattcatcgaaatgaaaaaattgctgaagtcctag

SEQ ID NO: 283058 - DNA, 3342 bp, Artificial Sequence
  derived and/or modified sequence
atgagcgtgaagagccccttcaacgtgatgagccggaacaacctggaggccccaccttgtaagatgaccgagccatttaacttcgaaaaaaatgaaaacaagctgccaccccatgaaagtctgagatctccaggaacccttccaaaccatccaaactttcgtctaaaatcatcagagaacggtaacaaaaagaacaactttctcctgtgcgagcagaccaagcagtaccttgcaagtcaagaagacaactctgtatcatcaaatccgaacggcatcaatggagaagtagtgggaagcaaaggggacagaaagaagttgccagccggtaattcagtctcgcccccttccgcagaatccaactctccgcctaaggaggtgaacattaagcctggcaacaatgtacgcccagccaagtcgaagaaactaaacaagctggttgaaaactcactcagtatttcaaatccggggctcttcacgtctctgggacctccactgagatcgactacatgccaccgctgtgggttgtttgggagcctcagatgttctcaatgcaaacaaacgtactattgctcaacggcttgccagcggcgagactggtccgcacattccatcgtctgtagaccagtgcagccaaattttcataagctggaaaataaatccagtattgagactaaggatgtagaggtcaacaacaagagtgactgtccgcttggtgtgacaaaggagatcgccatttgggccgagcgaattatgttctcagacctaagatctctgcagctgaaaaagacgatggaaataaagggaaccgtcactgaattcaagcacccaggggatttttatgtccaattgtattctagcgaagtcctggaatatatgaatcaactctccgcgtctctgaaagaaacctatgccaacgtgcacgagaaagactatatcccggttaaaggcgaagtatgcatcgccaaatacaccgtggatcaaacatggaacagagcgatcattcagaacgtcgacgtccaacagaagaaggcccatgtgctttacatcgattatggcaacgaggaaattatccccctgaaccgaatttaccacctgaaccgcaatatcgacttgttccccccctgtgccataaagtgcttcgtggccaacgtaattcctgcagaggggaactggagtagcgactgcatcaaagccaccaagcccttgctgatggaacaatattgcagcatcaagatcgttgatatcttagaggaggaagtagtcacttttgccgtcgaagtggaactgccgaattccggaaaactactggatcacgtattgattgaaatgggatatggtctaaaaccttcgggtcaggattccaaaaaggaaaatgccgatcagagcgacccggaagacgttggcaagatgaccacggaaaacaacattgtggttgacaagtctgatttaattcccaaagtgttgacactgaatgtcggcgacgagttttgtggcgttgtcgcgcacatccagacgccagaggacttcttctgccagcagctacaaagtgggcgaaagcttgctgaactgcaggcctccctgtcaaaatattgcgatcagctgcccccccgaagtgatttctaccccgctatcggggacatctgctgcgcacagttctccgaagatgatcagtggtacagagcctccgtgctggcctatgccagcgaagaatcagtcctagtgggatacgtggactacggaaactttgaaatcctcagccttatgagactgtgcccaatcattcctaaactgctggagttgcctatgcaagccatcaaatgtgttctggctggggtgaaacccagtctaggaatatggactcctgaggccatctgtcttatgaagaaacttgttcaaaataaaatcatcaccgtcaaagtggtcgacaagctcgaaaactcatccctggtggaactgatcgacaagagtgaaacccctcacgtctctgtaagcaaagtactgctcgacgctggcttcgcagtgggggagcagagcatggtcactgataaaccatccgacgttaaagaaaccagcgtgccattaggcgtggaaggtaaggtgaatcccctagaatggacatgggtcgaacttggtgtggaccaaaccgtggacgttgtggtgtgtgtgatttacagtccgggcgagttctactgtcacgtattgaaggaggacgcactgaagaaacttaatgacctgaacaagtccttagctgaacactgtcagcaaaagctccccaatggcttcaaggccgaaatcgggcagccctgctgcgcttttttcgcaggggatggaagctggtacagagctctggttaaagagatcctaccaaatggccacgtgaaggtccacttcgtggattacggcaatattgaggaggtcacggcagacgaactaaggatgatttctagcaccttcttgaacttgccattccaaggcattcgctgtcagctcgctgacattcagagccgcaacaagcattggtcagaggaagccatcacaaggttccagatgtgtgtcgcaggcataaagcttcaggcccgggtggtggaggtgacggagaacggtatcggcgttgaactgacagaccttagcacctgctacccaagaatcattagcgacgtgctcatagacgaacacctcgttctcaaaagcgcctctccccataaagaccttcctaatgatcgactggtaaacaaacacgaactacaagtacacgtccaggggcttcaagctacaagcagcgctgagcagtggaagaccatagagttacccgtggataaaacaattcaggctaacgtgctggaaattatctcacctaatctgttttacgcactgcctaagggtatgcccgaaaaccaggaaaaactgtgtatgttaaccgccgagcttctggagtattgtaacgcacctaagagtcgtcccccgtaccgaccgcggatcggggatgcatgttgcgccaagtatactagcgatgatttttggtaccgtgcggtggtcctgggaacgtccgataccgacgtggaggtcctctatgcagattatggaaatatcgagaccttgcctctgtgtagggtgcagcctattacctcgtcccacctggcactacccttccagatcataagatgttcattggaggagaagatgtataggatgaactgctgctgtaccgaactgcaaaagcaggtcgagaagcacgagcatatactgcttttcctgctgaataactcaactaaccagaataaattcattgaaatgaaaaagctgctaaaaaagacggcctcactgggcggtaaacccctctag

SEQ ID NO: 283059 - DNA, 3315 bp, Artificial Sequence
  derived and/or modified sequence
atgtccgtaaaatcgccatttaacgtgatgtccaggaacaacctggaagcccctccttgcaaaatgaccgagccgttcaacttcgaaaagaacgagaataagttgccgcctcacgaaagtttgaggtcacctggtacactgcccaatcacccaaattttcgactgaagtcttccgaaaatgggaacaaaaagaacaacttcctgctgtgcgagcagactaaacaatatctggcctcccaggaggataatagcgtaagctctaatccaaatggcatcaacggagaggtggtggggtccaagggcgatcgcaaaaagctccctgccggaaactccgtaagcccaccctccgccgagtccaactcccctcccaaggaggttaacatcaaacctggcaacaacgtgcgaccggctaagtcgaagaaactgaataagctggttgaaaactccctctctatctctaacccgggtctgtttacaagtctgggcccacccctgaggagcaccacatgccacagatgtggtctcttcggcagcttgaggtgctcccagtgtaagcagacatattattgtagtacggcctgccagaggcgtgactggagcgcgcatagtatcgtgtgcaggccggtgcaacccaacttccataaactggaaaacaagtccagtatagaaaccaaagatgtggaggttaataataagagtgattgtcctctcggagtgacaaaggaaatcgcaatttgggctgaacgcatcatgttcagtgacctcagaagcctgcagttgaaaaagaccatggagataaaaggcaccgtcactgaatttaagcatcccggagatttttacgtgcagctgtacagctctgaggtgcttgagtatatgaatcaattatccgcatccctgaaggagacgtatgcgaatgtccacgagaaagactacatccccgtcaaaggcgaggtgtgcattgccaaatacacagtggaccagacttggaaccgcgcaatcattcagaatgtcgatgtccagcagaaaaaggctcatgtgctgtatatagattatggcaacgaagagataatccctctgaaccgaatctatcatttgaaccggaacattgacctctttcccccttgcgcgatcaagtgcttcgttgctaacgtcattcctgcggagggaaactggagtagcgattgcatcaaagctaccaaacctcttctcatggagcagtactgcagcatcaagattgtagatatcctagaggaggaagtggtaactttcgcagtggaggttgaacttccaaattcgggcaaactgctggaccacgtcttgattgaaatgggctacgggctcaagcccagcggacaggattccaagaaagagaatgcagaccagagtgatcccgaggacgtggggaaaatgactaccgagaacaacattgttgttgataagagcgacttgatccccaaagtgctgaccctgaatgttggcgacgagttttgcggtgtcgtcgcccatattcagacccctgaagacttcttctgccaacaattgcagagcgggagaaaacttgccgagctgcaggcctcacttagcaaatattgtgatcagttacctcctcgctcagatttttaccccgcaatcggcgatatttgctgtgcacagttttccgaggacgatcagtggtatagggcctccgtcctagcctacgcaagcgaggagtcagttctcgtcggctacgtggactatggaaatttcgagatactttcccttatgcggctctgccctatcatcccaaaactgctcgagttgccaatgcaggccatcaagtgcgtcctggctggggtcaagccctctttgggaatatggaccccagaagccatttgtcttatgaagaagctggttcagaataagattatcactgtcaaagtggtggacaagctggagaattcctccctggtggagctgatcgataagtctgagactccccacgtaagtgtctcgaaggtgctcttggatgccggatttgcagtaggggagcagagcatggtgactgacaaaccttcggacgtcaaggaaacttccgttccactcggcgtagaaggcaaggttaatcctcttgaatggacttgggtcgagttgggcgtggaccagaccgtggacgttgttgtgtgcgtcatctattcccccggagaattctactgtcatgttttaaaggaagacgccctcaaaaaactgaatgacctcaacaaaagcctggcagaacattgtcagcagaaacttcctaatggctttaaagcagaaatcggccaaccttgttgtgccttcttcgctggggacggatcttggtatcgcgctctggtgaaggaaatccttccaaacggccatgtgaaagttcactttgtcgattacggcaacatcgaagaggtaaccgccgatgagctaagaatgatctccagtacctttctcaatttgccgttccaaggcattcgctgccagctcgcagacatacagtcaagaaataaacactggtcggaagaggcaatcacacgatttcagatgtgcgtggccggaattaaacttcaggcacgtgttgtcgaagtgacagaaaatggtatcggtgtggagctgacagacctgtccacatgttaccctcgaataatctctgatgtgttgatcgacgagcatcttgtattgaagagcgccagcccacacaaggacctgccaaacgataggcttgtgaacaagcatgaactgcaggtgcacgtacagggacttcaggccacctccagcgccgaacaatggaaaactattgagctccccgtggacaaaacgatccaggcgaacgtcctcgaaattatttcccccaatctgttttacgcattacccaaaggaatgcccgagaaccaggaaaagctctgtatgctgaccgcagagcttctagaatactgcaatgctcccaaatctcgtccaccatatagacctcggatcggtgatgcatgttgcgccaaatacactagcgacgacttctggtaccgggctgtggttcttggaacaagcgacacggacgttgaagtgctgtacgccgactatggtaatatcgaaaccttgccattgtgtagggtgcagcccattacatcaagccatctggcactgccctttcagattatcaggtgctccttggaggagaaaatgtaccgtatgaactgttgttgtaccgagctgcagaaacaagtagagaagcacgaacatatcctactcttcctccttaacaactctactaatcagaacaaatttattgagatgaagaagctcctcaagtcctag

SEQ ID NO: 283060 - DNA, 3342 bp, Artificial Sequence
  derived and/or modified sequence
atgagcgtgaagtctccattcaacgtcatgtcaagaaacaatcttgaagcgcctccgtgcaagatgaccgagcctttcaactttgaaaaaaacgaaaataagcttccccctcacgagtccctccggtcaccgggaacactccccaatcatccaaactttagattgaagtcctctgaaaatgggaataagaagaacaactttttactctgtgaacaaactaaacagtatttggccagccaagaggacaatagcgtatcgtctaatcccaacggcattaacggagaagttgtgggctccaaaggagaccgcaaaaagttacccgcaggaaactcggtgtcgccaccaagcgccgaatcaaatagtccgccaaaggaggtgaacataaagcctggcaacaatgtgcgacctgcaaagtcgaaaaagctgaacaagctggtggagaactcactgtccatctccaaccctgggttgttcaccagtctagggccaccattgagatcaaccacctgccaccgatgtggcctgtttggcagtctgcgatgtagccagtgcaagcaaacctattactgctccaccgcctgccagagacgggattggtccgcccactctattgtgtgccgtccagttcagcccaactttcacaagcttgaaaataagtcatccatagaaactaaggatgtagaggttaacaacaagtcagactgccccctgggagtgacaaaggaaattgccatctgggccgaaagaataatgttctcagatctcaggtccctccagttaaaaaagactatggaaattaagggcaccgttactgaattcaagcatcccggtgatttttatgtacagttatattccagcgaggtgctcgagtacatgaaccagctgtccgctagcctgaaagaaacatacgccaatgtgcacgagaaagactatatccctgtgaagggggaggtgtgtatcgcaaagtacaccgtggaccagacatggaacagggccattatacagaacgtagacgtccaacagaaaaaggcccacgtgctgtatatagattatggaaacgaggagatcattcccctaaaccggatttaccacctgaatagaaacattgacctgttccccccatgcgctatcaaatgcttcgtagccaacgttatacctgctgaaggtaactggtcttccgattgcataaaggcgaccaagcctctgcttatggagcagtattgctcaatcaagatcgtggacattctagaagaggaggtggtgacatttgctgtggaggtggaactacccaattctggcaaactgctggaccatgtgctcatcgagatgggctatggcctgaagccatccggacaggactctaaaaaggagaatgctgaccagtccgacccagaggacgttggtaagatgaccacggagaacaacatcgtcgtggacaaatccgacctgatcccaaaggtcctgacactgaatgtgggcgatgaattctgcggcgtggtggcacatattcaaacacccgaggacttcttctgccagcaattacagtccggacgcaagctggccgagttacaggcttcgctgtctaaatactgtgaccagctcccacctcgatcggatttctatcctgctatcggggatatctgctgcgcccagttttctgaagacgatcaatggtatcgagcctccgttcttgcctatgcttctgaagagtctgtgctcgtgggctacgtagattatggcaatttcgagatcttatccctgatgaggctctgcccaattatccccaagctgctagaactgcctatgcaggcaatcaagtgcgtgttagccggagtgaagcctagcctgggaatatggacgcctgaggcaatttgtctgatgaaaaagctggtgcagaacaaaataatcacggtcaaagtggttgataaattggagaacagcagccttgtggagctgatcgataaatctgagaccccccacgtgagcgtcagtaaggtgttacttgatgccggatttgccgtgggggaacagagtatggtcacagacaagcccagcgacgtcaaggaaacctccgtgcctctgggcgtggaaggaaaggtgaatcctctggaatggacttgggtcgagttgggcgttgaccagacagttgacgttgtcgtttgtgtcatttactccccgggtgagttctattgtcatgtgcttaaggaggatgccttgaagaagttgaacgacctcaacaagagcctcgccgagcattgtcagcaaaagctgccaaacgggttcaaagccgagatcggacagccttgttgcgccttcttcgcgggagacgggtcgtggtaccgggctctggtgaaggaaatacttcctaacgggcacgtcaaggtacattttgtggactacgggaatattgaggaggttacagccgatgagttaaggatgatatctagcactttcctgaacttgcccttccagggcatccggtgtcagttggccgacatccagtctcggaacaaacattggtctgaggaggcaattacgagatttcagatgtgtgttgctggaattaagttacaggccagagtggttgaggttacagagaacgggataggggttgaactgactgacctttctacttgctatcctagaatcatctccgatgtgctcattgacgaacacctggtgctgaagtctgcctcaccacataaggatcttcctaacgaccgactggtgaacaaacacgaactccaggtacatgtgcagggcttgcaggctaccagctctgctgagcaatggaaaacaatagaactgccagttgacaagactattcaggccaatgtgctggagatcatctcaccgaacctgttttacgcactgcctaagggtatgccggaaaaccaggagaaactatgtatgctaacggctgagctcctggaatattgcaacgcaccaaaaagccggccaccgtatcgccctcgcattggggacgcatgctgcgcgaagtatacttctgacgatttctggtatcgggctgtagtcctgggtactagtgacactgacgtagaagtgctatacgcagactacggcaatattgagacgcttcccctgtgtagagttcagccaatcacgagctctcatcttgccctgccttttcagattatacgctgctccctggaggaaaaaatgtatagaatgaactgttgttgtacagaactgcaaaaacaggtcgagaagcacgaacacatcctactattccttttgaacaactctaccaatcagaataaattcatagaaatgaagaaattgctgaaaaaaacagcctcactgggcggaaaaccactgtag

SEQ ID NO: 283061 - DNA, 4062 bp, Artificial Sequence
  derived and/or modified sequence
ggtgtgggaggattctctgagtttggaaatagcgcttccaggcatcactccttcaaatgcaaacgttcaccttctctctaagagaaacttgcatgtggattcagtgccttcgtttgactaaaaattacgatacaaacaatattaacatttactagacttttttttccctactttcctcctataggaaaggaagatgtgctagggcatttacttagatgtgggtcagctggcgctagtttgtttaaggagttcctgctgtgtgccagtagcttttccgggccctagggtccttgctataaatacgttagccctgctgggcttctgaactaagggagctaaatgcttccagcttccttagtgaggcagcacggtgctgtatgcttaaatccaaggccgtggagtctgacctgcgtttttatctaaactgtgtaaggtgctggccctgggtggtttggcctcgatgagtgttaaatcgccatttaatgtgatgtcaagaaataatttggaagcacctccttgtaagatgacagagccatttaattttgagaaaaatgaaaacaagcttccaccacatgagtctttaagaagtcctggaacacttcctaaccaccctaatttcaggctgaaaagctcagagaatggaaataaaaagaacaattttttgctttgtgagcaaaccaaacaatatttggctagtcaggaagacaattcagtttcttcaaacccgaatggcatcaacggagaagtagttggctccaaaggagacaggaaaaaattgccagcaggaaactcagtgtcaccaccaagtgctgaaagtaattcaccacccaaagaagtgaatattaagcctggaaataatgtacgtcctgcaaaatcaaaaaaactaaacaagttggtcgagaattccttgtccataagtaatccagggctcttcacctccttaggacctcctcttcggtccacaacttgccatcgctgtggcctatttggatcgctgaggtgctctcagtgcaagcagacctactattgctccacagcatgtcaaagaagagactggtctgcacacagcatcgtgtgcaggcctgttcagccaaatttccacaaacttgaaaataaatcatctattgaaacaaaggatgtggaggtaaacaataagagtgactgtccacttggagttactaaggaaatagccatttgggctgagagaataatgttttctgatttgagaagtctacaactcaagaaaaccatggaaataaagggtacggttaccgaattcaaacacccaggggacttctacgtgcagttatattcttcagaagttttagaatacatgaaccaactctctgccagcttaaaagaaacatatgcaaatgtgcatgaaaaagactatattcctgttaagggggaagtttgtattgccaagtacactgttgatcagacctggaacagagcaatcatacaaaacgttgatgtgcagcaaaagaaggcacatgtcttatatattgattatggaaatgaagaaataattccattaaacagaatttaccacctcaacaggaacattgacttgtttcctccttgtgccataaagtgctttgtagccaatgttatcccagcagaagggaattggagcagtgattgtatcaaagctactaaaccactgttaatggagcagtactgctccataaagattgtcgacatcttggaagaggaagtggttacctttgctgtagaagttgagctgccaaattcaggaaaacttttagaccatgtgcttatagaaatgggatatggcttgaaacccagtggacaagattctaagaaggaaaatgcagatcaaagtgatcctgaagatgttggaaaaatgacaactgaaaacaacattgtcgtagacaaaagtgacctaatcccaaaagtgttaactttgaatgtaggtgatgagttttgtggtgtggttgcccacattcaaacaccagaagacttcttttgtcaacaactgcaaagtggccgaaagcttgctgaacttcaggcatcccttagcaagtactgtgatcagttgcctccacgctctgatttttatccagccattggtgatatatgttgtgctcagttctcagaggatgatcagtggtaccgtgcctctgttttggcttacgcttctgaagaatctgtactggtcggatatgtagattatggaaactttgaaatccttagtttgatgagactttgtcccataatcccaaagttgttggaattgccaatgcaagctataaagtgtgtactagcaggagtaaagccatcattaggaatttggactccagaagctatttgtctcatgaaaaaacttgtacagaacaaaataatcacagtgaaagtggtggacaagttggaaaacagttccctggtggagcttattgataaatccgagacgcctcatgtcagtgttagcaaagttctcctagatgcaggctttgctgtgggagaacagagtatggtgacagataaacccagtgacgtgaaagaaaccagtgttcccttgggtgtggaaggaaaagtaaatccattggagtggacatgggttgaacttggtgttgaccaaacagtagatgttgtggtctgtgtgatatatagtcctggagaattttattgccatgtgcttaaagaggatgctttaaagaaactcaatgatttgaacaagtcattagcagaacactgccagcagaagttacctaatggtttcaaggcagagataggacaaccttgttgtgctttttttgcaggtgatggtagttggtatcgtgctttagtcaaggaaatcttaccaaatggacatgttaaagtacattttgtggattatggaaacatcgaagaagttactgcagatgaactccgaatgatatcatcaacatttttaaaccttccctttcagggaatacggtgccagttagcagatatacagtctagaaacaaacattggtctgaagaagccataacaagattccagatgtgtgttgctgggataaaattgcaagccagagtggttgaagtcactgaaaatgggataggagttgaactcaccgatctctccacttgttatcccagaataattagtgatgttctgattgatgaacatctggttttaaaatctgcttcaccacataaagacttaccaaatgacagacttgttaataaacatgagcttcaagttcatgtacagggacttcaagctacctcttcagctgagcaatggaagacgatagaattgccagtggataaaactatacaagcaaatgtattagaaatcataagcccaaacttgttttatgctctaccaaaagggatgccagaaaatcaggaaaagctgtgcatgttgacagctgaattattagaatactgcaatgctccgaaaagtcgaccaccctatagaccaagaattggagacgcatgctgtgccaaatacacaagtgatgatttttggtatcgtgcagttgttctggggacatcagacactgatgtggaagtgctctatgcagactatggaaacattgaaaccctgcctctttgcagagtgcaaccaatcacctctagccacctggcgcttcctttccaaattattagatgttcacttgaagaaaagatgtataggatgaattgctgctgcacagagttacagaaacaagttgaaaaacatgaacatattcttctcttcctcttaaacaattcaaccaatcaaaataaatttattgaaatgaaaaaactgttaaaaagttaagtaagttaaatcgtatgttttcgcctcttctgtgatcaccaataggacatcttcaggcatattggcaggatagagctaatggagtgaaacctattgtaaggctgtactttcgtgatttaatgacctgaggtttggtcataatgcttctgctgtttttgtaggtttatctgatcgttttcctttgctactgctaatggaactgaacccccaggggtattccagttgtaatagcctttccttactgttgtttggttctgtgaatgcctatgttattgatatgtggaggg

SEQ ID NO: 283062 - DNA, 3705 bp, Artificial Sequence
  derived and/or modified sequence
gctgaggccaggagggcgcactggggattggaggcgagggaagtgcagggcgcatcccaggcggcagggctcccagcatcggcagtcgccatcaccgccagaccgcagagacaggttcggatccgcggtcctcttgcctctttccaggcctcgatgagtgttaaatcgccatttaatgtgatgtcaagaaataatttggaagcacctccttgtaagatgacagagccatttaattttgagaaaaatgaaaacaagcttccaccacatgagtctttaagaagtcctggaacacttcctaaccaccctaatttcaggctgaaaagctcagagaatggaaataaaaagaacaattttttgctttgtgagcaaaccaaacaatatttggctagtcaggaagacaattcagtttcttcaaacccgaatggcatcaacggagaagtagttggctccaaaggagacaggaaaaaattgccagcaggaaactcagtgtcaccaccaagtgctgaaagtaattcaccacccaaagaagtgaatattaagcctggaaataatgtacgtcctgcaaaatcaaaaaaactaaacaagttggtcgagaattccttgtccataagtaatccagggctcttcacctccttaggacctcctcttcggtccacaacttgccatcgctgtggcctatttggatcgctgaggtgctctcagtgcaagcagacctactattgctccacagcatgtcaaagaagagactggtctgcacacagcatcgtgtgcaggcctgttcagccaaatttccacaaacttgaaaataaatcatctattgaaacaaaggatgtggaggtaaacaataagagtgactgtccacttggagttactaaggaaatagccatttgggctgagagaataatgttttctgatttgagaagtctacaactcaagaaaaccatggaaataaagggtacggttaccgaattcaaacacccaggggacttctacgtgcagttatattcttcagaagttttagaatacatgaaccaactctctgccagcttaaaagaaacatatgcaaatgtgcatgaaaaagactatattcctgttaagggggaagtttgtattgccaagtacactgttgatcagacctggaacagagcaatcatacaaaacgttgatgtgcagcaaaagaaggcacatgtcttatatattgattatggaaatgaagaaataattccattaaacagaatttaccacctcaacaggaacattgacttgtttcctccttgtgccataaagtgctttgtagccaatgttatcccagcagaagggaattggagcagtgattgtatcaaagctactaaaccactgttaatggagcagtactgctccataaagattgtcgacatcttggaagaggaagtggttacctttgctgtagaagttgagctgccaaattcaggaaaacttttagaccatgtgcttatagaaatgggatatggcttgaaacccagtggacaagattctaagaaggaaaatgcagatcaaagtgatcctgaagatgttggaaaaatgacaactgaaaacaacattgtcgtagacaaaagtgacctaatcccaaaagtgttaactttgaatgtaggtgatgagttttgtggtgtggttgcccacattcaaacaccagaagacttcttttgtcaacaactgcaaagtggccgaaagcttgctgaacttcaggcatcccttagcaagtactgtgatcagttgcctccacgctctgatttttatccagccattggtgatatatgttgtgctcagttctcagaggatgatcagtggtaccgtgcctctgttttggcttacgcttctgaagaatctgtactggtcggatatgtagattatggaaactttgaaatccttagtttgatgagactttgtcccataatcccaaagttgttggaattgccaatgcaagctataaagtgtgtactagcaggagtaaagccatcattaggaatttggactccagaagctatttgtctcatgaaaaaacttgtacagaacaaaataatcacagtgaaagtggtggacaagttggaaaacagttccctggtggagcttattgataaatccgagacgcctcatgtcagtgttagcaaagttctcctagatgcaggctttgctgtgggagaacagagtatggtgacagataaacccagtgacgtgaaagaaaccagtgttcccttgggtgtggaaggaaaagtaaatccattggagtggacatgggttgaacttggtgttgaccaaacagtagatgttgtggtctgtgtgatatatagtcctggagaattttattgccatgtgcttaaagaggatgctttaaagaaactcaatgatttgaacaagtcattagcagaacactgccagcagaagttacctaatggtttcaaggcagagataggacaaccttgttgtgctttttttgcaggtgatggtagttggtatcgtgctttagtcaaggaaatcttaccaaatggacatgttaaagtacattttgtggattatggaaacatcgaagaagttactgcagatgaactccgaatgatatcatcaacatttttaaaccttccctttcagggaatacggtgccagttagcagatatacagtctagaaacaaacattggtctgaagaagccataacaagattccagatgtgtgttgctgggataaaattgcaagccagagtggttgaagtcactgaaaatgggataggagttgaactcaccgatctctccacttgttatcccagaataattagtgatgttctgattgatgaacatctggttttaaaatctgcttcaccacataaagacttaccaaatgacagacttgttaataaacatgagcttcaagttcatgtacagggacttcaagctacctcttcagctgagcaatggaagacgatagaattgccagtggataaaactatacaagcaaatgtattagaaatcataagcccaaacttgttttatgctctaccaaaagggatgccagaaaatcaggaaaagctgtgcatgttgacagctgaattattagaatactgcaatgctccgaaaagtcgaccaccctatagaccaagaattggagacgcatgctgtgccaaatacacaagtgatgatttttggtatcgtgcagttgttctggggacatcagacactgatgtggaagtgctctatgcagactatggaaacattgaaaccctgcctctttgcagagtgcaaccaatcacctctagccacctggcgcttcctttccaaattattagatgttcacttgaagaaaagatgtataggatgaattgctgctgcacagagttacagaaacaagttgaaaaacatgaacatattcttctcttcctcttaaacaattcaaccaatcaaaataaatttattgaaatgaaaaaactgttaaaaaaaacagcatctcttggaggtaaacccttatgagacaggaaacagcaaaggctagctttaggagagaaagtacagcacctggtgtttttatttatgagaaccttttctttgtccactttctctgtaatgaccttctatccctccgtttttgcctgcctgccattctcctattaggttggtggtttttattttcctctaagttccttccaccaaataaatattacgtaaaaaattcataccaaa

SEQ ID NO: 283063 - protein, 828 aa, Artificial Sequence
  derived and/or modified sequence
MDESALTLGTIDVSYLPHSSEYSVGRCKHTSEEWGECGFRPTIFRSATLKWKESLMSRKRPFVGRCCYSCTPQSWDKFFNPSIPSLGLRNVIYINETHTRHRGWLARRLSYVLFIQERDVHKGMFATNVTENVLNSSRVQEAIAEVAAELNPDGSAQQQSKAVNKVKKKAKRILQEMVATVSPAMIRLTGWVLLKLFNSFFWNIQIHKGQLEMVKAATETNLPLLFLPVHRSHIDYLLLTFILFCHNIKAPYIASGNNLNIPIFSTLIHKLGGFFIRRRLDETPDGRKDVLYRALLHGHIVELLRQQQFLEIFLEGTRSRSGKTSCARAGLLSVVVDTLSTNVIPDILIIPVGISYDRIIEGHYNGEQLGKPKKNESLWSVARGVIRMLRKNYGCVRVDFAQPFSLKEYLESQSQKPVSALLSLEQALLPAILPSRPSDAADEGRDTSINESRNATDESLRRRLIANLAEHILFTASKSCAIMSTHIVACLLLYRHRQGIDLSTLVEDFFVMKEEVLARDFDLGFSGNSEDVVMHAIQLLGNCVTITHTSRNDEFFITPSTTVPSVFELNFYSNGVLHVFIMEAIIACSLYAVLNKRGLGGPTSTPPNLISQEQLVRKAASLCYLLSNEGTISLPCQTFYQVCHETVGKFIQYGILTVAEHDDQEDISPSLAEQQWDKKLPEPLSWRSDEEDEDSDFGEEQRDCYLKVSQSKEHQQFITFLQRLLGPLLEAYSSAAIFVHNFSGPVPEPEYLQKLHKYLITRTERNVAVYAESATYCLVKNAVKMFKDIGVFKETKQKRVSVLELSSTFLPQCNRQKLLEYILSFVVL

SEQ ID NO: 283064 - protein, 710 aa, Artificial Sequence
  derived and/or modified sequence
MDESALTLGTIDVSYLPHSSEYSVGRCKHTSEEWGECGFRPTIFRSATLKWKESLMSRKRPFVGRCCYSCTPQSWDKFFNPSIPSLGLRNVIYINETHTRHRGWLARRLSYVLFIQERDVHKGMFATNVTENVLNSSRVQEAIAEVAAELNPDGSAQQQSKAVNKVKKKAKRILQEMVATVSPAMIRLTGWVLLKLFNSFFWNIQIHKGQLEMVKAATETNLPLLFLPVHRSHIDYLLLTFILFCHNIKAPYIASGNNLNIPIFSTLIHKLGGFFIRRRLDETPDGRKDVLYRALLHGHIVELLRQQQFLEIFLEGTRSRSGKTSCARAGLLSVVVDTLSTNVIPDILIIPVGISYDRIIEGHYNGEQLGKPKKNESLWSVARGVIRMLRKNYGCVRVDFAQPFSLKEYLESQSQKPVSALLSLEQALLPAILPSRPSDAADEGRDTSINESRNATDESLRRRLIANLAEHILFTASKSCAIMSTHIVACLLLYRHRQGIDLSTLVEDFFVMKEEVLARDFDLGFSGNSEDVVMHAIQLLGNCVTITHTSRNDEFFITPSTTVPSVFELNFYSNGVLHVFIMEAIIACSLYAVLNKRGLGGPTSTPPNLISQEQLVRKAASLCYLLSNEGTISLPCQTFYQVCHETVGKFIQYGILTVAEHDDQEDISPSLAEQQWDKKLPEPLSWRSDEEDEDSDFGEEQRDCYLKVLG

SEQ ID NO: 283065 - DNA, 2487 bp, Artificial Sequence
  derived and/or modified sequence
atggacgagagcgccctgaccctgggcaccatcgacgtgagctacctgccccacagcagcgagtacagcgtgggcagatgcaagcacaccagcgaggagtggggcgagtgcggcttcagacccaccatcttcagaagcgccaccctgaagtggaaggagagcctgatgagcagaaagagacccttcgtgggcagatgctgctacagctgcaccccccagagctgggacaagttcttcaaccccagcatccccagcctgggcctgagaaacgtgatctacatcaacgagacccacaccagacacagaggctggctggccagaagactgagctacgtgctgttcatccaggagagagacgtgcacaagggcatgttcgccaccaacgtgaccgagaacgtgctgaacagcagcagagtgcaggaggccatcgccgaggtggccgccgagctgaaccccgacggcagcgcccagcagcagagcaaggccgtgaacaaggtgaagaagaaggccaagagaatcctgcaggagatggtggccaccgtgagccccgccatgatcagactgaccggctgggtgctgctgaagctgttcaacagcttcttctggaacatccagatccacaagggccagctggagatggtgaaggccgccaccgagaccaacctgcccctgctgttcctgcccgtgcacagaagccacatcgactacctgctgctgaccttcatcctgttctgccacaacatcaaggccccctacatcgccagcggcaacaacctgaacatccccatcttcagcaccctgatccacaagctgggcggcttcttcatcagaagaagactggacgagacccccgacggcagaaaggacgtgctgtacagagccctgctgcacggccacatcgtggagctgctgagacagcagcagttcctggagatcttcctggagggcaccagaagcagaagcggcaagaccagctgcgccagagccggcctgctgagcgtggtggtggacaccctgagcaccaacgtgatccccgacatcctgatcatccccgtgggcatcagctacgacagaatcatcgagggccactacaacggcgagcagctgggcaagcccaagaagaacgagagcctgtggagcgtggccagaggcgtgatcagaatgctgagaaagaactacggctgcgtgagagtggacttcgcccagcccttcagcctgaaggagtacctggagagccagagccagaagcccgtgagcgccctgctgagcctggagcaggccctgctgcccgccatcctgcccagcagacccagcgacgccgccgacgagggcagagacaccagcatcaacgagagcagaaacgccaccgacgagagcctgagaagaagactgatcgccaacctggccgagcacatcctgttcaccgccagcaagagctgcgccatcatgagcacccacatcgtggcctgcctgctgctgtacagacacagacagggcatcgacctgagcaccctggtggaggacttcttcgtgatgaaggaggaggtgctggccagagacttcgacctgggcttcagcggcaacagcgaggacgtggtgatgcacgccatccagctgctgggcaactgcgtgaccatcacccacaccagcagaaacgacgagttcttcatcacccccagcaccaccgtgcccagcgtgttcgagctgaacttctacagcaacggcgtgctgcacgtgttcatcatggaggccatcatcgcctgcagcctgtacgccgtgctgaacaagagaggcctgggcggccccaccagcaccccccccaacctgatcagccaggagcagctggtgagaaaggccgccagcctgtgctacctgctgagcaacgagggcaccatcagcctgccctgccagaccttctaccaggtgtgccacgagaccgtgggcaagttcatccagtacggcatcctgaccgtggccgagcacgacgaccaggaggacatcagccccagcctggccgagcagcagtgggacaagaagctgcccgagcccctgagctggagaagcgacgaggaggacgaggacagcgacttcggcgaggagcagagagactgctacctgaaggtgagccagagcaaggagcaccagcagttcatcaccttcctgcagagactgctgggccccctgctggaggcctacagcagcgccgccatcttcgtgcacaacttcagcggccccgtgcccgagcccgagtacctgcagaagctgcacaagtacctgatcaccagaaccgagagaaacgtggccgtgtacgccgagagcgccacctactgcctggtgaagaacgccgtgaagatgttcaaggacatcggcgtgttcaaggagaccaagcagaagagagtgagcgtgctggagctgagcagcaccttcctgccccagtgcaacagacagaagctgctggagtacatcctgagcttcgtggtgctgtag

SEQ ID NO: 283066 - DNA, 2133 bp, Artificial Sequence
  derived and/or modified sequence
atggacgagagcgccctgaccctgggcaccatcgacgtgagctacctgccccacagcagcgagtacagcgtgggcagatgcaagcacaccagcgaggagtggggcgagtgcggcttcagacccaccatcttcagaagcgccaccctgaagtggaaggagagcctgatgagcagaaagagacccttcgtgggcagatgctgctacagctgcaccccccagagctgggacaagttcttcaaccccagcatccccagcctgggcctgagaaacgtgatctacatcaacgagacccacaccagacacagaggctggctggccagaagactgagctacgtgctgttcatccaggagagagacgtgcacaagggcatgttcgccaccaacgtgaccgagaacgtgctgaacagcagcagagtgcaggaggccatcgccgaggtggccgccgagctgaaccccgacggcagcgcccagcagcagagcaaggccgtgaacaaggtgaagaagaaggccaagagaatcctgcaggagatggtggccaccgtgagccccgccatgatcagactgaccggctgggtgctgctgaagctgttcaacagcttcttctggaacatccagatccacaagggccagctggagatggtgaaggccgccaccgagaccaacctgcccctgctgttcctgcccgtgcacagaagccacatcgactacctgctgctgaccttcatcctgttctgccacaacatcaaggccccctacatcgccagcggcaacaacctgaacatccccatcttcagcaccctgatccacaagctgggcggcttcttcatcagaagaagactggacgagacccccgacggcagaaaggacgtgctgtacagagccctgctgcacggccacatcgtggagctgctgagacagcagcagttcctggagatcttcctggagggcaccagaagcagaagcggcaagaccagctgcgccagagccggcctgctgagcgtggtggtggacaccctgagcaccaacgtgatccccgacatcctgatcatccccgtgggcatcagctacgacagaatcatcgagggccactacaacggcgagcagctgggcaagcccaagaagaacgagagcctgtggagcgtggccagaggcgtgatcagaatgctgagaaagaactacggctgcgtgagagtggacttcgcccagcccttcagcctgaaggagtacctggagagccagagccagaagcccgtgagcgccctgctgagcctggagcaggccctgctgcccgccatcctgcccagcagacccagcgacgccgccgacgagggcagagacaccagcatcaacgagagcagaaacgccaccgacgagagcctgagaagaagactgatcgccaacctggccgagcacatcctgttcaccgccagcaagagctgcgccatcatgagcacccacatcgtggcctgcctgctgctgtacagacacagacagggcatcgacctgagcaccctggtggaggacttcttcgtgatgaaggaggaggtgctggccagagacttcgacctgggcttcagcggcaacagcgaggacgtggtgatgcacgccatccagctgctgggcaactgcgtgaccatcacccacaccagcagaaacgacgagttcttcatcacccccagcaccaccgtgcccagcgtgttcgagctgaacttctacagcaacggcgtgctgcacgtgttcatcatggaggccatcatcgcctgcagcctgtacgccgtgctgaacaagagaggcctgggcggccccaccagcaccccccccaacctgatcagccaggagcagctggtgagaaaggccgccagcctgtgctacctgctgagcaacgagggcaccatcagcctgccctgccagaccttctaccaggtgtgccacgagaccgtgggcaagttcatccagtacggcatcctgaccgtggccgagcacgacgaccaggaggacatcagccccagcctggccgagcagcagtgggacaagaagctgcccgagcccctgagctggagaagcgacgaggaggacgaggacagcgacttcggcgaggagcagagagactgctacctgaaggtgctgggctag

SEQ ID NO: 283067 - DNA, 6369 bp, Artificial Sequence
  derived and/or modified sequence
gccactgcagctggcattggccgggactggaagtgcgggcttctgcagcagccgaagctggagctgctagggcagcagcggctcccctgttgtatggacattctgcacccgaaactgatagctgagtcctgaagttttatgttatgaaacagaagaactttcatcccagcacatgatttgggaattacactttgtgacatggatgaatctgcactgacccttggtacaatagatgtttcttatctgccacattcatcagaatacagtgttggtcgatgtaagcacacaagtgaggaatggggtgagtgtggctttagacccaccatcttcagatctgcaactttaaaatggaaagaaagcctaatgagtcggaaaaggccatttgttggaagatgttgttactcctgcactccccagagctgggacaaatttttcaaccccagtatcccgtctttgggtttgcggaatgttatttatatcaatgaaactcacacaagacaccgcggatggcttgcaagacgcctttcttacgttctttttattcaagagcgagatgtgcataagggcatgtttgccaccaatgtgactgaaaatgtgctgaacagcagtagagtacaagaggcaattgcagaagtggctgctgaattaaaccctgatggttctgcccagcagcaatcaaaagccgttaacaaagtgaaaaagaaagctaaaaggattcttcaagaaatggttgccactgtctcaccggcaatgatcagactgactgggtgggtgctgctaaaactgttcaacagcttcttttggaacattcaaattcacaaaggtcaacttgagatggttaaagctgcaactgagacgaatttgccgcttctgtttctaccagttcatagatcccatattgactatctgctgctcactttcattctcttctgccataacatcaaagcaccatacattgcttcaggcaataatctcaacatcccaatcttcagtaccttgatccataagcttgggggcttcttcatacgacgaaggctcgatgaaacaccagatggacggaaagatgttctctatagagctttgctccatgggcatatagttgaattacttcgacagcagcaattcttggagatcttcctggaaggcacacgttctaggagtggaaaaacctcttgtgctcgggcaggacttttgtcagttgtggtagatactctgtctaccaatgtcatcccagacatcttgataatacctgttggaatctcctatgatcgcattatcgaaggtcactacaatggtgaacaactgggcaaacctaagaagaatgagagcctgtggagtgtagcaagaggtgttattagaatgttacgaaaaaactatggttgtgtccgagtggattttgcacagccattttccttaaaggaatatttagaaagccaaagtcagaaaccggtgtctgctctactttccctggagcaagcgttgttaccagctatacttccttcaagacccagtgatgctgctgatgaaggtagagacacgtccattaatgagtccagaaatgcaacagatgaatccctacgaaggaggttgattgcaaatctggctgagcatattctattcactgctagcaagtcctgtgccattatgtccacacacattgtggcttgcctgctcctctacagacacaggcagggaattgatctctccacattggtcgaagacttctttgtgatgaaagaggaagtcctggctcgtgattttgacctggggttctcaggaaattcagaagatgtagtaatgcatgccatacagctgctgggaaattgtgtcacaatcacccacactagcaggaacgatgagttttttatcacccccagcacaactgtcccatcagtcttcgaactcaacttctacagcaatggggtacttcatgtctttatcatggaggccatcatagcttgcagcctttatgcagttctgaacaagaggggactggggggtcccactagcaccccacctaacctgatcagccaggagcagctggtgcggaaggcggccagcctgtgctaccttctctccaatgaaggcaccatctcactgccttgccagacattttaccaagtctgccatgaaacagtaggaaagtttatccagtatggcattcttacagtggcagagcacgatgaccaggaagatatcagtcctagtcttgctgagcagcagtgggacaagaagcttccagaacctttgtcttggagaagtgatgaagaagatgaagacagtgactttggggaggaacagcgagattgctacctgaaggtgagccaatccaaggagcaccagcagtttatcaccttcttacagagactccttgggcctttgctggaggcctacagctctgctgccatctttgttcacaacttcagtggtcctgttccagaacctgagtatctgcaaaagttgcacaaatacctaataaccagaacagaaagaaatgttgcagtatatgctgagagtgccacatattgtcttgtgaagaatgctgtgaaaatgtttaaggatattggggttttcaaggagaccaaacaaaagagagtgtctgttttagaactgagcagcacttttctacctcaatgcaaccgacaaaaacttctagaatatattctgagttttgtggtgctgtaggtaacgtgtggcactgctggcaaatgaaggtcatgagatgagttccttgtaggtaccagcttctggctcaagagttgaaggtgccatcgcagggtcaggcctgccctgtcccgaagtgatctcctggaagacaagtgccttctccctccatggatctgtgatcttcccagctctgcatcaacacagcagcctgcagataacacttggggggacctcagcctctattcgcaactcataatccgtagactacaagatgaaatctcaataaattatttttgagtttattaaagattgacattttaagtacaacttttaaggactaattactgtgatggacacagaaatgtagctgtgttctggaactgaatcttacatggtatacttagtgctgctgggtaatttgttggtatattatctggttagtggttaatgcttcctttaaaaataattgagtcatccattcactctttttcagttttatctgtcaatagtagctacatttttaatgggagcaccttttatcccaaagtgctttataaattgagtggactgatatatatcacacccaggtatcactgtgctgtcctttgctgtcagatttagaaatgtttttaagagctatgtgaaaacagacaatattagtttaggtcgggaactgagatattgtaatcaaatagttaacatcaggaagttaatttggctggcaaaattctagggaaacttggccagaaaactggtgttgaaggcttttgctcatataaacaagtgccattgagtttcaaatgaccagcaaatatatttagaacccttcctgttttatgtctgtacctcgtccacccctcaggtaatacctgcctctcacaggtacagctgtttcttggaaatcctccaaccaaatagcagttttcctaacttgattagcttgagctgacagactgttagaatacagttctctggccacagctgatgagggctttctgtactgcacacagattgtgtactgcaccccagtccaggtgactggtacccactcgagttgtgccgtgcacaacctgtccagtatatgcatgtggtggccctactgactggtaatggttagaggcatttatggatttttagctttgaggaaaaaccatgacttttaacaaatttttatgggttatatgcctaaacccttatgccacatagtggtaaataattatgaaaaatggtctgttcataattggtaggtgccttttgtgagcagggagcataattattggtttattatggtaattatggtgattttttaaatatcatgtaatgttaaaacgttttctaacagtttactgttgcttatctccaagatattatggaattaagaatttttccagatgagtgttacatagattctttgaatttagtataaaagtactgagaattaagtttgtacttccataagcttggattttaaacactgatagtatctcatgagtaatgtgtgttttgggagagggagggatgctgattgatatttcacattgtatgaaataccatgtttgaaactcatagcaataatgctatgctgttgtgatccctctcaagttctgcatttaaaatatattttttctttataggaattgatgtataccatgaagtcattgtcagttgtagtagctctgatgttgaatgagatatcatgttttagcattccattttactgactagggtagaagaacacttttcttggctacatttggaggatacccagggagtcttgggtgttccttatctggggaagcaaacatttcactagtctctttttttcatcctttaaattgtaaattaaggattactcaagctcaccattattcaagattgggactcgcttcccagtcgacactctgccctgcctgtcattgctgcaaagagctgctgctttgccaacctaagcaaagaaaatacggcttctcttgcattattttcccttttggttggtttgttttctagaagtacgttcagatgctttggggaatgcaatgtatgatttgctagctctctcaccacttaactcactgtgaggataaatatgcatgctttttgtaattaactggtgctttgaaaatcttttttaagggagaaaaatctcaaccaaagttatgctcatccagacaagctgacctttgagttaatttcagcacaactcattcttcagtgcctcatgactgaaaacaaaaaacaaaaaaacgaaagcatcttcacaatgaagcttccagatagcaccgttttgctaaaagatacattctcattgttttccaacagtgatggcttccacataaggttaaacaaactaggtgcttgtaaataatttattacagtttactctatcgcatttctgtaacatgaaatgcatgcccttcttcaggggaagactgtggtcaagttaaaaaaaaaaaacaatattaaacaacatgaaactgcagtctgtttttgaaaatgagaatgtcctaagtgattcagaagagaggagggaagttgtgcactctgaaaatgcatgaaaaacaaaggcaaaaactagtgggaaatgtgtagaactgttaactgagatggcttcgagtcttccttctggaatctgttaaatttcacaaagtcatgagggtaaatggagaaaatatttctgggattacaatgaatgtaagcccaaattgtggaattgccagtaacctggatggggaaaagcatttcccatagcactccatgtaatatgagtgctctgtgagatgttcatcagtgttttatagaaatggtgttgctgggaaaccaagtttgcacctggaaacttacaatgcactttagcgcagtaagggcttggcatccggtagtgaaaaactgtctaacccagcattgcccaaactattttgacaccaggacctttttctcctttgggatacttatgaacctctcactaatgtcctgtggagaacattttgggaaacactatgttagatagttctttaaggagacaaaacggtaatgaacagatagcactggggcagaatatgcatgcattttgtaacgtccagtgtggcgttgaatagatgtgtatttcctcccctgcagaaaataagcacagaaaattataatgtaggtgatcggagctctttcctttgatagagagaacagccccaatgatcctggctttttcactgaacgtatcagaatacatggatgaattggggtaaataaggttttaattcagatctagaagaaagtattgtacgtttgaatgcagatttttatccacagatagttgtagtgtttagacatgacaggacctatcgttgaggtttctaagacttactatgggctgtaaacctgttttttaaaactattttagaaacctgagacttgccgtctggcattttagtttaatacaaactaatgattgcatttgaaagagattcttgaccttatttctaaacgtctagagctctgaaatgtcttgatggaaggtattaaactatttgcctgttgtacaaagaaatgttaagactcgtgaaaagaattactataaggtactgtgaaataactgcgattttgtgagcaaaacatacttggaaatgctgattgatttttatgcttgttagtgtattgcaagaaacacagaaaatgtagttttgttttaataaaccaaaaattgaacat

SEQ ID NO: 283068 - DNA, 5664 bp, Artificial Sequence
  derived and/or modified sequence
gaagctggagctgctagggtgcgaactgccagggcaggcagcagcggctcccctgttgtatggacattctgcacccgaaactgatagctgagtcctgaagttttatgttatgaaacagaagaactttcatcccagcacatgatttgggaattacactttgtgacatggatgaatctgcactgacccttggtacaatagatgtttcttatctgccacattcatcagaatacagtgttggtcgatgtaagcacacaagtgaggaatggggtgagtgtggctttagacccaccatcttcagatctgcaactttaaaatggaaagaaagcctaatgagtcggaaaaggccatttgttggaagatgttgttactcctgcactccccagagctgggacaaatttttcaaccccagtatcccgtctttgggtttgcggaatgttatttatatcaatgaaactcacacaagacaccgcggatggcttgcaagacgcctttcttacgttctttttattcaagagcgagatgtgcataagggcatgtttgccaccaatgtgactgaaaatgtgctgaacagcagtagagtacaagaggcaattgcagaagtggctgctgaattaaaccctgatggttctgcccagcagcaatcaaaagccgttaacaaagtgaaaaagaaagctaaaaggattcttcaagaaatggttgccactgtctcaccggcaatgatcagactgactgggtgggtgctgctaaaactgttcaacagcttcttttggaacattcaaattcacaaaggtcaacttgagatggttaaagctgcaactgagacgaatttgccgcttctgtttctaccagttcatagatcccatattgactatctgctgctcactttcattctcttctgccataacatcaaagcaccatacattgcttcaggcaataatctcaacatcccaatcttcagtaccttgatccataagcttgggggcttcttcatacgacgaaggctcgatgaaacaccagatggacggaaagatgttctctatagagctttgctccatgggcatatagttgaattacttcgacagcagcaattcttggagatcttcctggaaggcacacgttctaggagtggaaaaacctcttgtgctcgggcaggacttttgtcagttgtggtagatactctgtctaccaatgtcatcccagacatcttgataatacctgttggaatctcctatgatcgcattatcgaaggtcactacaatggtgaacaactgggcaaacctaagaagaatgagagcctgtggagtgtagcaagaggtgttattagaatgttacgaaaaaactatggttgtgtccgagtggattttgcacagccattttccttaaaggaatatttagaaagccaaagtcagaaaccggtgtctgctctactttccctggagcaagcgttgttaccagctatacttccttcaagacccagtgatgctgctgatgaaggtagagacacgtccattaatgagtccagaaatgcaacagatgaatccctacgaaggaggttgattgcaaatctggctgagcatattctattcactgctagcaagtcctgtgccattatgtccacacacattgtggcttgcctgctcctctacagacacaggcagggaattgatctctccacattggtcgaagacttctttgtgatgaaagaggaagtcctggctcgtgattttgacctggggttctcaggaaattcagaagatgtagtaatgcatgccatacagctgctgggaaattgtgtcacaatcacccacactagcaggaacgatgagttttttatcacccccagcacaactgtcccatcagtcttcgaactcaacttctacagcaatggggtacttcatgtctttatcatggaggccatcatagcttgcagcctttatgcagttctgaacaagaggggactggggggtcccactagcaccccacctaacctgatcagccaggagcagctggtgcggaaggcggccagcctgtgctaccttctctccaatgaaggcaccatctcactgccttgccagacattttaccaagtctgccatgaaacagtaggaaagtttatccagtatggcattcttacagtggcagagcacgatgaccaggaagatatcagtcctagtcttgctgagcagcagtgggacaagaagcttccagaacctttgtcttggagaagtgatgaagaagatgaagacagtgactttggggaggaacagcgagattgctacctgaaggtacttgggtgaagaattctggtggatattacagggatatgttgaggtttatgctgcagtgagatcagctggagtcctggtgatgtcttcttatctaaagaatcccccaactagctctggtaccttctgtgtggtaaagacactcaaactgtttgagttgaattaatagcattttaagtagaaaaggaaaggagagtctgaaaagtcaggaagatgaatgtcataggtgagactttcaccatccttttatgaaatacacaggtgcatacctgtttacctacacctgcacccctcatgaggcagcagttttgctattgagctgccactgacctggctgctctttttgagtcactcttgctgtccctcccaaaatttcatatattaagctctttgctgtcaattaaaacaaataccattataggagaaaattgagattaaaaaaaaagtccctgatttagaaaaatcaattttgtctaatttataattttagaacttagtaataatgacccgtcttttctgaatactctaagaggattactcttttttgacatttagaaattgtcttctttttcacttgggtggtattagtttagtttcaagatggggcagtgatcttgctttcacactccagaggggcttgaccgaaccagtgtgttttgggtaggtacagtgagagcctctcggccataaagcaccgccgtcacagtggccatcattccccacagtgctggactgtgggcaaaggccatttaggggaggcagggaataggtgctgcagaaggagtgagataatcttggtggtctcccattggtctttctgcagacttgagtgactgttgagcccaggcttcaaaccatggagggcctggtcttaggagcggctatttttagtgatgacagcgtatcacaagtagggcattcatttatgaaaatttcttctaggtggctgttcaatgaacacaagcctcaaataccataaaaaagtgaatgattacaataaagaatgtgtttgaaagccagcagttgtttccagcagagattctctgcatgaggggcagggggccgctttcatgtagtgctgatgtgagtggccatcttctcacgttactggctctccagagaaagtcctctgtccacttgccttgtgtctcttgtcccttcctcatgacttcatctcctgcttttgcacactcaggtgagccaatccaaggagcaccagcagtttatcaccttcttacagagactccttgggcctttgctggaggcctacagctctgctgccatctttgttcacaacttcagtggtcctgttccagaacctgagtatctgcaaaagttgcacaaatacctaataaccagaacagaaagaaatgttgcagtatatggtatgttaagtcactatttattcttttaaaatcttttttttttttttggatttcagaaatttgctaattgtagaaaattggaaaaatgcaaacttatcctgacctctaacaccgtagagtattactattatcttctttggcatgttatataagttgaatgatacagttatacactcttacatctggcttttttcacgtaacgttatttttgagattcatacatgttgcatatagttgttcctttgttcttgttgtgtagtgttccattgtataaatatttaccacattttattcattctgctgttgatggatatttgggttgttttcagttcacagctgctttgaacagtgttgctatgagcatatttgaatatgtcttttggtgaatatctgtgcccctatatacagcatgtatgtgggaacagaattgcctggttgtaggctctgggtatattcggctttggtagataccaccaaacagtttccaagggattatacctacttgtactcccacaacagtgtgtgtttcacttgctgcacatcttggccagcgctccgtcttctttgttttaggaggtgtgattggggtgggagtactattttatacagttgtagtttggagctgaaactacttgaatcactttttagagccaaaaggaatctaatctaatcacctcattttatagttgaggaaaataccccaggtcacactgctaattaatgggtaatctcgggatcagaattcttgtttcctaacctcgaggcctgtgctttctctggttccactgatgtacaatcatctgtgtaccactgggtagcttaaagaatatttatacactatctcatttgattctcacaacagtcctggaaaatggatgttttaggtatttctacttccctctgttctccctatttctctctctacaccctcttttctttccccttccctttcttatttacctcaatataggacaaagtaggtgtaagcaaagtaggtttaacagcaagtcatctgagaactcacaggttgccagtggtggaagtggggccccacccttgtctgctgacttgccctcattctcttcctagctccccatactttcttactgtggctgctgggattgtcatgatttgttgagcgtaaccatttgacagggttttattctctctcttcagctgagagtgccacatattgtcttgtgaagaatgctgtgaaaatgtttaaggatattggggtaggtgtccaccatttatggtataaaagctatctcaacttctgttctctttagatctagtctgtttgagctacctttgtggtggggtggaccccgagagaagcagtttctgctggcttaatgataaaggcatttttgggaacggggcatgtaggatgggttgggctatgttgaaggtgaagcccatcagtgtagatttatttgaatgttctggaattttactggtttcacatttattcccaagctgctatatataactggtatcaatatgtttcaaggtgctacaggttgaatatcccttatccaaaatgttgggaccagaaatgttttggatttcagatttttttgggattttggaatatgtgcattagacttacaggttgagcgtctctaatccaaaacccaaaatgctctgatgagcatgtcttttgagcatcatattgatgttcaaaatctttcagattttggagtacttcagatttttgattttgggattaggaccacaatcttggctcttaattattccatatgatttttagttactttcttgtatttttacaagaatttctagaagtatcctcaggtgtcctttaccttcatgattcatggggaatgtaagttctatagagatactagcggccttttgtgagggactgtttgtgactttattctaagtcattttagagtatagttatgttggttgaaattttagaatatagttaatgttggttgaactccatcaaaacaaaaaaaaaaaaa

SEQ ID NO: 283069 - DNA, 6356 bp, Artificial Sequence
  derived and/or modified sequence
gtgcgccactgcagctggcattggccgggactggaagtgcgggcttctgcagcagccgaagctggagctgctaggcagcggctcccctgttgtatggacattctgcacccgaaactgatagctgagtcctgaagttttatgttatgaaacagaagaactttcatcccagcacatgatttgggaattacactttgtgacatggatgaatctgcactgacccttggtacaatagatgtttcttatctgccacattcatcagaatacagtgttggtcgatgtaagcacacaagtgaggaatggggtgagtgtggctttagacccaccatcttcagatctgcaactttaaaatggaaagaaagcctaatgagtcggaaaaggccatttgttggaagatgttgttactcctgcactccccagagctgggacaaatttttcaaccccagtatcccgtctttgggtttgcggaatgttatttatatcaatgaaactcacacaagacaccgcggatggcttgcaagacgcctttcttacgttctttttattcaagagcgagatgtgcataagggcatgtttgccaccaatgtgactgaaaatgtgctgaacagcagtagagtacaagaggcaattgcagaagtggctgctgaattaaaccctgatggttctgcccagcagcaatcaaaagccgttaacaaagtgaaaaagaaagctaaaaggattcttcaagaaatggttgccactgtctcaccggcaatgatcagactgactgggtgggtgctgctaaaactgttcaacagcttcttttggaacattcaaattcacaaaggtcaacttgagatggttaaagctgcaactgagacgaatttgccgcttctgtttctaccagttcatagatcccatattgactatctgctgctcactttcattctcttctgccataacatcaaagcaccatacattgcttcaggcaataatctcaacatcccaatcttcagtaccttgatccataagcttgggggcttcttcatacgacgaaggctcgatgaaacaccagatggacggaaagatgttctctatagagctttgctccatgggcatatagttgaattacttcgacagcagcaattcttggagatcttcctggaaggcacacgttctaggagtggaaaaacctcttgtgctcgggcaggacttttgtcagttgtggtagatactctgtctaccaatgtcatcccagacatcttgataatacctgttggaatctcctatgatcgcattatcgaaggtcactacaatggtgaacaactgggcaaacctaagaagaatgagagcctgtggagtgtagcaagaggtgttattagaatgttacgaaaaaactatggttgtgtccgagtggattttgcacagccattttccttaaaggaatatttagaaagccaaagtcagaaaccggtgtctgctctactttccctggagcaagcgttgttaccagctatacttccttcaagacccagtgatgctgctgatgaaggtagagacacgtccattaatgagtccagaaatgcaacagatgaatccctacgaaggaggttgattgcaaatctggctgagcatattctattcactgctagcaagtcctgtgccattatgtccacacacattgtggcttgcctgctcctctacagacacaggcagggaattgatctctccacattggtcgaagacttctttgtgatgaaagaggaagtcctggctcgtgattttgacctggggttctcaggaaattcagaagatgtagtaatgcatgccatacagctgctgggaaattgtgtcacaatcacccacactagcaggaacgatgagttttttatcacccccagcacaactgtcccatcagtcttcgaactcaacttctacagcaatggggtacttcatgtctttatcatggaggccatcatagcttgcagcctttatgcagttctgaacaagaggggactggggggtcccactagcaccccacctaacctgatcagccaggagcagctggtgcggaaggcggccagcctgtgctaccttctctccaatgaaggcaccatctcactgccttgccagacattttaccaagtctgccatgaaacagtaggaaagtttatccagtatggcattcttacagtggcagagcacgatgaccaggaagatatcagtcctagtcttgctgagcagcagtgggacaagaagcttccagaacctttgtcttggagaagtgatgaagaagatgaagacagtgactttggggaggaacagcgagattgctacctgaaggtgagccaatccaaggagcaccagcagtttatcaccttcttacagagactccttgggcctttgctggaggcctacagctctgctgccatctttgttcacaacttcagtggtcctgttccagaacctgagtatctgcaaaagttgcacaaatacctaataaccagaacagaaagaaatgttgcagtatatgctgagagtgccacatattgtcttgtgaagaatgctgtgaaaatgtttaaggatattggggttttcaaggagaccaaacaaaagagagtgtctgttttagaactgagcagcacttttctacctcaatgcaaccgacaaaaacttctagaatatattctgagttttgtggtgctgtaggtaacgtgtggcactgctggcaaatgaaggtcatgagatgagttccttgtaggtaccagcttctggctcaagagttgaaggtgccatcgcagggtcaggcctgccctgtcccgaagtgatctcctggaagacaagtgccttctccctccatggatctgtgatcttcccagctctgcatcaacacagcagcctgcagataacacttggggggacctcagcctctattcgcaactcataatccgtagactacaagatgaaatctcaataaattatttttgagtttattaaagattgacattttaagtacaacttttaaggactaattactgtgatggacacagaaatgtagctgtgttctggaactgaatcttacatggtatacttagtgctgctgggtaatttgttggtatattatctggttagtggttaatgcttcctttaaaaataattgagtcatccattcactctttttcagttttatctgtcaatagtagctacatttttaatgggagcaccttttatcccaaagtgctttataaattgagtggactgatatatatcacacccaggtatcactgtgctgtcctttgctgtcagatttagaaatgtttttaagagctatgtgaaaacagacaatattagtttaggtcgggaactgagatattgtaatcaaatagttaacatcaggaagttaatttggctggcaaaattctagggaaacttggccagaaaactggtgttgaaggcttttgctcatataaacaagtgccattgagtttcaaatgaccagcaaatatatttagaacccttcctgttttatgtctgtacctcgtccacccctcaggtaatacctgcctctcacaggtacagctgtttcttggaaatcctccaaccaaatagcagttttcctaacttgattagcttgagctgacagactgttagaatacagttctctggccacagctgatgagggctttctgtactgcacacagattgtgtactgcaccccagtccaggtgactggtacccactcgagttgtgccgtgcacaacctgtccagtatatgcatgtggtggccctactgactggtaatggttagaggcatttatggatttttagctttgaggaaaaaccatgacttttaacaaatttttatgggttatatgcctaaacccttatgccacatagtggtaaataattatgaaaaatggtctgttcataattggtaggtgccttttgtgagcagggagcataattattggtttattatggtaattatggtgattttttaaatatcatgtaatgttaaaacgttttctaacagtttactgttgcttatctccaagatattatggaattaagaatttttccagatgagtgttacatagattctttgaatttagtataaaagtactgagaattaagtttgtacttccataagcttggattttaaacactgatagtatctcatgagtaatgtgtgttttgggagagggagggatgctgattgatatttcacattgtatgaaataccatgtttgaaactcatagcaataatgctatgctgttgtgatccctctcaagttctgcatttaaaatatattttttctttataggaattgatgtataccatgaagtcattgtcagttgtagtagctctgatgttgaatgagatatcatgttttagcattccattttactgactagggtagaagaacacttttcttggctacatttggaggatacccagggagtcttgggtgttccttatctggggaagcaaacatttcactagtctctttttttcatcctttaaattgtaaattaaggattactcaagctcaccattattcaagattgggactcgcttcccagtcgacactctgccctgcctgtcattgctgcaaagagctgctgctttgccaacctaagcaaagaaaatacggcttctcttgcattattttcccttttggttggtttgttttctagaagtacgttcagatgctttggggaatgcaatgtatgatttgctagctctctcaccacttaactcactgtgaggataaatatgcatgctttttgtaattaactggtgctttgaaaatcttttttaagggagaaaaatctcaaccaaagttatgctcatccagacaagctgacctttgagttaatttcagcacaactcattcttcagtgcctcatgactgaaaacaaaaaacaaaaaaacgaaagcatcttcacaatgaagcttccagatagcaccgttttgctaaaagatacattctcattgttttccaacagtgatggcttccacataaggttaaacaaactaggtgcttgtaaataatttattacagtttactctatcgcatttctgtaacatgaaatgcatgcccttcttcaggggaagactgtggtcaagttaaaaaaaaaaaacaatattaaacaacatgaaactgcagtctgtttttgaaaatgagaatgtcctaagtgattcagaagagaggagggaagttgtgcactctgaaaatgcatgaaaaacaaaggcaaaaactagtgggaaatgtgtagaactgttaactgagatggcttcgagtcttccttctggaatctgttaaatttcacaaagtcatgagggtaaatggagaaaatatttctgggattacaatgaatgtaagcccaaattgtggaattgccagtaacctggatggggaaaagcatttcccatagcactccatgtaatatgagtgctctgtgagatgttcatcagtgttttatagaaatggtgttgctgggaaaccaagtttgcacctggaaacttacaatgcactttagcgcagtaagggcttggcatccggtagtgaaaaactgtctaacccagcattgcccaaactattttgacaccaggacctttttctcctttgggatacttatgaacctctcactaatgtcctgtggagaacattttgggaaacactatgttagatagttctttaaggagacaaaacggtaatgaacagatagcactggggcagaatatgcatgcattttgtaacgtccagtgtggcgttgaatagatgtgtatttcctcccctgcagaaaataagcacagaaaattataatgtaggtgatcggagctctttcctttgatagagagaacagccccaatgatcctggctttttcactgaacgtatcagaatacatggatgaattggggtaaataaggttttaattcagatctagaagaaagtattgtacgtttgaatgcagatttttatccacagatagttgtagtgtttagacatgacaggacctatcgttgaggtttctaagacttactatgggctgtaaacctgttttttaaaactattttagaaacctgagacttgccgtctggcattttagtttaatacaaactaatgattgcatttgaaagagattcttgaccttatttctaaacgtctagagctctgaaatgtcttgatggaaggtattaaactatttgcctgttgtacaaagaaatgttaagactcgtgaaaagaattactataaggtactgtgaaataactgcgattttgtgagcaaaacatacttggaaatgctgattgatttttatgcttgttagtgtattgcaagaaacacagaaaatgtagttttgttttaataaacc

SEQ ID NO: 283070 - DNA, 2487 bp, Artificial Sequence
  derived and/or modified sequence
atggatgagtccgccctaacactcggaaccattgatgtctcatatttgcctcactcctccgaatacagtgtaggcaggtgcaagcatacaagtgaggagtggggtgagtgcggatttcgacccacgatattcaggagcgccacgctcaagtggaaggagtcactaatgtcacgcaagcgcccctttgtggggcgctgttgttactcatgcacacctcagagttgggataagttctttaaccccagtattccctctttgggcttgcggaatgtaatctacatcaacgagacgcatacacgtcatcggggctggctggcacgtcggctgagctacgtcctgtttattcaggagcgagacgtgcacaaaggaatgtttgccactaatgttacagaaaacgtgctaaacagctctcgggtgcaggaagcgatcgccgaagtggccgcagagttgaatccggacggaagcgctcagcaacagtccaaagctgtcaacaaagttaagaagaaggctaaacgaatcctgcaggagatggtggccaccgtgtcccccgcaatgatcagactgaccggctgggtgctgctcaagttgtttaattctttcttctggaacatacagatccacaaggggcagttagagatggtgaaagccgccaccgaaactaatctgcccctccttttcctgcccgtacatcgatcccacattgattacctgctgcttaccttcattttgttttgccacaacatcaaagccccgtacatcgcctctgggaacaacttgaatattccaattttttctacattgatacacaagcttggtggattttttatcagacggagactggacgagacccccgatggtcgtaaagatgtgctgtatcgggccttgctgcatggccacatcgtcgagttgctcaggcagcagcaattcttagagatctttctggaaggtaccagatccaggagtggcaagactagttgtgcacgagcagggttattgagcgttgtggtggacaccttgtctacaaacgtgataccagacattttaatcattccagttggcatctcgtatgatagaattatcgaaggacactacaacggagagcagctgggcaaacccaaaaagaacgaatctttatggtctgtcgcccgaggcgtcatacggatgctacggaagaactacggatgtgtgcgtgtggacttcgctcaacccttttccttgaaggagtatcttgaatcacaatcccagaagcccgtcagcgcacttctttcgcttgagcaggccctgctgccggcaatccttccatccagaccaagcgacgcagctgatgagggccgagacacttccataaatgaatctaggaacgcaacggacgagagcctacggcgccgcctgatagcgaacctggctgaacacatcctcttcaccgcaagcaagagttgtgccataatgagcacccacatcgtcgcttgtttactgctgtatcgccaccgccagggtattgacctttcaacactggtggaggatttcttcgtgatgaaagaggaggttctcgctcgggatttcgatttggggttctccggtaactcagaggacgtggtcatgcatgccattcaactgctgggcaattgcgtgactatcacacacacttccagaaacgatgagttcttcatcaccccctctactaccgtgccatctgtctttgagctgaatttctactcaaacggcgttctccatgtcttcattatggaggccattatcgcctgctcactctacgccgtgctcaacaaaagaggcctgggtgggcctacctccactccgcctaatctgattagtcaagagcagctcgtacgtaaagctgcttcattatgctatctactctccaacgaggggactatcagcttgccctgtcagacgttctaccaagtttgccatgagacagtgggcaagttcattcaatacggaattttgacggtggccgagcatgatgaccaggaggacatctcgccctctctggccgagcaacaatgggataagaagctgccagaaccgctcagttggcgcagcgatgaggaagatgaggatagcgactttggcgaggaacagagggactgttatctgaaggtaagccagtcaaaggaacaccagcaattcatcacgttcctgcagcgattgttgggtcctctgttagaagcatactcatctgctgctatttttgtgcataatttttcagggcccgtgcccgaaccagaatatctgcaaaaactgcacaaatatctgattacccggactgagcgcaatgtagctgtttatgcagaatccgctacttattgcctggtgaagaatgccgtgaagatgtttaaggatattggtgtgttcaaggaaacaaaacaaaagcgggtttctgttttggagctctctagcacctttttgccccagtgtaatcgccagaagttgctagaatatatcctctcttttgttgtgttatag

SEQ ID NO: 283071 - DNA, 2133 bp, Artificial Sequence
  derived and/or modified sequence
atggatgagtctgcgctaacactcgggaccatcgatgtgtcatacctgcctcacagttctgaatactccgtgggtcggtgtaagcatacatctgaggaatggggggagtgcgggtttagacctaccatcttccggtcagcaacgttaaaatggaaggaaagtctcatgagccggaagcgtccttttgtcggcagatgctgttatagctgtacaccacagtcttgggacaaattctttaacccatccattccgagtctagggctgaggaatgtgatttacatcaatgaaacacacacccgccatagaggctggttggctcgaaggctgagctacgtattatttattcaggaacgtgacgttcacaagggcatgtttgccactaacgtgaccgaaaatgtacttaatagttctcgggtacaagaggcaatcgcagaggtggccgccgagctgaacccagatgggtctgcccagcagcagtcgaaggctgtgaacaaagtgaaaaagaaagcaaagaggatcctccaagaaatggtggcaactgtctctccggctatgatcaggctcactggatgggttctgctcaaactgttcaattcttttttctggaacattcagatccataagggccagctcgaaatggttaaagctgccaccgagacaaacctgccactactctttctgcctgtccacaggtcccacatcgactatcttctcctgacttttatcctattttgccacaatattaaggccccatatatcgcctcaggcaacaatcttaacatccccatcttcagcactcttatccataagttgggcgggttctttatcagaaggcgcttggacgaaactccagacggtagaaaagacgtcttgtatagagcgctgctgcacgggcacattgtagagttgctgcggcagcaacagttcctggaaatctttctggaaggcacaaggagtcggagtggcaagacgtcgtgtgcgcgtgctgggctactgtcagtagtagttgataccttgtcaacaaatgttatcccagacatactgatcatccccgtgggcatttcttatgatcgcatcatcgagggacattataatggggagcagctggggaagccaaagaaaaatgaaagtctttggagcgtggccagaggggttatcagaatgctccgaaagaattatggttgtgtgagggttgacttcgctcaacccttcagtctgaaggagtatctagagagccagtcgcagaagccagttagcgctctgctctctctcgagcaggccctcctgccagctattcttcccagtagaccaagcgacgccgccgatgagggaagagacacaagcatcaatgaatctagaaacgccaccgacgaatcgctgaggcgtcgccttatcgctaaccttgctgaacacatccttttcaccgcgagcaagagttgcgccatcatgtctacacacattgtcgcgtgcttgcttctgtatcggcacaggcaaggcatcgatctgagtactctggtcgaagattttttcgtgatgaaagaagaagtgcttgcgcgggatttcgatctcggcttctctggaaatagcgaggacgtcgttatgcatgctatccaactgttagggaattgcgtgaccattacccatacttcaaggaatgacgaattcttcattacaccctctactactgtgccctctgtgttcgagttgaacttctatagtaacggagtcctgcacgtcttcataatggaagcgataattgcctgctcgctttacgcagtgctcaataagcgcggcctcggaggtccaaccagtacaccccccaacctgatatctcaggaacagttagttcggaaggcagcttcattgtgttatctgctctctaatgaaggaacgatctcactgccgtgccagacattctaccaggtgtgtcacgaaaccgtgggtaaatttatccagtatggcattctgacagtcgctgagcacgatgatcaggaagatattagcccttctctcgccgaacagcaatgggataagaagctgcctgagcccttgtcctggaggagtgacgaggaagacgaagatagtgatttcggcgaggaacaaagggattgctacctgaaggtcctgggttag

SEQ ID NO: 283072 - DNA, 2487 bp, Artificial Sequence
  derived and/or modified sequence
atggacgaatctgcgctgaccctgggcactatagacgtgtcctacctccctcactccagcgaatattccgtagggcggtgcaaacatacctctgaggaatggggcgagtgcgggtttaggccaactatttttagatcagcaactctgaaatggaaagagtcactcatgtcacgaaaaaggcccttcgtgggacgctgctgttactcttgtacaccacaatcctgggacaaattctttaacccctccattccttctcttgggttgagaaatgtcatctacatcaacgagactcatactagacaccgtgggtggttggcccggaggctgtcatatgtcttgtttattcaggagcgggatgtgcacaaaggaatgttcgcaactaacgtcaccgaaaatgtgctcaacagttcacgagtgcaggaggccatcgctgaagtcgccgccgagctgaaccctgacgggtcagcccaacagcagtctaaggccgtcaataaagtgaagaaaaaggctaaaaggattctgcaggagatggtggccacagtgtcgccggcaatgattagattgaccggttgggtgctgctaaaacttttcaactccttcttttggaatatacagattcacaaagggcaactcgagatggtgaaagccgccactgagaccaatctaccactgttattcctgcccgtccatcggagccacatagactacttgctgttgacatttattctgttttgtcacaacattaaagccccttacatcgcatcggggaacaatctcaacatccccatattttcaacactgatccataaactgggtgggttttttatccgtaggaggctggacgagacccctgatggtaggaaggatgttctgtaccgggccctgctgcacggccacatcgtggagctgcttaggcagcagcagttcctggaaatctttttggagggaacacgctcccgtagtggcaagacctcctgtgctcgagcaggcctcctatcagtggtggtcgacacccttagcaccaatgttatccctgatatcttaattataccagtaggtattagctacgacagaattattgaaggacactacaatggcgaacagttgggcaaaccaaaaaaaaacgagtctctctggagcgtggcccgcggcgtgatccgcatgctcagaaaaaactacggctgcgtcagagttgattttgctcaacctttcagtcttaaggaatacttggagagccagtcccagaaaccagtctctgcactgctgtccctggagcaagcccttcttccagcaatcctgccttcgcgtccgtccgatgccgccgatgaaggcagagatacttccataaatgagtcccgaaacgccacagacgagtccctccggaggcgcctcatcgcgaatttggcagaacatattctgttcactgcttcgaaatcttgcgccatcatgagtactcatatcgtcgcatgtctgctgttgtaccgccacagacagggaatcgatctgtcaaccctggtggaggactttttcgtcatgaaggaggaggtactggcacgcgactttgacctcggtttttcaggcaattccgaggacgtggtgatgcatgccattcagctattaggtaattgcgttacaatcactcacaccagtaggaatgacgagtttttcattacgccatctaccaccgtgccatctgtgtttgaattgaatttctactcaaacggcgtcctccacgtgtttataatggaagcaatcatcgcatgttcactgtatgccgtactgaacaagcgcggcctcggcggtccgacttctacaccccctaatctcatcagccaggagcaacttgttaggaaggcagcctccctgtgctacctgttgagcaatgagggaaccatttcactcccgtgccagactttctaccaagtttgtcacgaaacggtcggcaagtttattcagtatggtattctgactgtagccgaacacgatgatcaggaagatatttcccccagtctggcggagcagcagtgggataagaaactgcccgagcctctgagctggaggtcggacgaggaagatgaggatagcgacttcggagaggagcagcgggattgttatctgaaggtctcccagtccaaagagcatcagcagttcatcacgttcctgcaaagactcctggggcctcttctcgaagcgtactctagtgcggccatctttgtccataacttctccgggcccgtgccagagcctgaatatctccagaaactccataagtatcttatcaccagaactgagaggaacgtcgctgtgtacgccgagtcagcaacttactgcctggtaaagaatgctgtgaagatgtttaaagacatcggggtatttaaggaaacgaagcaaaaacgggttagcgtactagagctttcaagcactttccttccccaatgcaataggcagaagctcctggaatatatcttaagctttgtggtcttgtag

SEQ ID NO: 283073 - DNA, 2487 bp, Artificial Sequence
  derived and/or modified sequence
atggatgagagcgccctgaccctgggcaccattgatgtgtcctacctgccccacagcagcgagtacagcgtgggccgctgcaagcacaccagcgaggagtggggagaatgtggcttccggcccaccatcttccgcagcgccaccctgaagtggaaggagagcctgatgagcaggaagaggccctttgtgggccgctgctgctacagctgcaccccccagagctgggacaagttcttcaaccccagcatccccagcctgggcctgagaaatgtcatctacatcaatgagacccacaccaggcaccggggctggctggcccggcggctgtcctatgtgctcttcatccaggagagagatgtgcacaagggcatgtttgccaccaacgtgacagaaaatgtgctgaacagcagccgggtgcaggaggccatcgccgaggtggccgctgagctgaacccagatggcagcgcccagcagcagagcaaggctgtgaacaaggtgaagaagaaggccaagaggatcctgcaggagatggtggccaccgtgtccccagccatgatccggctgaccggctgggtgctgctgaagctgttcaacagcttcttctggaacatccagatccacaagggccagctggagatggtgaaggccgccacagagaccaacctgcccctgctcttcctgcctgtgcacaggagccacatcgactacctgctgctgaccttcatcctcttctgccacaacatcaaggccccctacatcgccagcggcaacaacctgaacatccccatcttcagcaccctcatccacaagctgggcggcttcttcatcagaagaaggctggatgagaccccagatggcaggaaggatgtgctgtaccgggccctgctgcacggccacatcgtggagctgctgcggcagcagcagttcctggagatcttcctggagggcaccaggagccgcagcggcaagaccagctgtgcccgggccggcctgctgtctgtggtggtggacaccctgagcaccaacgtcatcccagacatcctgatcatccctgtgggcatctcctatgaccgcatcatcgagggccactacaatggagagcagctgggcaagcccaagaagaatgaaagcctgtggagcgtggcccggggcgtcatccgcatgctgaggaagaactacggctgtgtgcgggtggactttgcccagcccttcagcctgaaggagtacctggagagccagagccagaagcctgtgtctgccctgctgagcctggagcaggccctgctgcctgccatcctgcccagccggcccagtgatgctgctgatgagggccgggacaccagcatcaatgaaagcagaaatgccacagatgagagcctgcggcggcggctgattgccaacctggccgagcacatcctcttcaccgccagcaagagctgtgccatcatgagcacccacatcgtggcctgcctgctgctgtaccgccaccggcagggcatcgacctgagcaccctggtggaggacttctttgtgatgaaggaggaggtgctggcccgggactttgacctgggcttcagcggcaacagtgaagatgtggtgatgcacgccatccagctgctgggcaactgtgtgaccatcacccacaccagcagaaatgatgagttcttcatcacccccagcaccaccgtgcccagcgtgtttgagctgaacttctacagcaatggagtgctgcacgtgttcatcatggaggccatcatcgcctgcagcctgtatgctgtgctgaacaagaggggcctgggcggccccaccagcaccccacccaacctgatcagccaggagcagctggtgaggaaggccgccagcctgtgctacctgctgagcaatgaaggcaccatcagcctgccctgccagaccttctaccaggtgtgccacgagaccgtgggcaagttcatccagtatggcatcctgactgtggccgagcatgatgaccaggaggacatcagccccagcctggccgagcagcagtgggacaagaagctgcctgagcccctgtcctggaggagtgatgaagaagatgaagattctgactttggagaggagcagagggactgctacctgaaggtgtcccagagcaaggagcaccagcagttcatcaccttcctgcagaggctgctgggccccctgctggaggcctacagcagcgctgccatctttgtgcacaacttcagcggccctgtgcctgagcctgagtacctgcagaagctgcacaagtacctgatcaccaggacagaaagaaatgtggccgtgtatgcagagagcgccacctactgcctggtgaagaatgctgtgaagatgttcaaggacattggagtcttcaaggagaccaagcagaagagggtgtctgtgctggagctgagcagcaccttcctgccccagtgcaaccggcagaagctgctggagtacatcctgagctttgtggtgctgtag

SEQ ID NO: 283074 - DNA, 2133 bp, Artificial Sequence
  derived and/or modified sequence
atggatgagagcgccctgaccctgggcaccattgatgtgtcctacctgccccacagcagcgagtacagcgtgggccgctgcaagcacaccagcgaggagtggggagaatgtggcttccggcccaccatcttccgcagcgccaccctgaagtggaaggagagcctgatgagcaggaagaggccctttgtgggccgctgctgctacagctgcaccccccagagctgggacaagttcttcaaccccagcatccccagcctgggcctgagaaatgtcatctacatcaatgagacccacaccaggcaccggggctggctggcccggcggctgtcctatgtgctcttcatccaggagagagatgtgcacaagggcatgtttgccaccaacgtgacagaaaatgtgctgaacagcagccgggtgcaggaggccatcgccgaggtggccgctgagctgaacccagatggcagcgcccagcagcagagcaaggctgtgaacaaggtgaagaagaaggccaagaggatcctgcaggagatggtggccaccgtgtccccagccatgatccggctgaccggctgggtgctgctgaagctgttcaacagcttcttctggaacatccagatccacaagggccagctggagatggtgaaggccgccacagagaccaacctgcccctgctcttcctgcctgtgcacaggagccacatcgactacctgctgctgaccttcatcctcttctgccacaacatcaaggccccctacatcgccagcggcaacaacctgaacatccccatcttcagcaccctcatccacaagctgggcggcttcttcatcagaagaaggctggatgagaccccagatggcaggaaggatgtgctgtaccgggccctgctgcacggccacatcgtggagctgctgcggcagcagcagttcctggagatcttcctggagggcaccaggagccgcagcggcaagaccagctgtgcccgggccggcctgctgtctgtggtggtggacaccctgagcaccaacgtcatcccagacatcctgatcatccctgtgggcatctcctatgaccgcatcatcgagggccactacaatggagagcagctgggcaagcccaagaagaatgaaagcctgtggagcgtggcccggggcgtcatccgcatgctgaggaagaactacggctgtgtgcgggtggactttgcccagcccttcagcctgaaggagtacctggagagccagagccagaagcctgtgtctgccctgctgagcctggagcaggccctgctgcctgccatcctgcccagccggcccagtgatgctgctgatgagggccgggacaccagcatcaatgaaagcagaaatgccacagatgagagcctgcggcggcggctgattgccaacctggccgagcacatcctcttcaccgccagcaagagctgtgccatcatgagcacccacatcgtggcctgcctgctgctgtaccgccaccggcagggcatcgacctgagcaccctggtggaggacttctttgtgatgaaggaggaggtgctggcccgggactttgacctgggcttcagcggcaacagtgaagatgtggtgatgcacgccatccagctgctgggcaactgtgtgaccatcacccacaccagcagaaatgatgagttcttcatcacccccagcaccaccgtgcccagcgtgtttgagctgaacttctacagcaatggagtgctgcacgtgttcatcatggaggccatcatcgcctgcagcctgtatgctgtgctgaacaagaggggcctgggcggccccaccagcaccccacccaacctgatcagccaggagcagctggtgaggaaggccgccagcctgtgctacctgctgagcaatgaaggcaccatcagcctgccctgccagaccttctaccaggtgtgccacgagaccgtgggcaagttcatccagtatggcatcctgactgtggccgagcatgatgaccaggaggacatcagccccagcctggccgagcagcagtgggacaagaagctgcctgagcccctgtcctggaggagtgatgaagaagatgaagattctgactttggagaggagcagagggactgctacctgaaggtgctgggctag

SEQ ID NO: 283075 - DNA, 2487 bp, Artificial Sequence
  derived and/or modified sequence
atggacgagagcgccctgaccctgggcaccatcgacgtgagctacctcccccactcaagcgagtacagcgtcgggcgttgcaagcatacgtcagaggagtggggagaatgcggcttccgccccacaatattcaggtccgccacgctcaagtggaaggagtccctgatgtctcgtaagcgcccattcgtcggccggtgttgctattcttgcactccccagagctgggacaagttttttaatccgagcatacctagtctcggcctacgaaatgtcatttacatcaacgaaacgcatacacggcacagaggatggctggctaggaggctcagctacgtgttatttatccaggagagagatgttcacaaggggatgttcgcgacaaatgtcactgaaaatgtgttaaattccagtcgggtgcaggaagccattgctgaagtggctgccgagctgaaccctgatggtagcgcgcagcagcagtcaaaagccgtgaacaaggtgaaaaaaaaggcaaaaagaatcctgcaagagatggtggctaccgtttcacccgctatgatccgcctcacaggatgggtccttcttaaactgttcaacagctttttctggaatatacagatccacaaaggccaactggagatggttaaggctgccacagagaccaatctccccctgcttttccttccggtccaccgttctcatatcgattatttgctactgaccttcatcctcttttgtcacaacatcaaagcgccttacatagcctccggaaacaatctgaacattcctatcttcagcactctgatccacaaactgggtggcttcttcattaggcgtagactggatgagacgccggacggccggaaggacgttctctatcgcgccttgctccacggtcacattgtggagttgctgcggcagcaacagtttttggaaattttcctcgaggggactaggtctagaagtggaaaaacctcctgtgcacgggctgggttgctcagcgttgttgtggatactttgtcaaccaacgtcattcctgacatactgatcattccagtcggtattagttatgatagaatcatcgagggacactataatggcgaacagctgggaaagcctaagaagaatgaaagtctgtggtccgtcgctcggggagtgattagaatgcttaggaagaattatgggtgcgttagggtggacttcgctcagcctttttctctcaaggagtacctcgagagccagagtcagaagcccgtgagcgcactgttatccctcgagcaggcattgctccctgctattttaccctcacggcctagtgacgctgccgatgagggaagggacacatccattaatgagtccagaaacgctacagatgaatcacttaggaggcggctgatagccaacctggctgagcacatcctgttcacagcaagcaaatcctgcgctattatgtctacccatatcgtggcttgtctgctcctctacagacatcgccagggcatcgacctctccactctcgttgaggattttttcgtgatgaaggaggaggtgcttgcaagggacttcgatttgggcttctcaggaaactctgaagacgtcgtgatgcacgcaattcagttgttgggtaactgcgtcaccattacccatactagtcggaacgacgagttctttataactccatctactacagtgccgtccgtgtttgaacttaacttttatagcaacggagtcctacatgtgtttatcatggaagctatcatagcatgtagtctgtacgcagtgttaaataagcgaggcctgggcgggcctacgagcacacctccaaacctgatcagccaggagcagctcgtgcgaaaggcagccagcctctgttatctcttaagcaacgagggcaccatcagcctgccctgccagacattctaccaggtctgtcatgagacagtaggcaaatttatccagtacggcattttgaccgtagccgaacatgacgaccaggaagatatctctccatccttggccgagcaacagtgggataagaaacttccagagcccctcagctggcgatccgacgaggaagacgaagacagcgacttcggagaggagcaacgcgactgttatcttaaagtttctcaatccaaagagcatcagcagtttatcactttcctccagagactgcttgggcctctgcttgaggcgtattctagcgctgcgatcttcgttcataatttcagtgggcctgtgccagaacccgagtacctccagaaacttcacaagtacctgataacaaggaccgaacgcaatgtcgcagtctatgccgagagcgccacctattgtctggttaagaatgctgtaaaaatgttcaaagatatcggggtgtttaaggaaaccaaacagaaaagagtatccgtcctcgagcttagttctacttttctcccgcagtgcaataggcagaaactgcttgaatatattctgtctttcgtggtactgtag

SEQ ID NO: 283076 - DNA, 2133 bp, Artificial Sequence
  derived and/or modified sequence
atggacgagagcgccctgaccctgggcaccatcgacgtgagctacctcccccacagctccgaatactctgtggggcgttgcaagcacacgagtgaagagtggggggagtgcggtttcaggccaacaatcttccggtccgcaacattgaagtggaaagaaagtctcatgagccgtaagcggcctttcgtgggaagatgctgttattcttgcaccccacagagttgggataaatttttcaatcccagtatacctagcttagggttgaggaacgtaatctatatcaatgagactcataccaggcaccggggctggttagcgagacgcctgtcctacgtcctgtttattcaagagcgtgacgtccataaaggaatgttcgccactaatgtgacggagaatgtgcttaattccagtcgcgtacaggaggctatagcagaagtagcagcagagttgaatccagatggttctgcacagcagcaaagtaaggctgttaataaagtgaaaaagaaagctaagcggatactgcaggaaatggtcgcaaccgtgagtcctgctatgatcagattaaccggctgggtgctgctcaaactttttaactcctttttttggaatatccagattcataagggccagttagagatggttaaggccgctaccgagacaaatctgcctctgctcttcctcccggtgcatagaagtcacatcgattacttgctgctcacgttcatcctattctgccacaacattaaggctccttacattgctagcggtaataacctgaatatcccaatttttagtaccctcatccacaaactgggtgggtttttcataagacggagattagacgagacacctgacggccgaaaagatgtattgtacagggctctgttgcacggccacatcgtggaacttctgcggcaacagcagttcctggaaatctttctggagggaacaaggagccgctctggtaagacctcatgcgcaagagctggacttctcagcgtggtggtggacaccctgtctactaacgtgataccagatattctcattataccggtgggtattagctacgaccgcatcatcgaggggcattataacggcgaacagctgggcaagcccaagaaaaacgagtctctgtggtctgtggctagaggcgtgattcggatgttgcgtaagaactacggatgtgtcagagttgatttcgcccaaccattctcgttgaaggagtacctcgaaagccagagccagaaacctgtttccgcactcttgagtttagagcaggccttgcttcccgctatcctgccatcacgcccatcggatgccgcagatgaaggcagggacacaagcatcaacgaatcgagaaacgccaccgacgagtctctgcggcgtaggctgattgctaacttggccgagcacatcctgtttacagcttctaagtcttgcgcaattatgtctacacacatagtagcctgcctcctgctgtatcgacacaggcagggtattgaccttagcactttggtggaggacttctttgttatgaaggaggaggtcctggcacgggacttcgatctgggcttctccggtaatagcgaggatgtcgtgatgcatgccatccagctcctcggaaattgtgtgaccataacgcatacctcaagaaacgatgagtttttcatcactccctcgaccacagttccatccgtgtttgagctgaatttttactcgaacggagttttacatgtgtttattatggaggctatcatcgcctgtagcctgtatgctgtgctgaacaagaggggcctgggcgggcccaccagtaccccacccaatttgatcagccaggagcaactggtcaggaaagcagccagcctctgttatttgctgtccaatgaaggcaccatctcactgccctgccaaacattctaccaggtttgtcacgagacggtcggaaagttcatacagtatgggatactgacagtggccgagcacgacgaccaggaggatattagtcctagccttgccgagcagcagtgggacaaaaagctgccagaacccctgagctggaggagtgacgaggaggacgaagatagcgatttcggagaagagcaacgtgactgttaccttaaggtcctgggttag

SEQ ID NO: 283077 - DNA, 2487 bp, Artificial Sequence
  derived and/or modified sequence
atggacgagagcgccctgaccctgggcaccatcgacgtgagctacctgcctcattcctcagagtactcggtgggtagatgtaaacacacgagcgaagagtggggcgagtgtggattcaggccgacaatctttaggtccgccacattgaagtggaaggaaagcctgatgtcccggaagcggccgtttgtgggacgatgctgctattcctgcacaccccagagttgggataaattcttcaaccccagcattcctagcctgggcttgcggaacgtgatttacatcaacgagactcatactaggcacaggggatggctcgcccgccggctgtcctatgtgttattcatacaagaacgcgatgtacataagggaatgtttgccacaaacgtgacggagaatgtgctgaatagcagtcgtgtccaggaggccattgcagaggttgcggcagagctcaacccggacggctctgcccagcaacagtctaaggctgtgaataaagttaagaagaaggccaagagaattctgcaggaaatggttgctaccgtgagtcccgcaatgatcagactcacaggatgggtgctgctgaagcttttcaactctttcttctggaacatccaaattcacaagggacaactcgagatggtaaaagcagccaccgaaaccaatttgcccttgctcttcttgccagtacataggtcacacatcgactacctgctcctgacgttcatccttttttgccacaacataaaagcaccatacatcgcctctggtaacaacttaaacattccgattttctccaccctgattcacaagctgggcgggttcttcattagacgccggctggatgagaccccagatggaagaaaggacgtgctttatagggctctcttgcacggtcacatagtagaattgctccgccagcagcagttcctggagatttttctggagggtactcggtctaggagcggaaaaacaagctgtgcacgagcggggctcctctcagtggtcgtcgatactctgagcaccaacgtcatcccagatatcctaatcatccccgtgggcatttcttacgatagaattattgaaggtcattacaacggcgagcagctgggcaagcctaaaaagaatgagagcctctggtcggtggctagaggcgtaatccggatgctgcggaaaaactacggctgcgtgagggtggatttcgctcagcctttttcactcaaggaatacctggagagccagtcacaaaagcccgtgagtgccttgctctctcttgagcaggccctgctcccagccatcttaccttctcggcccagcgacgctgcagatgaaggcagggacacttccatcaatgagagcagaaacgccaccgacgaatccctgaggcgtagactgatcgctaacctcgccgagcatatcctgtttacggcatcgaagtcatgcgccattatgagtacgcatatcgtagcgtgcctgttactttaccggcacaggcagggtattgacctaagcaccctggttgaagatttcttcgtgatgaaagaggaagttttggccagagattttgatctgggcttctctgggaactccgaggatgtggtaatgcacgccattcaactgctgggcaactgcgtcacaatcacacatacatccaggaacgacgagttcttcatcaccccctcaacgactgtaccatcagtgtttgaactgaacttctactctaacggcgtcttacacgttttcataatggaggctatcatcgcctgtagcttgtacgcagtgctgaataaacgtggtcttggaggtcctacctctaccccccccaatttgatcagtcaggagcagcttgtacggaaggcggcatctctgtgctatctgctgagcaatgaaggaactattagcctgccgtgtcagactttctaccaggtgtgtcacgagaccgttggcaaatttatacagtacggcattttaaccgtggccgaacacgatgatcaggaggacatatcaccctccctggctgaacagcagtgggacaagaagctaccagaacctcttagctggaggagcgacgaggaggatgaggatagtgactttggcgaggaacagagagattgctatctcaaggtctctcagtccaaagaacatcagcagttcattaccttcttgcagcggctgttggggccactgctggaagcctacagttccgccgcaatcttcgtgcacaatttctctggacccgtgccagaaccggagtatctgcaaaaactgcacaaatacctgattacacgtactgagaggaacgtcgccgtgtacgccgaatctgccacctactgtttagtgaagaacgctgtgaaaatgttcaaagatatcggtgtgttcaaggagactaagcagaagagggtcagcgttctcgaactgtcttcaactttcctaccccagtgtaaccgccaaaagctccttgaatacattctttcttttgtcgttctatag

SEQ ID NO: 283078 - DNA, 2487 bp, Artificial Sequence
  derived and/or modified sequence
atggacgagtctgcccttactctagggacaatcgacgtgtcttacctgccacattccagcgaatacagtgtggggcgatgtaaacatacttctgaggagtggggagagtgtggcttcagaccgacaatttttaggagtgcaactctcaagtggaaagagagtcttatgtccagaaaacgacctttcgttggaaggtgttgctacagctgtacccctcagtcatgggacaaattttttaatccgagcattccatccttaggtctgcgcaacgtgatctatattaatgagacgcacactcgccacagaggatggctggctagaagactttcgtacgtgctcttcattcaggagcgtgacgtgcacaaaggcatgttcgcaactaacgtcactgagaacgtgctgaactcgtcccgcgttcaagaggctatcgctgaggttgcagcagaactcaacccagacggctccgctcaacagcagtccaaagccgtgaataaggtcaagaagaaagctaagaggattttacaggaaatggtagcaaccgtaagccctgccatgatacggttgacaggatgggtgctcctgaaactgttcaattccttcttctggaacatccagatccacaagggccagctggagatggttaaagctgccactgagactaatctgcccctgctgtttctgcctgtccacagatcacacatagactatcttctgcttaccttcattctgttttgccacaacattaaagcaccttacatagccagcgggaacaatctcaatatccctatcttttctaccctgatccacaaactcgggggattcttcatacggcgaaggttggatgaaactccggacggaagaaaagatgtactgtaccgcgcacttctgcatggccacatcgttgaactgctccggcagcagcagttcctggagatctttctcgagggcactagaagtcgctccgggaagaccagttgtgctagggcaggactgctgtccgtggtcgtagacacacttagcaccaacgtcatacccgatatacttattatccctgtgggcatctcatatgaccgcatcatagagggacactacaacggagaacagctggggaaacccaagaaaaacgaaagcctgtggtctgtggccaggggggtgatacgcatgctgcggaagaactatggatgtgtgagggttgacttcgcccagccatttagcctgaaagagtacttagagtcccagtctcagaaaccagtgtcagcactcttatcgttggagcaggcactgctcccagctatcctcccctcgagaccgagtgacgctgctgacgagggcagggatacaagtattaatgaatccaggaacgcaacagatgaaagcctccggagaagactcatcgcaaacctggccgagcatattttgttcaccgcatccaaaagctgcgctatcatgtccactcacattgttgcctgtcttttactgtaccggcatcggcagggaatagacctatcgacactggtggaagactttttcgtgatgaaggaggaagtgctggccagagatttcgacctgggcttcagcggtaatagtgaagatgttgttatgcacgctattcagttattaggcaactgtgttacaattacacacacctcacgcaacgacgagttcttcataacaccatctacaacagtgccctctgtgttcgaactaaacttctactccaatggcgtactgcacgtctttattatggaggccattatagcctgctcactttatgctgtgctcaacaagaggggtctgggagggcctacgtcaacacccccaaacctaatttcccaagaacagctggtgcgaaaggctgcatccctttgttatttactctcgaatgaaggaacaattagtttaccatgccaaacattctatcaggtgtgccatgagacagttgggaaatttatccaatatgggattcttactgtggccgagcacgacgatcaggaagatatctcaccatcccttgccgaacaacaatgggacaagaagctccctgaacccctctcctggagatccgacgaggaggacgaagactccgattttggcgaggagcaacgggattgctacctgaaagtgtcacagagcaaagagcatcagcagttcatcacgttcctacagagactcctgggcccattgctcgaagcttacagtagtgctgccatcttcgtacacaatttctcagggccagtgccggagccggaatatctgcagaaactgcacaagtaccttattacccgtactgagaggaacgtagctgtgtacgccgagtctgcgacctactgtctggtgaagaatgccgtgaagatgtttaaggacataggtgttttcaaggagaccaaacagaagcgcgtgagtgtccttgagcttagttcaactttcctcccccagtgtaaccgccagaagctgcttgaatacatcctgagcttcgtggttctctag

SEQ ID NO: 283079 - DNA, 2133 bp, Artificial Sequence
  derived and/or modified sequence
atggatgaaagtgcccttacactgggcaccatcgatgtaagctacctgccacactcttcagaatactctgtggggcgatgtaaacatacaagcgaggaatggggagagtgcgggtttaggcctacgattttcagatcagccacgctcaagtggaaagagtctctcatgtctcgcaagcggccattcgttggccgatgttgctacagctgcacgccccagagttgggataagtttttcaatcccagtatcccatccttggggctcagaaatgttatctatattaacgaaactcacacaaggcacaggggttggctggcaagaaggctctcctatgtcctctttatccaggaacgggacgtgcataaggggatgttcgctacgaacgtgacggagaacgtgctgaatagttcgcgtgtacaggaggctatcgccgaagtggcggcagagctgaatcccgatggctcagctcagcagcaatccaaggccgttaacaaagtgaaaaagaaggccaaacgcattcttcaagaaatggtcgctaccgtgtcccctgcaatgatccgactgaccggatgggtcctgcttaagctcttcaacagttttttctggaacattcaaatccataaagggcagcttgagatggttaaggccgcaaccgagacgaacctgcccctgctttttctcccagttcaccgatcacatatcgattatctgttactgacctttatactgttttgccataacatcaaggctccctacattgcctccggcaacaatcttaatatacccattttttccaccttgattcataagcttggaggcttcttcatcaggagaaggctggacgagaccccagatggccgaaaagatgtgctatatcgtgcgttattgcacggacatatcgtcgaattactgaggcagcagcaatttcttgaaatatttttagagggtacgagaagcaggtccggcaagacttcatgcgccagggccggtcttctatctgtggtggtggatactctgagcaccaacgtaatacccgacatactcatcatccccgtcgggataagttacgaccgcattattgaggggcattacaatggcgaacagctcggaaagccaaagaagaatgaatccttatggtcagtggctaggggcgtgatcagaatgctgcgaaagaactacggatgtgtgcgtgtggatttcgctcagcctttctcattgaaggaatatctagagagccaatcccagaagcctgtatctgccctgctttcccttgagcaggctttactgcctgcaattcttccttcacggccaagtgatgccgctgatgaaggacgggatactagcataaacgagtcgcggaatgctaccgatgagtcactgcggcgacggttaatcgcaaatctcgcagagcacattctattcaccgcctcaaagtcatgcgcaataatgtctacacacatcgtagcttgcctcctcctctacagacataggcagggcatagacctctccacactggtggaggactttttcgtgatgaaggaggaggtcctggccagggattttgacttgggtttttccgggaactctgaggatgtggtaatgcatgccatccagttgctcggcaactgcgtaaccattacacatacaagccggaacgacgaattcttcatcacaccttcaactacggtgcctagcgtgtttgaattaaacttctattctaatggcgtgctgcatgtttttattatggaagccattattgcgtgcagtctttacgctgtgctgaataaaagaggcctcggaggacccacctcgactcccccaaacctaatcagccaggaacagctggttagaaaggcagcttcgctgtgctacctgctgtccaatgaaggaactatcagtctgccttgtcagaccttttatcaggtttgccacgagactgttggaaaattcatccagtacggaatcctgacagtcgccgagcacgatgaccaggaagatatttctccctccctagcagagcagcagtgggataaaaagctacctgagccattgagctggcgctcggatgaggaggatgaagacagtgactttggggaggaacaacgcgactgctacctcaaggtgctcggctag

SEQ ID NO: 283080 - DNA, 2487 bp, Artificial Sequence
  derived and/or modified sequence
atggacgagtccgcactgactctgggcacaatcgacgtctcttatctacctcactcctctgaatacagtgtcggcagatgcaaacatacttccgaggaatggggggagtgtggatttagacctactattttcagatcagccaccctgaagtggaaagagtcacttatgagccggaaacgcccattcgtcgggcgttgctgctattcctgcaccccccaatcctgggataagttttttaatccttcaatcccctccctgggattacggaacgtgatatacattaatgagacccatacaagacatcggggttggctggctcgcaggctgtcatacgtcctgtttatccaggaacgtgatgtgcacaaaggaatgtttgctactaacgtgaccgagaacgtgcttaatagctcccgcgtccaagaggccattgcagaggtcgctgcagagctgaacccagacggaagtgcccagcagcaatccaaggcagtgaataaggtaaagaaaaaggccaaaaggatactgcaggagatggtcgcaaccgtgagtccagccatgataagattgactgggtgggtgttactgaagttatttaactccttcttctggaatattcaaattcacaagggacagttggaaatggtgaaggcagccaccgagacaaatctgcctttactctttctccctgtgcataggagccatatcgactacctccttcttaccttcattcttttttgccacaatatcaaggcgccatatatcgcttctggcaataacctgaatatccccatcttcagcacgctgatccacaaattaggcggtttctttatccgaaggaggctggatgagactcccgatgggaggaaggatgtgttgtacagagcacttctgcacggtcacattgtggagcttctgagacagcagcagttcttggaaatttttctggagggcaccaggtcacggtccggcaagaccagctgtgcacgtgctggattactgtcagtggttgttgacacattgtctacaaacgtgatcccggacattctaattattcccgtgggtataagctacgatcgtatcatcgaagggcattacaacggagaacagcttggcaaaccaaagaagaacgagagcctctggtctgtcgctcggggagtaattagaatgctaaggaagaattacggctgtgtcagagttgactttgctcagccgttcagtctgaaagaatatctggagtcgcaaagccaaaagcccgtttccgcgctcctgtccctggagcaggcactgctcccagctattctgccatcccgtccctcagatgcagccgacgagggcagagacacatcaattaacgagtcacggaatgctacggatgaaagtctgagacgccgtctcatcgcgaaccttgctgaacatattctcttcaccgcgagcaaaagctgtgccataatgtctacccacatcgtggcatgtctcctcctctataggcacaggcaagggatagacctgtctacgctggtggaggatttctttgtaatgaaagaggaggtgcttgctcgtgattttgacctgggcttctcaggcaactctgaggatgtggttatgcacgccatccaactgcttggaaattgcgtgaccattactcacacctcaaggaacgacgagtttttcattaccccgtccactacagtaccctctgtgttcgagctgaatttttactctaacggagtgctacatgtctttattatggaagccatcatagcgtgttcactttatgcggttttaaataagaggggattgggaggtcctaccagtacgccacccaatctgattagtcaggaacagctcgtcaggaaggctgcttccctttgctacttactgtctaatgagggcactatttcactgccctgccagacattttatcaggtgtgtcacgagactgtgggtaaattcattcagtacggtatcctcactgttgctgaacacgatgatcaggaagatattagcccaagcctggcggagcagcaatgggacaagaaattgcccgagcctctctcctggcggagcgacgaggaagatgaggacagtgatttcggcgaagaacagcgcgattgctacttaaaagtctctcagagtaaggaacaccagcagtttattacgttcttgcagcgtctgctagggcctcttcttgaggcctatagcagtgcagccattttcgtacataactttagtggccctgtcccagaacccgagtacctgcagaaactgcacaagtacctcataactagaaccgagcgcaacgtcgcggtgtacgccgaatctgccacatactgtcttgtgaaaaatgccgtgaagatgttcaaagacatcggagtgttcaaggagaccaaacagaaacgcgtgtctgtcctcgaactgtcatctaccttcctaccccagtgtaataggcagaaacttctcgaatatatcctcagctttgttgtcctgtag

SEQ ID NO: 283081 - protein, 838 aa, Artificial Sequence
  derived and/or modified sequence
MWGRLWPLLLSILTATAVPGPSLRRPSRELDATPRMTIPYEELSGTRHFKGQAQNYSTLLLEEASARLLVGARGALFSLSANDIGDGAHKEIHWEASPEMQSKCHQKGKNNQTECFNHVRFLQRLNSTHLYACGTHAFQPLCAAIDAEAFTLPTSFEEGKEKCPYDPARGFTGLIIDGGLYTATRYEFRSIPDIRRSRHPHSLRTEETPMHWLNDAEFVFSVLVRESKASAVGDDDKVYYFFTERATEEGSGSFTQSRSSHRVARVARVCKGDLGGKKILQKKWTSFLKARLICHIPLYETLRGVCSLDAETSSRTHFYAAFTLSTQWKTLEASAICRYDLAEIQAVFAGPYMEYQDGSRRWGRYEGGVPEPRPGSCITDSLRSQGYNSSQDLPSLVLDFVKLHPLMARPVVPTRGRPLLLKRNIRYTHLTGTPVTTPAGPTYDLLFLGTADGWIHKAVVLGSGMHIIEETQVFRESQSVENLVISLLQHSLYVGAPSGVIQLPLSSCSRYRSCYDCILARDPYCGWDPGTHACAAATTIANRTALIQDIERGNRGCESSRDTGPPPPLKTRSVLRGDDVLLPCDQPSNLARALWLLNGSMGLSDGQGGYRVGVDGLLVTDAQPEHSGNYGCYAEENGLRTLLASYSLTVRPATPAPAPKAPATPGAQLAPDVRLLYVLAIAALGGLCLILASSLLYVACLREGRRGRRRKYSLGRASRAGGSAVQLQTVSGQCPGEEDEGDDEGAGGLEGSCLQIIPGEGAPAPPPPPPPPPPAELTNGLVALPSRLRRMNGNSYVLLRQSNNGVPAGPCSFAEELSRILEKRKHTQLVEQLDESSV

SEQ ID NO: 283082 - protein, 170 aa, Artificial Sequence
  derived and/or modified sequence
MWGRLWPLLLSILTATAVPGPSLRRPSRELDATPRMTIPYEELSGTRHFKGQAQNYSTLLLEEASARLLVGARGALFSLSANDIGDGAHKEIHWEASPEMQSKCHQKGKNNQTECFNHVRFLQRLNSTHLYACGTHAFQPLCAAIDAEAFTLPTSFEEGKEKCPYDPARG

SEQ ID NO: 283083 - protein, 522 aa, Artificial Sequence
  derived and/or modified sequence
MWGRLWPLLLSILTATAVPGPSLRRPSRELDATPRMTIPYEELSGTRHFKGQAQNYSTLLLEEASARLLVGARGALFSLSANDIGDGAHKEIHWEASPEMQSKCHQKGKNNQTECFNHVRFLQRLNSTHLYACGTHAFQPLCAAIDAEAFTLPTSFEEGKEKCPYDPARGFTGLIIDGGLYTATRYEFRSIPDIRRSRHPHSLRTEETPMHWLNDAEFVFSVLVRESKASAVGDDDKVYYFFTERATEEGSGSFTQSRSSHRVARVARVCKGDLGGKKILQKKWTSFLKARLICHIPLYETLRGVCSLDAETSSRTHFYAAFTLSTQWKTLEASAICRYDLAEIQAVFAGPYMEYQDGSRRWGRYEGGVPEPRPGSCITDSLRSQGYNSSQDLPSLVLDFVKLHPLMARPVVPTRGRPLLLKRNIRYTHLTGTPVTTPAGPTYDLLFLGTADGWIHKAVVLGSGMHIIEETQVFRESQSVENLVISLLQHSLYVGAPSGVIQLPLSSCSRYRSCYDCILARD

SEQ ID NO: 283084 - DNA, 2517 bp, Artificial Sequence
  derived and/or modified sequence
atgtggggcagactgtggcccctgctgctgagcatcctgaccgccaccgccgtgcccggccccagcctgagaagacccagcagagagctggacgccacccccagaatgaccatcccctacgaggagctgagcggcaccagacacttcaagggccaggcccagaactacagcaccctgctgctggaggaggccagcgccagactgctggtgggcgccagaggcgccctgttcagcctgagcgccaacgacatcggcgacggcgcccacaaggagatccactgggaggccagccccgagatgcagagcaagtgccaccagaagggcaagaacaaccagaccgagtgcttcaaccacgtgagattcctgcagagactgaacagcacccacctgtacgcctgcggcacccacgccttccagcccctgtgcgccgccatcgacgccgaggccttcaccctgcccaccagcttcgaggagggcaaggagaagtgcccctacgaccccgccagaggcttcaccggcctgatcatcgacggcggcctgtacaccgccaccagatacgagttcagaagcatccccgacatcagaagaagcagacacccccacagcctgagaaccgaggagacccccatgcactggctgaacgacgccgagttcgtgttcagcgtgctggtgagagagagcaaggccagcgccgtgggcgacgacgacaaggtgtactacttcttcaccgagagagccaccgaggagggcagcggcagcttcacccagagcagaagcagccacagagtggccagagtggccagagtgtgcaagggcgacctgggcggcaagaagatcctgcagaagaagtggaccagcttcctgaaggccagactgatctgccacatccccctgtacgagaccctgagaggcgtgtgcagcctggacgccgagaccagcagcagaacccacttctacgccgccttcaccctgagcacccagtggaagaccctggaggccagcgccatctgcagatacgacctggccgagatccaggccgtgttcgccggcccctacatggagtaccaggacggcagcagaagatggggcagatacgagggcggcgtgcccgagcccagacccggcagctgcatcaccgacagcctgagaagccagggctacaacagcagccaggacctgcccagcctggtgctggacttcgtgaagctgcaccccctgatggccagacccgtggtgcccaccagaggcagacccctgctgctgaagagaaacatcagatacacccacctgaccggcacccccgtgaccacccccgccggccccacctacgacctgctgttcctgggcaccgccgacggctggatccacaaggccgtggtgctgggcagcggcatgcacatcatcgaggagacccaggtgttcagagagagccagagcgtggagaacctggtgatcagcctgctgcagcacagcctgtacgtgggcgcccccagcggcgtgatccagctgcccctgagcagctgcagcagatacagaagctgctacgactgcatcctggccagagacccctactgcggctgggaccccggcacccacgcctgcgccgccgccaccaccatcgccaacagaaccgccctgatccaggacatcgagagaggcaacagaggctgcgagagcagcagagacaccggcccccccccccccctgaagaccagaagcgtgctgagaggcgacgacgtgctgctgccctgcgaccagcccagcaacctggccagagccctgtggctgctgaacggcagcatgggcctgagcgacggccagggcggctacagagtgggcgtggacggcctgctggtgaccgacgcccagcccgagcacagcggcaactacggctgctacgccgaggagaacggcctgagaaccctgctggccagctacagcctgaccgtgagacccgccacccccgcccccgcccccaaggcccccgccacccccggcgcccagctggcccccgacgtgagactgctgtacgtgctggccatcgccgccctgggcggcctgtgcctgatcctggccagcagcctgctgtacgtggcctgcctgagagagggcagaagaggcagaagaagaaagtacagcctgggcagagccagcagagccggcggcagcgccgtgcagctgcagaccgtgagcggccagtgccccggcgaggaggacgagggcgacgacgagggcgccggcggcctggagggcagctgcctgcagatcatccccggcgagggcgcccccgccccccccccccccccccccccccccccccccgccgagctgaccaacggcctggtggccctgcccagcagactgagaagaatgaacggcaacagctacgtgctgctgagacagagcaacaacggcgtgcccgccggcccctgcagcttcgccgaggagctgagcagaatcctggagaagagaaagcacacccagctggtggagcagctggacgagagcagcgtgtag

SEQ ID NO: 283085 - DNA, 2517 bp, Artificial Sequence
  derived and/or modified sequence
atgtggggtaggctttggcctctgctgttaagcattctgacagccaccgccgtacccgggcccagtctcaggaggccttcccgagagctggacgcaacaccccggatgaccatcccttatgaggaattgtcggggacgaggcattttaagggccaagctcaaaattactcgacattgctgctggaagaggcaagcgccagactcctggttggagcgcgcggggccctctttagcttatccgccaatgacatcggcgacggtgcacacaaagaaatccattgggaggcatccccagagatgcagagcaaatgccaccagaagggtaagaataaccagacagaatgctttaaccacgtaaggttcctacagagattgaattctacacacctgtatgcatgcggtacccacgcttttcagcccctgtgcgcagcaatcgacgccgaggcctttacactgccaacgtcattcgaggaaggcaaggagaaatgtccttatgacccagctaggggatttaccgggctcatcatagatgggggactctacacggccacacgctatgaattccggtcaatacctgacattcgccggtcgcggcaccctcactcactgcgtaccgaggaaactccaatgcattggttaaacgatgcggaatttgtcttttctgttctcgtccgcgagtccaaggcatcagcagttggggacgatgataaggtgtactacttctttacggagcgtgccactgaagaagggagcgggagttttacccaatctcgctcctcccacagggtggcccgagtggccagagtgtgtaagggggatttgggcggtaagaagattctgcagaaaaagtggacctcattcttgaaggctcgtctcatatgtcacatccccctgtacgaaacacttcgcggggtttgctctctggatgccgagacatcttctagaacacacttttatgccgcgtttactctctcaacccaatggaagactctggaggcctccgcaatctgtcgatacgacctggctgaaattcaggccgtgttcgcgggcccctacatggaatatcaggacggaagcagaaggtggggaaggtatgagggcggggtacccgagcctcgcccaggcagctgtatcacagactctctacggagccagggctacaatagctcccaagacttgccgagcctggttctggactttgtcaagctgcatcctctcatggcacgaccagtggtccctacccgcggacgcccattattactcaagaggaacataaggtacactcacttgactgggacaccagtcaccactcctgccggtcccacctatgacctcctgtttcttggaactgccgacggctggatccataaggccgtggtcctcggatctggaatgcacatcatagaagagacgcaggtgttccgcgagagccagtcagttgagaacctggtgatatcgctgcttcagcattccctgtacgttggagctccgtcaggcgtgatccaattacctctcagcagctgtagcaggtacaggtcctgctacgactgcatcctcgccagggacccgtattgcggctgggacccgggcactcatgcttgtgccgcagcaacaacaatcgccaatcgcactgcattgattcaggatattgaacgcggcaaccggggctgcgagagtagcagggataccggaccacctcctccattgaagacccggagcgtcttacggggtgacgacgtgctcctaccgtgcgatcagccctccaatcttgcacgcgcactgtggctcctgaatgggagcatggggctatccgatggccagggagggtatagagtaggggtcgatggccttttagtgaccgatgctcagcccgagcacagcggcaattatggatgttatgctgaagaaaacggattgaggacacttctggcctcctatagtctgacggtcaggcccgcaacaccagcgcccgctcctaaggcacctgctaccccaggcgcccagctggccccagatgtaagactactgtatgtactggccatcgccgcgctggggggattatgtctgatcctggccagctccttactctacgtcgcctgcttgcgcgaaggcaggcgggggaggaggcgtaagtatagcctagggagagcctcaagggccgggggctccgcagtgcaacttcaaaccgttagcggtcaatgtccgggtgaggaagatgaaggcgacgatgagggtgcaggcgggctggaaggcagttgcttgcagattatcccaggggaaggcgcccctgcaccccccccccccccccccccaccacctcctgctgagctgactaatgggctcgtggctctgccaagtaggctccgtaggatgaacggcaacagctacgtcttgctgcgccaatcgaacaatggtgtgccagcaggcccatgcagtttcgccgaggagttgtctagaatcctggagaagcgaaagcacacccagctagtggaacaactcgacgagagcagtgtttag

SEQ ID NO: 283086 - DNA, 2517 bp, Artificial Sequence
  derived and/or modified sequence
atgtgggggagactgtggcccctgcttctgtccattttgactgcgaccgcggtgcctggtcctagcctccgacgaccatcccgggagcttgatgctacaccaaggatgacgattccatacgaagaactgtctggcacccggcatttcaaggggcaggcgcaaaattattctactttactcctcgaggaggcatccgccagactgctcgttggagccagaggtgctctcttctcgctgagcgcaaatgatatcggcgatggtgcacacaaggagatacactgggaggcttcacctgagatgcagtctaaatgccatcagaaggggaaaaataatcagaccgagtgttttaatcatgtccgctttcttcagagactgaattcgactcatctctatgcatgcggaactcatgcattccagccgctctgtgctgcaatcgacgctgaggcttttaccctgccaaccagtttcgaagaaggcaaagaaaaatgtccatacgaccctgctaggggatttactggtctgatcatcgacggcggtctgtataccgccacccggtatgagtttagatcaatccccgatatcagacgatcccgccatccacatagcctgaggacagaagagacaccaatgcattggttgaacgacgccgaatttgttttttccgtcctggttcgtgagtctaaggcaagtgcggtcggcgacgatgacaaggtatattatttctttacagagcgcgccaccgaggagggcagcgggtcctttacacagtcacgttccagccatcgagtggcccgtgtagcacgtgtttgtaaaggagacttgggcgggaaaaaaattcttcaaaaaaagtggacctctttcctgaaggctcgactcatctgtcacatccccctgtacgagacattgaggggtgtgtgttctcttgacgctgaaaccagttctcgtactcacttttatgccgcatttacattatccactcaatggaagaccctggaggcgagtgcaatttgtagatatgacctggctgagattcaggctgtatttgccgggccatatatggaataccaagatgggtcgaggcggtggggtagatacgaaggcggcgttcccgagcctcgacctggcagctgcatcaccgacagtttacggtcacagggctacaattcaagccaggacctcccgtcactggtgctggactttgtgaaactgcaccctttaatggcacgcccagtggtccctaccagggggagaccactgctgctcaaacggaacatccgatatacgcacttaaccgggacacccgtgacaacacccgctgggccgacttatgacctgctgtttttaggcaccgctgatggctggatccataaagcagtcgtactgggaagcggtatgcacataatcgaggaaacccaggtgttccgggagagtcagtctgtggaaaatctggtgattagcttgctacaacattccctgtacgtgggtgctccatccggagtcatccagctgccactttctagctgctcacggtatagatcttgttatgactgtatcctcgctagggacccatactgtggctgggacccaggcacacatgcgtgtgccgccgctactaccattgccaacaggaccgccctgatccaggatatcgagcgcggtaaccgcggctgcgagtcctccagggacaccggacctccgccccctctgaagactagaagcgttcttcgcggggacgatgtgcttttaccttgtgaccaaccgagcaaccttgcccgcgctctgtggctccttaacggaagcatggggcttagcgatgggcagggcggttacagagtgggagtcgacggccttttggtcacggatgcacagcccgagcactcggggaactatgggtgttatgctgaggagaacggcctgagaactctgctggcctcttactctttgaccgtgcgtcccgcgacccccgctcctgcacctaaggccccagccacccccggcgcgcagcttgccccagatgtgcgcctgctctatgtgctggctatcgcggccctcggcggtctctgcctgatcctagcatccagtctcttgtacgtagcctgccttcgcgagggtcgaagaggcagaaggagaaagtatagcctcgggcgggcgagtcgagccgggggtagtgccgtgcagctccagaccgtcagtggccaatgccctggtgaagaggacgaaggggatgatgagggtgccggggggttggaggggagttgcctgcagatcattcctggcgagggagcgcctgcacccccaccgcctcccccaccaccaccccccgcagaactcacgaatggtctagtcgccctgccgtccaggcttaggcggatgaacggcaattcatacgtgcttctgcgacagtctaacaatggtgtacccgccggcccatgttcttttgctgaggagcttagcagaatcctggagaagaggaaacacacccagttggtcgagcagttggatgaatcttccgtttag

SEQ ID NO: 283087 - DNA, 2517 bp, Artificial Sequence
  derived and/or modified sequence
atgtggggccgcctgtggcccctgctgctgagcatcctgacagccacagctgtgcccggccccagcctgcggcggcccagccgggagctggatgccacccccaggatgaccatcccctatgaggagctgagcggcaccaggcacttcaagggccaggcccagaactacagcaccctgctgctggaggaggccagcgcccggctgctggtgggcgcccggggggccctcttcagcctgagcgccaatgacattggagatggagcccacaaggagatccactgggaggccagccctgagatgcagagcaagtgccaccagaagggcaagaacaaccagacagagtgcttcaaccacgtgcgcttcctgcagaggctgaacagcacccacctgtatgcctgtggcacccacgccttccagcccctgtgtgccgccattgatgctgaggccttcaccctgcccaccagctttgaggagggcaaggagaagtgcccctatgaccctgcccggggcttcaccggcctcatcattgatggcggcctgtacacagccaccaggtatgagttccgcagcatcccagacatcagaagaagccgccacccccacagcctgaggacagaggagacccccatgcactggctgaatgatgctgagtttgtgttttctgtgctggtgcgggagagcaaggccagcgctgtgggagatgatgacaaggtgtactacttcttcacagagcgggccacagaggagggcagcggcagcttcacccagagccgcagcagccaccgggtggcccgggtggcccgggtgtgcaagggggacctgggcggcaagaagatcctgcagaagaagtggaccagcttcctgaaggcccggctcatctgccacatccccctgtatgagaccctgcggggcgtgtgcagcctggatgctgagaccagcagcaggacccacttctacgccgccttcaccctgagcacccagtggaagaccctggaggccagcgccatctgccgctatgacctggccgagatccaggccgtgtttgctggcccctacatggagtaccaggacggcagccgccgctggggccgctatgaaggaggagtgcctgagccccggcccggcagctgcatcacagacagcctgcggagccagggctacaacagcagccaggacctgcccagcctggtgctggactttgtgaagctgcaccccctgatggcccggcctgtggtgcccacccggggccggcccctgctgctgaagaggaacatccgctacacccacctgaccggcacccctgtgaccaccccagctggccccacctatgacctgctcttcctgggcacagcagatggctggatccacaaggctgtggtgctgggcagcggcatgcacatcatcgaggagacccaggtgttccgggagagccagagcgtggagaacctggtgatcagcctgctgcagcacagcctgtatgtgggcgcccccagcggggtcatccagctgcccctgagcagctgcagccgctaccgcagctgctatgactgcatcctggcccgggacccctactgcggctgggaccccggcacccacgcctgtgccgccgccaccaccatcgccaacagaacagccctgatccaggacatcgagcggggcaacagaggctgtgagagcagccgggacaccggccccccaccacccctgaagaccaggtctgtgctgcggggagatgatgtgctgctgccctgtgaccagcccagcaacctggcccgggccctgtggctgctgaatggctccatgggcctgagtgatggccagggcggctacagagtgggcgtggatggcctgctggtgacagatgcccagcctgagcacagcggcaactacggctgctacgccgaggagaatggcctgcggaccctgctggccagctacagcctgactgtgcggcctgccaccccagccccagcccccaaggccccagccacccctggggcccagctggccccagatgtgcggctgctgtatgtgctggccatcgccgccctgggcggcctgtgcctgatcctggccagcagcctgctgtatgtggcctgcctgcgggagggcagaagaggaagaagaaggaagtacagcctgggccgggccagccgggccggcggcagcgctgtgcagctgcagacagtgtctggccagtgccctggagaggaggatgaaggagatgatgaaggagctgggggcctggagggcagctgcctgcagatcatccctggagagggcgccccagcccctcctcctcctcctcctcctcctcctcctgctgagctgaccaacggcctggtggccctgcccagccggctgcggaggatgaatggaaacagctatgtgctgctgcggcagagcaacaacggggtgcctgctggcccctgcagctttgctgaggagctgagccgcatcctggagaagaggaagcacacccagctggtggagcagctggatgagagctctgtgtag

SEQ ID NO: 283088 - DNA, 2517 bp, Artificial Sequence
  derived and/or modified sequence
atgtggggccggctgtggcccctgctgctgagcatcctgaccgccaccgcggtccccggtccttctctcagaaggccctctagagagctggatgctacaccacgaatgacaatcccctatgaagagctgagcgggacccgacactttaagggccaggctcagaattacagtacccttctgctggaagaggccagcgcccgcctgctggtgggggcaagaggagccttgttttcgctgtctgccaatgatatcggtgacggtgcccataaggaaattcactgggaggccagccctgagatgcagagcaagtgtcaccagaaaggcaaaaataatcaaacagaatgctttaaccatgtgcgcttcctgcagcgtctgaatagtacgcatctgtacgcctgcggaacgcacgcctttcaacctctgtgtgcagcaattgatgctgaggcctttactctgccaacaagtttcgaagaggggaaggagaaatgtccgtatgatccagccagggggttcacaggactgatcattgatggcggtctgtacaccgccacccggtacgagtttcggtccatacccgatataaggcgctctcgacatccacattcactgcggacagaggagacaccaatgcattggctaaacgatgccgagtttgtgttttccgtgctggtaagggaatcgaaggcaagcgcagtaggggacgacgacaaggtgtactatttctttacagaacgtgctacagaggagggttctggctcttttactcagagtagatctagtcaccgggtcgcccgtgttgcacgggtgtgcaagggcgacctcggcggcaaaaagatattgcagaaaaagtggacctccttcctgaaagcccgtctcatctgtcacatccccctgtacgagacgctcaggggagtgtgttcactcgacgccgaaacatcatctaggactcatttttacgccgcatttaccttgtcaactcagtggaaaaccctggaggctagcgcaatttgccggtatgatctggcagaaatccaggccgtttttgctggcccttatatggagtaccaggacggatccagacggtggggcagatacgaaggcggagtgcctgaacctagacccggtagctgcattactgattctcttaggtcacaggggtacaattcgtcacaggacctgccatccctcgtgctcgactttgtgaagctgcaccctctgatggcacgtcccgtggttccaactagaggaaggccccttttactgaaacgcaatattaggtacacccacctcacaggcactcctgttacaacacccgccgggcccacatatgacttacttttcctcggaaccgccgacgggtggatccacaaagctgtggtcctgggaagcggaatgcacataatagaggagactcaggtttttcgcgaatctcaatcagtggaaaatctggtcatcagtcttctccagcatagtttatatgttggtgccccctcgggagttattcagctgccattgtcatcctgttctcggtaccgcagttgttatgattgcatccttgcccgtgatccatactgtggttgggaccccgggacccacgcttgcgcagccgccacaactatcgcaaaccgcaccgcgctcattcaggatatcgaacgcggaaataggggatgcgagagctctcgcgatacaggccctcctccacctctaaagacacgctcagtccttcggggtgacgacgtgctgttaccctgtgaccaacctagtaatctcgccagggcgctctggttactgaacggttctatggggctctcagatggacaggggggatacagggtgggcgtagacggtctcctcgtcactgatgcccagccggagcatagcgggaactatgggtgctacgctgaggaaaacgggctaagaacgctgcttgcaagctactctttgactgtgagacctgcaacaccagcgcccgcccctaaagcacccgccactcctggggctcagttagcccctgatgtgcgtctcctctatgttctagccattgctgccctcgggggactttgcctgatcttggcttcatccctcctttatgtagcctgcttgagggagggacggagagggcggcgccgtaaatacagtttggggcgcgccagtagagctggaggctccgccgtgcagcttcaaacagtatccggccaatgtccaggcgaggaagacgaaggggacgatgagggagctggaggtctggagggttcatgccttcagatcattccaggagaaggcgcacctgcgccaccaccgccgcctccacctcctccccccgccgaattgaccaacggtctggtggcactgccatccaggctccgtcgaatgaatggaaacagctacgtcctattgagacagtctaacaatggtgttcccgccggaccctgctcgttcgctgaggagctcagtaggattcttgaaaaacgcaaacacacccagttggtcgaacagttggacgaatccagcgtgtag

SEQ ID NO: 283089 - DNA, 2517 bp, Artificial Sequence
  derived and/or modified sequence
atgtggggccggctgtggcccctgctgctgagcatcctgaccgccacggcggtgcctggaccgtccttacgaaggccttctagagaacttgacgccacaccaagaatgacaataccctatgaggaattgtccggaacaagacatttcaagggacaggctcagaactactcaaccctgctgctggaagaagccagcgcacgactactggtgggtgcgaggggcgctctattttctttaagtgcaaacgatataggagacggagcacacaaggagatccactgggaggccagtcccgagatgcagagcaaatgccatcaaaaagggaagaataatcaaacggaatgttttaatcacgtgcgttttttacagcgtctcaattcaactcacctctacgcatgcggaacacacgctttccagcccctctgtgcggcaatcgacgccgaggctttcaccttgccaacctccttcgaggaaggcaaagagaaatgcccctacgatcccgctagaggttttacagggcttataattgacggcgggttatacacggctactagatatgagtttagaagcattccagatattagaaggagtcgtcatccccattctttgaggaccgaggagactccaatgcactggctgaatgacgccgagtttgtgttctccgttctagttagagaatccaaggcaagcgccgtgggggatgatgataaagtgtactactttttcacagaacgcgcaactgaagaaggaagtggaagcttcactcaatcaaggagttctcatagagtagccagagtggcccgtgtctgtaagggagacttagggggcaagaagatcctacagaagaaatggactagcttcctcaaggcgcgacttatttgccatattcctctgtacgaaaccctacgcggtgtttgttctctggatgcagaaacatcaagtcgtacacacttctatgccgccttcacattaagtacgcagtggaaaacactggaagcttccgcaatctgtagatacgacttggctgagattcaggcagtgttcgccggtccctacatggagtatcaggacggaagcaggcgttggggtagatacgaaggcggggtgcccgaacccaggcccggtagttgtatcacagacagccttaggagtcagggctacaattcaagtcaggatctgccctctctcgtcctggactttgtaaagcttcaccctctgatggcacgcccagttgtgcctacaagagggagaccattactcctcaagaggaacatcaggtacacacacctgacgggtacaccagtgaccacgcccgccggccccacgtacgatttactgtttctgggcaccgcagatgggtggatccacaaagccgttgtgctgggatctgggatgcatatcatcgaggaaacgcaggtgtttcgggagtctcagagcgtggagaatcttgtgatttcactcctgcagcattccctctacgtcggcgctcctagtggagttattcagctaccactgagtagttgttctaggtacagaagttgttacgactgcatactggcacgagacccctactgcgggtgggaccccggcacccatgcctgtgccgcggccacaaccatcgccaacaggaccgccctgatacaagacatcgaaagaggtaacaggggatgtgaaagctcgcgagacaccggtccgcctcctcccctaaaaacaagaagcgtccttaggggggacgatgtcttactcccatgcgaccaaccatctaacctggctagggctttgtggctgttaaatgggagcatgggcctgtctgacggccagggaggctaccgcgtgggggttgatgggctgctagtaacagatgcccagccagagcattctggaaattatggctgctacgcggaggaaaatggactgcgcacgctcctggccagttacagtctgactgtgcgaccggctaccccagctcctgctcctaaagcgcctgctactcccggagctcagctcgccccagatgtacgcctgctctatgtgctggccatcgccgcactcggcggactctgtttaatacttgcctcgagtctgctgtatgtggcgtgtttgcgcgagggtcgccgggggcgaagacgtaaatactctctgggcagggcttctcgtgccgggggatccgctgtacaactgcagaccgttagcgggcagtgtcctggggaggaggatgagggagatgacgaaggtgcgggtggcctggagggcagttgcctgcagattatccctggcgagggtgcgccagcccctcccccgccacctcctccgccacctccagcagaattgacaaatggcctggtggctctgccttctagactgagacgtatgaatggtaatagttacgtgttgttacgacagagcaacaacggggtccctgcggggccttgcagctttgcagaggaactcagccggatactggagaaacggaagcatacgcaactggtcgagcagttagacgaatcttctgtgtag

SEQ ID NO: 283090 - DNA, 2517 bp, Artificial Sequence
  derived and/or modified sequence
atgtgggggaggctgtggccacttctgttgagtatcctgactgctactgcagtgccgggacccagcctgcggagacccagccgcgaactggacgccacaccaaggatgactattccatacgaggagctttctgggacacgccacttcaagggacaggcacagaactatagcactctgttgctcgaggaagcctctgcccgtctactggtaggtgcacgcggagccctgttctcattgagcgcaaatgacattggagatggcgctcacaaggagatccattgggaagcctcccccgagatgcagagcaagtgccatcagaagggcaagaataatcaaaccgaatgtttcaatcatgtgcgctttctgcagaggcttaattctacccacctgtatgcctgcggtacgcacgcctttcagcccttatgtgcagccatcgacgcagaggcatttaccttgcctacctcctttgaggagggcaaagagaaatgtccgtatgatcctgcccgaggcttcacaggcttgattatagacggaggactgtatacggcaactagatatgaatttaggagcatcccagacatcaggcggagtcggcacccccatagcctgaggaccgaggaaaccccaatgcactggctaaacgatgcagagtttgtctttagtgtgttagtaagagagagcaaagcttccgctgtgggggacgacgataaagtgtattacttctttactgagagggcaacagaggagggctctggtagtttcacacagagcagatccagtcacagggtggccagagtagctcgggtttgtaagggagatctcggcggtaaaaagatactccaaaagaagtggacctctttcttaaaagcgcgtcttatatgccacatccctctctatgaaaccctccggggtgtgtgctcattggatgctgagacatcgagtagaacacacttttatgccgcttttactctgtctacccagtggaaaacgcttgaagcttctgccatctgtaggtatgacttagccgaaatccaggccgtgtttgcagggccatatatggaataccaggacggatcaagacgatggggacgttatgaaggtggcgtgccagaaccacgcccaggctcctgcatcaccgactccctgcggagtcaaggctataacagcagccaggacttgccgagccttgtgttggactttgtcaaactgcatccactcatggcgagacccgttgtaccaacccgagggaggcctttgctgcttaaaaggaatatacgatatacgcaccttacaggaacaccagttactacccccgcaggcccaacatatgacctgctatttctgggcacagccgatggttggatccataaggcggtggtcctaggctctgggatgcacattatagaagaaacccaggtgttccgagaatcacagagcgtggagaacctcgtgattagtctgctgcaacattcactctacgtgggcgcaccgtcaggggtgatccagctgcccttaagttcctgtagtcgctatcgttcttgctacgattgcattcttgctagggatccgtactgcggctgggaccccggaacacacgcatgtgccgctgcaacaaccatcgctaaccgcacagctctaatccaggatatcgagagggggaatcgcggttgtgagagttcaagggacaccgggccaccccctcccttgaaaaccagatccgttctgagaggcgacgatgtactgttgccatgcgaccaaccatccaatttggcaagggccctgtggctcttgaatggaagcatgggtttatcggacggccaaggcggataccgtgtcggcgtggacggactgcttgttaccgacgctcagcctgagcatagcgggaattatggctgctacgccgaggagaacgggctcaggactttgttggcttcatactcattaacagtgaggccggctaccccggctcctgcccctaaagcgcctgccacgccaggtgcacagctcgccccagatgtgcgcctcttatacgtcttggccatcgccgctctgggaggtctgtgcctcattctggcgtcatccttactatacgtcgcatgcttacgagaggggaggcggggacgtcggaggaaatactcattgggtagagcatccagggccggtggtagtgcagtgcaactacaaactgtctccggacagtgtcctggcgaagaagacgagggagatgacgagggcgctggaggcctggaggggagctgcctccagataattccaggggagggggcaccggctcctccgcctcctccacctcccccaccgcctgccgaactgaccaacggcctcgtggctttaccttctcgtctgaggagaatgaatggaaactcctatgtgctcctgcgccagagcaacaacggtgtgcccgcaggtccctgttcatttgccgaggaactgagcaggattttggagaaaagaaagcacactcagctcgtcgaacagctggatgaatcttcagtctag

SEQ ID NO: 283091 - DNA, 2517 bp, Artificial Sequence
  derived and/or modified sequence
atgtggggtcgactttggccactcttactcagcatcctgactgcaacggccgtcccgggacctagcctaaggagaccaagtagggagcttgatgcaactccgagaatgaccattccctacgaggagttgtcaggaactagacattttaaaggccaggcacagaactactcaactctgttactcgaagaggcttcagcccgacttttggtgggcgctcgaggggctttgtttagcctgtcagccaatgatattggtgacggggctcacaaggagattcactgggaggccagtcccgagatgcaatctaagtgtcatcagaagggaaaaaataatcagacagagtgtttcaatcatgtgagatttcttcagcggcttaactctacacatctctacgcatgcgggacacacgcttttcaacctttgtgtgctgccatcgacgcggaagcctttactctgccaacatcttttgaagagggcaaggaaaaatgtccgtacgacccagcgaggggctttaccggattgatcatagatgggggtctgtacacagcaacacgctacgagttcagatcaatcccggatatcagacgcagtcgacacccccattcactgagaactgaagaaacacctatgcattggctgaacgacgccgagttcgtattctctgtgctggttagggagagtaaggcctccgctgtgggggatgacgataaagtgtactacttctttaccgaaagagcgacagaggagggctctgggagtttcactcagagcaggtccagtcatagggtcgccagagtagccagggtatgcaagggcgatttgggcggaaagaagatcctgcaaaagaagtggacctcttttttgaaagctcggctgatttgccatataccactgtacgagacactccgaggcgtgtgcagtctcgatgccgaaacgagctcgagaactcacttctacgcagcattcaccctttccactcagtggaaaactcttgaggcctctgccatttgcagatatgatctggctgagatccaggctgtgtttgctggtccctatatggaatatcaggatggcagcagacgctgggggaggtacgaaggaggagtacctgaacctagacccggatcgtgtatcactgattccctacgctcccagggctataattccagccaggatctgccatctttagtcttagattttgtcaaacttcatccactaatggctcggcctgttgtgccaacaagaggccgacccctgttgttgaagcgaaatatccggtacacccatttgacagggacccccgttactacacctgccggtccaacatacgatctgcttttcctggggacagcagacgggtggatccataaagccgttgtcctggggagcgggatgcacattatagaggagacacaggtgtttcgggagtctcaatccgtcgaaaacctggtgatcagcctattacagcactcattatacgttggcgctccttcgggggtcatccaactacccctgtccagctgttctaggtaccgaagttgctatgattgtatcctcgccagggacccttactgtgggtgggacccagggacacacgcctgcgcagcagctaccacaatcgcaaatagaaccgctttgattcaggacatagagagagggaatcggggatgtgagagctcacgggacacaggaccaccccctccacttaagactagatccgttctcagaggtgacgatgttctgctgccgtgtgatcagcctagtaatcttgcgcgagccctatggctgttaaacggcagcatgggactctctgatggacagggaggatacagagtgggcgtggacgggcttcttgtgaccgacgctcagcctgagcacagtggcaattacggatgctacgcagaggaaaatgggctgcgcaccctgctggcctcttacagcctgactgtccggccagcaacacccgctcctgccccaaaggcacctgccacacctggggctcaactggctcctgacgtccgactgttgtacgtgctcgccatcgctgcccttgggggattatgcctgattctggcatcctcactcctctacgtcgcttgtctcagagaaggcagacgcggtagaaggcgcaagtactccctggggagagcctctagggctggcggatctgccgtgcagcttcagaccgtttccggtcagtgtccaggggaggaggacgagggtgacgatgaaggtgctggcggtctggaggggagctgcctacagatcatccctggggagggcgcacccgctcccccacctcctccccctcctcctccacccgcagaactgaccaacggcttagttgcccttccaagtcggctgcggaggatgaacggcaattcctatgtgcttctgaggcagtccaacaacggcgtgcctgccggaccctgctcctttgctgaggagctctctcgaattctcgaaaagcggaaacatacacagctggtggaacagctcgatgaaagcagtgtgtag

SEQ ID NO: 283092 - DNA, 3596 bp, Artificial Sequence
  derived and/or modified sequence
cagaaaaccaggactagctctactgtcgggggcagggtgaccccatcagtaacctacaacccctctagaacttcacaactccctctcaccatggagtttgcatttgatgcagaaaggcatgtgatccctccctccttctgacctcttagctggggattccatggccacacaaccctgtgactccatgtccccccgattccaggaccccccatggccccatgattccttgactcctatgaccttatgacccctgaccttccaagtgacttccttggactttgacccctgtgactgtgcttcccattccccgcccccacaacctgtgactctggctccctttgggggtcttgttagtctgggcctccccaggaagatgtgggggaggctctggcccctcctcctcagcatcctcacagcaactgcagtcccaggaccctcactgcggagaccgtctagagaactagatgccacccctcggatgaccataccctatgaagagctctctgggacccggcacttcaagggccaagcccagaactactcaacactgctgctggaggaggcctcagcaaggctgctggtgggagcccgaggtgccctgttctctctcagtgccaacgacataggagatggggctcacaaagagatccactgggaagcctccccagagatgcaaagcaaatgtcatcaaaaagggaaaaacaaccagacggagtgctttaaccatgtgcggttcctgcagcggctcaattctacccacctctatgcatgtgggactcacgccttccagcccctctgtgcagccattgatgctgaggccttcaccttgccaaccagcttcgaggaggggaaggagaagtgtccttatgacccagcccgtggcttcacaggcctcatcattgatggaggcctctacacagccactaggtatgaattccggagcattcctgacatccgccggagccgccacccacactccctgagaactgaggagacaccaatgcattggctcaatgatgcggagtttgtgttctccgtcctcgtgcgggagagcaaggccagtgcagtgggtgatgatgacaaggtgtactacttcttcacggagcgtgccactgaggagggctctggcagcttcactcagagccgcagcagtcaccgtgtggcccgtgtggctcgtgtctgcaagggagacctgggagggaagaagatcctgcagaagaagtggacttccttcctgaaagcccgtctcatctgccacattccactgtatgagacactgcgtggggtctgcagcctggatgctgaaacctcaagccgtacacacttctatgcagccttcacgctgagcacacagtggaagaccctggaggcctcagccatctgccgctatgacctggcagagatccaggctgtctttgcaggaccctatatggaataccaggatggttcccggcgctggggtcgctatgagggtggggtgcctgagccccggcctggctcgtgtatcacagattcattgcgcagccaaggctacaattcatcccaagacttgccatccctggtcctggactttgtaaagttgcacccactgatggctcggcccgttgtgcccacacgtggacggcccctgctgctcaagcgcaacatacgctacacacaccttacagggacacctgtcaccacgcctgctggacctacctatgacctgctctttctgggcacagctgatggctggatccacaaggccgtagtcctgggctctgggatgcacattattgaagagacacaagtgttcagggagtcccagtctgtggaaaatctagtcatctctctattgcagcacagcctctatgtgggggctcctagcggagtcatccagctaccactctccagctgctcccgctaccgatcctgctatgactgcatcttggcccgagacccctactgtggctgggaccctggcacccatgcctgcgcagcagccaccaccatagccaacaggacagcactgatacaggacatagagagaggaaatcgaggctgtgagagcagcagggatacagggccaccaccaccactgaagacccgctctgtgctccggggtgatgatgtcctcctgccctgtgaccagccatccaacctggcccgggccttgtggctactcaatgggagcatgggcctgagcgatgggcagggtggctaccgtgtgggcgtggacgggctgctggttacagatgcacagcctgagcacagtggcaactatggctgctatgccgaggaaaatggcctccgcaccctgctggcctcctatagtctcacagtccggccagccactcctgccccagctccaaaagcccctgccacacctggggcacagctggcacctgatgtgagactgctctatgtgctagccattgccgcgcttggtggcctctgcctcatcctggcctcctccctcctctatgtggcctgtctgcgggaaggcagacgagggcgccgacggaaatactcactgggtcgggccagccgggcaggaggatctgcggtgcaactgcagacagtctcaggccagtgtcctggagaggaagatgagggtgatgatgagggggctgggggcctggagggcagctgtctccagatcatccctggggagggagccccagccccaccacccccaccgcccccaccgccaccggctgagctgaccaatggcttggtggcactgcccagccggctgcggaggatgaatggcaatagctatgtgcttctgaggcagagcaacaatggagtaccagcagggccctgctccttcgccgaggaactcagccgcatcctggaaaaaaggaagcacacgcagctcgtggagcagctagatgagagctctgtctgagcccagcctcccagaacaaatgctcttccaagccagcctatctgtcccaggctgggccactgcctccctaacacagccaccctcccttcattacccccactccatacccttctcccaactttttgatgtccctgtagggctggccagtcaggcccagccaaagccccctcctcagtctccacagacccacatgtgagcagcccaggcccatcggtgctcctcagaggtaggtgctccctcaggatcaggtgccctgcagacccagagccagttcctatcccctaacctaaacacttataggtgaggactccatcctcctgttccattcatctgcccaaaccctttctctttctcccaggcagggctctgcaggtccatatgggctcaatgtcaccaccctctgcatggccctgtgtgctggatggtcctgaaaccagacaagacctctgccagccacctaagccctgcgtacattcacatgcacacatggaagaatgtttatcggctgggctgcagtgcccccaccctcaccttctcctggtgcattcttgtttcatccctgcttctggacttggggtaccctcccaattgccacatcctatctggtcctcttccccagccccatgtggtgacctctttgtcaagagcttgggaacgggccagcctggggaggtaagactgcatcactcccctcctctcccttcct

SEQ ID NO: 283093 - DNA, 4656 bp, Artificial Sequence
  derived and/or modified sequence
cgcagctggtgctgtggggccgcggagccgcgcgtcgctgtctctatggccccggatccgagcgcaaaggtgagcaaggcgaggagtgcgggcggcgccctggcgtgagcctggggctgcgggccgggggtcgggcaaggcctcccccacgtccattctaccctccaagctgggccaggcctttctcaccaccaagtcccccggtcctgcatgacggctctagaggggcgcgggccaggcctcgggctgcgcggggtgcaaaccggccaccacggagtcggggaccagcgcggggagggggccgcgtggcgaacagtgttccccaggatctgggtcacgtctcccggcgtccggcgggatcgaaggagagcttgtcctcgagctgcagcagtagagactgagaaaacggacctcagaaaaccaggactagctctactgtcgggggcagggtgaccccatcagtaacctacaacccctctagaacttcacaactccctctcaccatggagtttgcatttgatgcagaaaggcatgtgatccctccctccttctgacctcttagctggggattccatggccacacaaccctgtgactccatgtccccccgattccaggaccccccatggccccatgattccttgactcctatgaccttatgacccctgaccttccaagtgacttccttggactttgacccctgtgactgtgcttcccattccccgcccccacaacctgtgactctggctccctttgggggtcttgttagtctgggcctccccaggaagatgtgggggaggctctggcccctcctcctcagcatcctcacagcaactgcagtcccaggaccctcactgcggagaccgtctagagaactagatgccacccctcggatgaccataccctatgaagagctctctgggacccggcacttcaagggccaagcccagaactactcaacactgctgctggaggaggcctcagcaaggctgctggtgggagcccgaggtgccctgttctctctcagtgccaacgacataggagatggggctcacaaagagatccactgggaagcctccccagagatgcaaagcaaatgtcatcaaaaagggaaaaacaaccagacggagtgctttaaccatgtgcggttcctgcagcggctcaattctacccacctctatgcatgtgggactcacgccttccagcccctctgtgcagccattgatgctgaggccttcaccttgccaaccagcttcgaggaggggaaggagaagtgtccttatgacccagcccgtggcttcacaggcctcatcattgatggaggcctctacacagccactaggtatgaattccggagcattcctgacatccgccggagccgccacccacactccctgagaactgaggagacaccaatgcattggctcaatgatgcggagtttgtgttctccgtcctcgtgcgggagagcaaggccagtgcagtgggtgatgatgacaaggtgtactacttcttcacggagcgtgccactgaggagggctctggcagcttcactcagagccgcagcagtcaccgtgtggcccgtgtggctcgtgtctgcaagggagacctgggagggaagaagatcctgcagaagaagtggacttccttcctgaaagcccgtctcatctgccacattccactgtatgagacactgcgtggggtctgcagcctggatgctgaaacctcaagccgtacacacttctatgcagccttcacgctgagcacacagtggaagaccctggaggcctcagccatctgccgctatgacctggcagagatccaggctgtctttgcaggaccctatatggaataccaggatggttcccggcgctggggtcgctatgagggtggggtgcctgagccccggcctggctcgtgtatcacagattcattgcgcagccaaggctacaattcatcccaagacttgccatccctggtcctggactttgtaaagttgcacccactgatggctcggcccgttgtgcccacacgtggacggcccctgctgctcaagcgcaacatacgctacacacaccttacagggacacctgtcaccacgcctgctggacctacctatgacctgctctttctgggcacagctgatggctggatccacaaggccgtagtcctgggctctgggatgcacattattgaagagacacaagtgttcagggagtcccagtctgtggaaaatctagtcatctctctattgcagcacagcctctatgtgggggctcctagcggagtcatccagctaccactctccagctgctcccgctaccgatcctgctatgactgcatcttggcccgagacccctactgtggctgggaccctggcacccatgcctgcgcagcagccaccaccatagccaacaggacagcactgatacaggacatagagagaggaaatcgaggctgtgagagcagcagggatacagggccaccaccaccactgaagacccgctctgtgctccggggtgatgatgtcctcctgccctgtgaccagccatccaacctggcccgggccttgtggctactcaatgggagcatgggcctgagcgatgggcagggtggctaccgtgtgggcgtggacgggctgctggttacagatgcacagcctgagcacagtggcaactatggctgctatgccgaggaaaatggcctccgcaccctgctggcctcctatagtctcacagtccggccagccactcctgccccagctccaaaagcccctgccacacctggggcacagctggcacctgatgtgagactgctctatgtgctagccattgccgcgcttggtggcctctgcctcatcctggcctcctccctcctctatgtggcctgtctgcgggaaggcagacgagggcgccgacggaaatactcactgggtcgggccagccgggcaggaggatctgcggtgcaactgcagacagtctcaggccagtgtcctggagaggaagatgagggtgatgatgagggggctgggggcctggagggcagctgtctccagatcatccctggggagggagccccagccccaccacccccaccgcccccaccgccaccggctgagctgaccaatggcttggtggcactgcccagccggctgcggaggatgaatggcaatagctatgtgcttctgaggcagagcaacaatggagtaccagcagggccctgctccttcgccgaggaactcagccgcatcctggaaaaaaggaagcacacgcagctcgtggagcagctagatgagagctctgtctgagcccagcctcccagaacaaatgctcttccaagccagcctatctgtcccaggctgggccactgcctccctaacacagccaccctcccttcattacccccactccatacccttctcccaactttttgatgtccctgtagggctggccagtcaggcccagccaaagccccctcctcagtctccacagacccacatgtgagcagcccaggcccatcggtgctcctcagaggcagggctctgcaggtccatatgggctcaatgtcaccaccctctgcatggccctgtgtgctggatggtcctgaaaccagacaagacctctgccagccacctaagccctgcgtacattcacatgcacacatggaagaatgtttatcggctgggctgcagtgcccccaccctcaccttctcctggtgcattcttgtttcatccctgcttctggacttggggtaccctcccaattgccacatcctatctggtcctcttccccagccccatgtggtgacctctttgtcaagagcttgggaacgggccagcctggggaggtaagactgcatcactcccctcctctcccttcctgtgtggcccttgtgaatcagcctccccactctccttggtcattctcaagagtatgagagacagagctccaggcatgtcccatccccatgcacatgtggtaacacacacctgtatcacacatgtgcttacatttccactcacatgcacctctgagcctcccttgctgtcttggacctgtctgttgggtttagtccgtggacatttcagagggagatccccctcccatttaactgtcctcacaggcccttgcctaggatggatgaccaacactgcactcaatgagccagcctctcttttgggggaatcaagcatttgcttcctctagactacagcagggaaagggaggagaaatctgatgtctcaactggcacatgaagcccattcttggaactatgcaaagggcagaggctgggagtttggacgcttagctcctacccctgtcctacctcaccggggcactttcaggggccaggggcctctgaagtctctaggcctatatgggacaatcaattctgactgagctcccccattcccctcgggtgaggatgactgttatttttgtagctgagaacgtggaatcccacgggtttttactgcccttcacccaacctctcccacctccaccccacaatgaatgtatttattgtgagaatggctacacttctttaggaatgcccccacttacaaccaggtgggtggaacaggcatgtgacagagtggggagcctgggctcagctcctccccctgccgttggttaataaacaccctttttccccaca

SEQ ID NO: 283094 - protein, 383 aa, Artificial Sequence
  derived and/or modified sequence
MPYVDRQNRICGFLDIEENENSGKFLRRYFILDTREDSFVWYMDNPQNLPSGSSRVGAIKLTYISKVSDATKLRPKAEFCFVMNAGMRKYFLQANDQQDLVEWVNVLNKAIKITVPKQSDSQPNSDNLSRHGECGKKQVSYRTDIVGGVPIITPTQKEEVNECGESIDRNNLKRSQSHLPYFTPKPPQDSAVIKAGYCVKQGAVMKNWKRRYFQLDENTIGYFKSELEKEPLRVIPLKEVHKVQECKQSDIMMRDNLFEIVTTSRTFYVQADSPEEMHSWIKAVSGAIVAQRGPGRSASSMRQARRLSNPCIQRSIPPVLQNPNTLSVLPTQPPPPHIPQPLAATLWSQPLPWRSEDFTSLLPRSSQGTSRSRLSLQENQLPK

SEQ ID NO: 283095 - DNA, 1152 bp, Artificial Sequence
  derived and/or modified sequence
atgccatatgtcgacaggcagaataggatttgcggctttttggatatcgaggagaatgaaaactctggaaaattcctgaggcgatacttcatcctggacacaagggaggatagttttgtgtggtacatggacaacccccagaatttacccagcggctcgtccagagtgggcgcaattaaactgacttacattagcaaggtgtccgatgcgacaaaactgcgcccgaaggccgaattctgtttcgtgatgaatgctgggatgaggaaatacttcctgcaggcaaatgatcagcaggatctggtggagtgggtaaatgtcctgaataaagccatcaagatcacagtgcccaagcaaagcgattctcaaccaaatagcgacaacctcagccgccacggcgaatgcggcaagaaacaggtgagctatcgtaccgatatcgtggggggcgtcccgataataaccccgacacagaaagaggaagttaacgagtgtggtgaatccatcgaccgtaacaacctgaaaagatcgcagagccacttaccctattttactcccaagcccccgcaggatagcgccgtgatcaaggcaggctactgtgtgaagcagggcgcggtgatgaaaaattggaagagaagatattttcagctagatgagaataccataggctattttaaaagcgagctggaaaaggaacctctgcgtgttattcctctgaaggaggtccacaaggtacaagagtgcaaacagagcgatatcatgatgagggataatttattcgaaattgtgactacgtccaggaccttctacgtccaggccgattcacctgaagagatgcatagctggattaaagccgttagcggggcgatcgtcgcccagaggggacctgggagatctgcttcttccatgcgtcaggcccggcggctgtcaaacccgtgcattcagcggagcattccgccagtcctgcagaatcctaacactctgtctgtgttacctacgcaaccgcccccaccccacattccccagcctttggctgcaacgctgtggtcccagccactgccatggaggagcgaggattttacaagccttctgcccagatctagccagggcacttcgagaagccgtctcagtttacaggagaatcagctgccaaagtag

SEQ ID NO: 283096 - DNA, 1152 bp, Artificial Sequence
  derived and/or modified sequence
atgccatacgtcgaccgacagaatagaatttgtggattcctcgatatcgaggaaaatgagaattccggaaaattcctacgcaggtattttattctcgatacgcgggaggactctttcgtctggtacatggataatccacagaacctgccgagcggcagctcacgcgtcggcgctatcaagctcacctatataagcaaggtgagcgatgctactaaactgagaccaaaagctgaattttgctttgtcatgaacgcaggtatgcggaagtacttcctccaggccaacgaccagcaagatcttgtggaatgggtgaacgtgctgaacaaggcaatcaagatcaccgtgcctaaacaatctgactcccagccaaattctgataatctgtcccggcacggtgagtgcgggaaaaagcaggtgagctatcggacagacatcgtggggggtgttcctattatcacaccaacacaaaaagaggaagtgaacgagtgtggggaatccattgaccgaaataacctcaagaggagccaatcccatttgccctattttactccaaagcctccacaagactcagctgtcatcaaagcgggctattgtgttaagcagggtgcggtcatgaagaactggaagcgccgctactttcagttagacgagaacacaatcggttattttaaatccgagctagagaaagagccacttagagtgatacccctgaaggaagtgcataaggttcaggagtgtaagcagtcagacatcatgatgagggataatctcttcgaaattgtgactacatcaaggacgttttatgtgcaagcagattcacccgaggagatgcattcctggattaaggcagtgagtggcgccatcgtagcccagaggggccccggacgcagtgccagtagcatgcgccaagcacggcgactgtccaacccatgcattcaacgctcaattccgcctgtactgcagaatcctaatacactgagcgtcctccccacccaaccacccccccctcacatcccccaacccctggctgcaacattatggagccaacctctaccttggaggagtgaggacttcacctctcttttgccccgcagctcacagggcacctcccggagccgactctcgctccaagagaatcagctacctaaatag

SEQ ID NO: 283097 - DNA, 1152 bp, Artificial Sequence
  derived and/or modified sequence
atgccctacgtggaccggcagaaccgcatctgtggcttcctggacatcgaggagaatgaaaacagcggcaagttcctgcggcgctacttcatcctggacacccgggaggacagctttgtgtggtacatggacaacccccagaacctgcccagcggcagcagccgggtgggcgccatcaagctgacctacatcagcaaggtgtctgatgccaccaagctgcggcccaaggccgagttctgctttgtgatgaatgccggcatgaggaagtacttcctgcaggccaatgaccagcaggacctggtggagtgggtgaatgtgctgaacaaggccatcaagatcaccgtgcccaagcagagcgacagccagcccaacagcgacaacctgagcagacatggagaatgtgggaagaagcaggtgtcctacagaacagacatcgtgggcggcgtgcccatcatcacccccacccagaaggaggaggtgaatgaatgtggggagagcattgacaggaacaacctgaagaggagccagagccacctgccctacttcacccccaagccaccccaggacagcgctgtgatcaaggccggctactgtgtgaagcagggcgctgtgatgaagaactggaagaggcgctacttccagctggatgagaacaccatcggctacttcaagtctgagctggagaaggagcccctgcgggtcatccccctgaaggaggtgcacaaggtgcaggagtgcaagcagagcgacatcatgatgagggacaacctgtttgagatcgtgaccaccagcaggaccttctacgtgcaggccgacagccctgaggagatgcacagctggatcaaggctgtgtctggggccatcgtggcccagaggggccctggccgcagcgccagctccatgaggcaggcccggcggctgagcaacccctgcatccagaggagcatcccccctgtgctgcagaaccccaacaccctgtctgtgctgcccacccagcccccaccaccccacatcccccagcccctggccgccaccctgtggagccagcccctgccctggaggtctgaggacttcaccagcctgctgcccaggagcagccagggcaccagccgcagccggctgagcctgcaggagaaccagctgcccaagtag

SEQ ID NO: 283098 - DNA, 1152 bp, Artificial Sequence
  derived and/or modified sequence
atgccctacgtggaccggcagaaccggatctgcggcttcctggacatagaagaaaatgaaaactccggaaagttcctccgacgttatttcattctggataccagagaggactcattcgtgtggtacatggacaacccccagaatctcccatcaggcagcagtcgtgtaggagctatcaaactaacttacatctctaaggtcagcgacgccacgaagctgcgaccaaaagccgagttctgcttcgtcatgaacgcagggatgcgcaagtacttcctgcaagctaatgatcagcaggatctggtcgaatgggtcaatgtgctgaacaaggctattaaaattactgtgcccaagcaatctgattcacaaccgaactccgataacttatctcggcacggtgagtgtggaaaaaagcaggtgtcgtaccgaaccgatatcgttgggggcgtgcccatcattacccccacccagaaggaagaggtaaatgagtgcggggaatcaatcgatagaaacaatctcaaacgctcacagtcccatctgccttactttacccccaaacctccacaggacagcgccgtgatcaaggctggatactgtgtcaagcaaggtgccgtgatgaaaaattggaagcgtagatacttccagctagatgagaacactatcggatactttaaaagtgagctcgagaaagagcctctaagggtgatcccacttaaagaagtccataaggttcaggagtgcaagcagtctgatatcatgatgcgggataacctgttcgagatcgtgaccacaagcaggaccttttatgtgcaggccgacagtcctgaggagatgcattcttggattaaagccgtttccggcgctatcgtcgctcagcggggcccaggccgtagtgcttcgtctatgcgccaggccagacgactatcaaacccctgcatccagcgctccattcctccagtactgcagaatccaaacactttatcagtgcttcctacacagcccccgcctcctcacattcctcagccgttagctgccaccctctggtctcagccattaccatggcggtcggaggatttcacgtctctgctgccacgatcttcccaaggcacatcacggagcaggctttcattgcaggaaaaccagctcccgaagtag

SEQ ID NO: 283099 - DNA, 1152 bp, Artificial Sequence
  derived and/or modified sequence
atgccctacgtggaccggcagaaccggatctgcggcttcctggacatcgaagagaatgagaatagcggaaaattcctaaggcggtatttcatactagacactagagaggattcattcgtctggtatatggacaatcctcagaatctgccctccggctcttcaagggtcggcgccattaagcttacctatatttcaaaagtgtctgacgccacaaagcttagacccaaggctgaattctgtttcgtgatgaacgctgggatgagaaaatactttctccaggctaacgaccagcaggatttagtcgagtgggtcaacgtgttaaataaggctattaagattaccgtcccaaagcagagtgatagtcagcctaattctgacaacctgtcccggcacggtgagtgcggtaagaaacaggtatcatataggaccgatatcgtgggtggcgtccctatcattacacccacacaaaaggaggaagtaaatgaatgtggcgagtctatcgatcgaaataatcttaaacggagccagtcgcatctaccatattttacaccaaagccaccccaggactcggccgtcattaaagctggatattgcgtgaaacagggcgccgtgatgaagaattggaaacgccggtatttccagctggacgagaataccatcggatacttcaaatcagaactggagaaagagccactgagagtcatcccacttaaggaggtgcataaggtccaggagtgcaagcagtccgatataatgatgcgtgataatttgttcgagatcgtcacgactagcagaacattctacgtccaagcggactcaccggaggaaatgcacagttggatcaaggccgtcagtggcgcaatcgtcgcgcagcggggccccggcagaagcgcatctagcatgaggcaagctcgacgcctcagcaacccatgtattcagaggagcattccgccagtgctccaaaaccccaatacactcagcgttctgccaactcagccacctcctccacatataccccaaccactggctgccacactgtggagtcagcctttaccctggaggagcgaggactttacctctcttctccctcgatcctcacagggcacctcgcgctctcgtctgtctctccaggagaatcagcttcctaagtag

SEQ ID NO: 283100 - DNA, 3791 bp, Artificial Sequence
  derived and/or modified sequence
gtgcgcagtgcgcgggctggccgtcgcggacgccgctccgggcagccgagcctctgtgggagccggggccgcggcggcgcgggtgctccgggccgaggccgcgtgtaatgttcaagctcagaaatgccttatgtggatcgtcagaatcgcatttgtggttttctagacattgaagaaaatgaaaacagtgggaaatttcttcgaaggtacttcatactggataccagagaagatagtttcgtgtggtacatggataatccacagaacctaccttctggatcatcacgtgttggagccattaagcttacctacatttcaaaggttagcgatgctactaagctaaggccaaaggcggagttctgttttgttatgaatgcaggaatgaggaagtacttcctacaagccaatgatcagcaggacctagtggaatgggtaaatgtgttaaacaaagctataaaaattacagtaccaaagcagtcagactcacagcctaattctgataacctaagtcgccatggtgaatgtgggaaaaagcaagtgtcttacagaactgatattgttggtggcgtacccatcattactcccactcagaaagaagaagtaaatgaatgtggtgaaagtattgacagaaataatctgaaacggtcacaaagccatcttccttactttactcctaaaccacctcaagatagtgcggttatcaaagctggatattgtgtaaaacaaggagcagtgatgaaaaactggaagagaagatattttcaattggatgaaaacacaataggctacttcaaatctgaactggaaaaggaacctcttcgtgtaataccacttaaagaggttcataaagtccaggaatgtaagcaaagcgacataatgatgagggacaacctctttgaaattgtaacaacgtctcgaactttctatgtgcaggctgatagccctgaagagatgcacagttggattaaagcagtctctggcgccattgtagcacagcggggtcccggcagatctgcgtcttctatgcggcaggccagaaggctgtcgaacccttgtatacagaggagcatccccccggtccttcagaatccaaacacgctttccgtcctaccaacgcagccaccgccacctcacattccacagcctctcgcagcaactctttggtctcaacctttaccatggagaagcgaggattttacgagtctcttgccaaggtcaagccagggaacttcaaggtccagactgtctctccaagagaaccagcttccaaagtgactgaacaagctctgttaagacctcaaagtaaaaatggccctcaggaaaaagattgtgacctagtagacttggacgatgcgagccttccggtcagtgacgtgtgaggcagaagcgcacggagcctgcctgcctctgccgtcctcagtttcctttcatgaggcttctagccaaagatgataaagggggaaatggtttttagtgcgtatattatactgcctcttaggtgtactctttataagctggtaaaccaagaatctagggagtggccaaactaaatataatttctttaaaaaagaaagaaaaaggaaaaatccaaaatatctcagtatcatctgtctgaagcattgtgtgttctcattcgggtggtaacaatgtatgtgtaatatttttttcttagtgattttgacagtttaaatgtttaacaacttaaagcattaaaaatgcttattaataactttggtcatttaaaaaatgctacaatgacttcctattaaaggttcaatatttacacattcttattggttgatattaccacatgaaatattgccagaccaagatacctaaactcatgatgtctgtggtgctgtaaaatttatactaaaatgtggactattttgaaattataaccatttttgatgccctgaatcttgaggtgacttattttgcatagaggatatggatagaccaacagtaagggttgtgggttataccggcatagagaaaagaagaaaactagaattgaaacaactgtgtcttagacatttgtttgaaaaagcttcatcaggccttggagcagtcactgctttattccgcaaaaattatttggtaggaaatttttgggagatctgattttcttatccaagttttgtaaatagttgttatttctatatttggattggtgaaagacctcaagtttatatgtaaagacataactgcccttagtcatgaaattgttgtgacctctactttttgtcactaatagcctacattcaagtgcctgtgttttttcatcttgtttaggaatgttttgagattaatgtgcttaaaagtcctacgtgactgattttaaacattgtgataaaattaattttcagtagaatagttgaatgtgttaagataggattttatgttagagataccagaatgctggtattctactacttgtgcaatatatatgttttaaaaaacaaatttgagaatacatttaatcatagggatatagatataagcacctctctaaagaatctttagtttccgacgttgaattatagaccagtttgagtaagtactgctttttttttttggagacgggctctcgctctgttgctcaggctggagtgcagtggcgtgatctcagctcactacagcctccacctcgtgggttcaaacagttgtgctgcctcagcttcccgagtagctaggattacaggtgcatgccaccacacctggctaatttttgtattttagtagagatggggtttcaccatgttggccaggctcgtctcgaactcctgacttcaggtgatccacccatctcagcctcccaaagtgctgggattacaggcgtgagccaccatgcccggcccataagtaccgtttttgaggttcagtcttaaacatttgctttaagaaaacagtcttgaatttcacatgctgctatttttatattttgccattttacagtactgttttgttttgaattcatgcatatcattgaaaatttctcgttttcattttcttagatgacttcttgtctgagacagaaaaatttcctactacagcagtgcagtccagaggttaagatgtattagaattatacaatatcagtttaaaaatctgtatgcataaagaatgcaccactcaacttttttattcataagctaatatttttttaaagttacattaagattttttctcttttgcagctacatttgaaagtgatagaataaagagattttaatgagttatcactttttcagctgatatattcattttaatggcttttttgaaagttcctttttcatgaacacacccgagaaatcttaaatagacactttgcaatatttaagaacctaatgctgtttaattttggtacagcttccacattgcatgttcactttagtatttgcaatttgatatatttcatggtggcaaaatattagctctgttttgggacattttaaaatagaactatccttgttcgatagcataggaaaatgttctggtgattgtcagggtctcctaatatttatctcaattcttttataagtctatggaaattatttaattattttaaaacgtacacacttttcttgtaaatatgtcacatctgagttcaaaaaaattactttgaataccttaatatttgctgcatttttttccgtatatataacatgtcttctttcagaatgggaatatatgtgtgcctcccaacatttactgttaaagtgtgttatctttatatgtcaaactggttgaacactgtaatgagaataaactgcacagagtttattctg

SEQ ID NO: 283101 - DNA, 3809 bp, Artificial Sequence
  derived and/or modified sequence
gtgcgcagtgcgcgggctggccgtcgcggacgccgctccgggcagccgagcctctgtgggagccggggccgcggcggcgcgggtgctccgggccgaggccgcggtaaagtttagcttgaatgtaatgttcaagctcagaaatgccttatgtggatcgtcagaatcgcatttgtggttttctagacattgaagaaaatgaaaacagtgggaaatttcttcgaaggtacttcatactggataccagagaagatagtttcgtgtggtacatggataatccacagaacctaccttctggatcatcacgtgttggagccattaagcttacctacatttcaaaggttagcgatgctactaagctaaggccaaaggcggagttctgttttgttatgaatgcaggaatgaggaagtacttcctacaagccaatgatcagcaggacctagtggaatgggtaaatgtgttaaacaaagctataaaaattacagtaccaaagcagtcagactcacagcctaattctgataacctaagtcgccatggtgaatgtgggaaaaagcaagtgtcttacagaactgatattgttggtggcgtacccatcattactcccactcagaaagaagaagtaaatgaatgtggtgaaagtattgacagaaataatctgaaacggtcacaaagccatcttccttactttactcctaaaccacctcaagatagtgcggttatcaaagctggatattgtgtaaaacaaggagcagtgatgaaaaactggaagagaagatattttcaattggatgaaaacacaataggctacttcaaatctgaactggaaaaggaacctcttcgtgtaataccacttaaagaggttcataaagtccaggaatgtaagcaaagcgacataatgatgagggacaacctctttgaaattgtaacaacgtctcgaactttctatgtgcaggctgatagccctgaagagatgcacagttggattaaagcagtctctggcgccattgtagcacagcggggtcccggcagatctgcgtcttctatgcggcaggccagaaggctgtcgaacccttgtatacagaggagcatccccccggtccttcagaatccaaacacgctttccgtcctaccaacgcagccaccgccacctcacattccacagcctctcgcagcaactctttggtctcaacctttaccatggagaagcgaggattttacgagtctcttgccaaggtcaagccagggaacttcaaggtccagactgtctctccaagagaaccagcttccaaagtgactgaacaagctctgttaagacctcaaagtaaaaatggccctcaggaaaaagattgtgacctagtagacttggacgatgcgagccttccggtcagtgacgtgtgaggcagaagcgcacggagcctgcctgcctctgccgtcctcagtttcctttcatgaggcttctagccaaagatgataaagggggaaatggtttttagtgcgtatattatactgcctcttaggtgtactctttataagctggtaaaccaagaatctagggagtggccaaactaaatataatttctttaaaaaagaaagaaaaaggaaaaatccaaaatatctcagtatcatctgtctgaagcattgtgtgttctcattcgggtggtaacaatgtatgtgtaatatttttttcttagtgattttgacagtttaaatgtttaacaacttaaagcattaaaaatgcttattaataactttggtcatttaaaaaatgctacaatgacttcctattaaaggttcaatatttacacattcttattggttgatattaccacatgaaatattgccagaccaagatacctaaactcatgatgtctgtggtgctgtaaaatttatactaaaatgtggactattttgaaattataaccatttttgatgccctgaatcttgaggtgacttattttgcatagaggatatggatagaccaacagtaagggttgtgggttataccggcatagagaaaagaagaaaactagaattgaaacaactgtgtcttagacatttgtttgaaaaagcttcatcaggccttggagcagtcactgctttattccgcaaaaattatttggtaggaaatttttgggagatctgattttcttatccaagttttgtaaatagttgttatttctatatttggattggtgaaagacctcaagtttatatgtaaagacataactgcccttagtcatgaaattgttgtgacctctactttttgtcactaatagcctacattcaagtgcctgtgttttttcatcttgtttaggaatgttttgagattaatgtgcttaaaagtcctacgtgactgattttaaacattgtgataaaattaattttcagtagaatagttgaatgtgttaagataggattttatgttagagataccagaatgctggtattctactacttgtgcaatatatatgttttaaaaaacaaatttgagaatacatttaatcatagggatatagatataagcacctctctaaagaatctttagtttccgacgttgaattatagaccagtttgagtaagtactgctttttttttttggagacgggctctcgctctgttgctcaggctggagtgcagtggcgtgatctcagctcactacagcctccacctcgtgggttcaaacagttgtgctgcctcagcttcccgagtagctaggattacaggtgcatgccaccacacctggctaatttttgtattttagtagagatggggtttcaccatgttggccaggctcgtctcgaactcctgacttcaggtgatccacccatctcagcctcccaaagtgctgggattacaggcgtgagccaccatgcccggcccataagtaccgtttttgaggttcagtcttaaacatttgctttaagaaaacagtcttgaatttcacatgctgctatttttatattttgccattttacagtactgttttgttttgaattcatgcatatcattgaaaatttctcgttttcattttcttagatgacttcttgtctgagacagaaaaatttcctactacagcagtgcagtccagaggttaagatgtattagaattatacaatatcagtttaaaaatctgtatgcataaagaatgcaccactcaacttttttattcataagctaatatttttttaaagttacattaagattttttctcttttgcagctacatttgaaagtgatagaataaagagattttaatgagttatcactttttcagctgatatattcattttaatggcttttttgaaagttcctttttcatgaacacacccgagaaatcttaaatagacactttgcaatatttaagaacctaatgctgtttaattttggtacagcttccacattgcatgttcactttagtatttgcaatttgatatatttcatggtggcaaaatattagctctgttttgggacattttaaaatagaactatccttgttcgatagcataggaaaatgttctggtgattgtcagggtctcctaatatttatctcaattcttttataagtctatggaaattatttaattattttaaaacgtacacacttttcttgtaaatatgtcacatctgagttcaaaaaaattactttgaataccttaatatttgctgcatttttttccgtatatataacatgtcttctttcagaatgggaatatatgtgtgcctcccaacatttactgttaaagtgtgttatctttatatgtcaaactggttgaacactgtaatgagaataaactgcacagagtttattctga

SEQ ID NO: 283102 - DNA, 1152 bp, Artificial Sequence
  derived and/or modified sequence
atgccttacgtggataggcaaaaccgcatttgtggattcctggacatcgaggaaaacgaaaatagcggcaaattcttacgaagatactttattctggacactagggaagacagctttgtgtggtacatggataatccacaaaacctgcccagcgggtcaagtcgcgtgggggctatcaagctgacatatattagtaaggtcagcgatgcgacaaagctgagaccaaaggcagaattctgttttgtcatgaatgccggaatgcggaaatacttcttgcaggcaaacgatcagcaggaccttgttgaatgggttaacgtgctgaacaaggctatcaaaattacagttcccaagcagagcgatagtcaaccaaatagcgataatctttctcggcatggcgaatgcgggaagaagcaggtcagttaccggactgacatcgtggggggtgttcctataatcactccaacgcagaaggaagaggtgaatgaatgtggggaatctattgatagaaataacttaaaacgcagccaaagtcacctcccttatttcaccccgaagcccccacaggattcggcggttatcaaagcaggatactgtgtgaagcagggggctgtgatgaagaattggaagagacgttacttccaacttgacgaaaataccattggatacttcaagagcgagctcgagaaggaacccctccgagtgatcccactgaaggaggtacataaggtccaagagtgcaagcaaagtgatattatgatgagggataatctatttgagatcgtgactacctccagaactttctacgtccaggctgactcaccagaggagatgcattcgtggattaaagccgtcagcggcgctatcgtcgcccagagagggcctggccgtagcgccagcagcatgcgtcaggcaaggcgactgagcaacccatgcatccagagaagcattccacccgttctccagaaccccaacactctgagcgtccttccaactcaaccccctcccccacacattcctcagcccctggccgctaccttgtggagccaacctcttccttggaggtcagaagacttcacgtcactgttgccacgctcttcccagggaacgtctaggtcaagactcagcctgcaggaaaatcagcttccaaaatag

SEQ ID NO: 283103 - DNA, 1152 bp, Artificial Sequence
  derived and/or modified sequence
atgccttacgtggatcggcagaaccgaatttgtggatttctcgacatagaggagaatgaaaactcaggcaagttcttgagaagatatttcattctggatacacgggaagactccttcgtgtggtacatggacaatccccagaacctgccctcgggcagcagtcgagttggcgcaatcaaactaacatacatctccaaagtgagtgacgcaacaaaactgcggcctaaagcagaattttgcttcgtgatgaacgccggtatgaggaagtattttctgcaggcgaatgaccaacaggatctggttgaatgggtcaacgttcttaacaaggctatcaagataaccgtgccaaagcagtcagattcccagccaaattctgataacttatctcggcatggcgagtgcggaaaaaaacaggtctcttatcggactgacattgtgggtggcgttccgatcattactccaacacagaaggaggaagtcaacgagtgcggcgagtcgattgatcgcaataatctgaaacgctctcaatcccacctgccttattttaccccgaagccacctcaggactccgctgtcattaaggctggttactgcgtcaaacagggagccgtcatgaaaaattggaaaagacgttactttcagctcgatgaaaacacaattgggtatttcaagtctgaactcgagaaggaacccctgcgggtgattcctcttaaggaggtgcataaagtgcaggagtgcaagcagtcagacatcatgatgagggacaatctattcgagatcgtgaccacgtcccggacattctacgttcaggctgattctcctgaggagatgcactcttggattaaggccgtttcgggagccattgttgcccaacgaggacctgggcgtagcgcttcaagcatgcgacaggccaggcgactatctaatccctgcattcagcgctcaatcccccctgtgttgcagaatcctaacaccctctcagtgcttccaacacagccacccccacctcatatccctcagccactggccgcaaccctctggtcccagccccttccttggcgaagtgaggatttcactagcctgctgccccgaagctctcaaggaacctctcgatccagactgtctcttcaggagaatcagctcccgaagtag

SEQ ID NO: 283104 - DNA, 1152 bp, Artificial Sequence
  derived and/or modified sequence
atgccctacgtggacagacagaacagaatctgcggcttcctggacatcgaggagaacgagaacagcggcaagttcctgagaagatacttcatcctggacaccagagaggacagcttcgtgtggtacatggacaacccccagaacctgcccagcggcagcagcagagtgggcgccatcaagctgacctacatcagcaaggtgagcgacgccaccaagctgagacccaaggccgagttctgcttcgtgatgaacgccggcatgagaaagtacttcctgcaggccaacgaccagcaggacctggtggagtgggtgaacgtgctgaacaaggccatcaagatcaccgtgcccaagcagagcgacagccagcccaacagcgacaacctgagcagacacggcgagtgcggcaagaagcaggtgagctacagaaccgacatcgtgggcggcgtgcccatcatcacccccacccagaaggaggaggtgaacgagtgcggcgagagcatcgacagaaacaacctgaagagaagccagagccacctgccctacttcacccccaagcccccccaggacagcgccgtgatcaaggccggctactgcgtgaagcagggcgccgtgatgaagaactggaagagaagatacttccagctggacgagaacaccatcggctacttcaagagcgagctggagaaggagcccctgagagtgatccccctgaaggaggtgcacaaggtgcaggagtgcaagcagagcgacatcatgatgagagacaacctgttcgagatcgtgaccaccagcagaaccttctacgtgcaggccgacagccccgaggagatgcacagctggatcaaggccgtgagcggcgccatcgtggcccagagaggccccggcagaagcgccagcagcatgagacaggccagaagactgagcaacccctgcatccagagaagcatcccccccgtgctgcagaaccccaacaccctgagcgtgctgcccacccagcccccccccccccacatcccccagcccctggccgccaccctgtggagccagcccctgccctggagaagcgaggacttcaccagcctgctgcccagaagcagccagggcaccagcagaagcagactgagcctgcaggagaaccagctgcccaagtag

SEQ ID NO: 283105 - protein, 151 aa, Artificial Sequence
  derived and/or modified sequence
MWSGLLPPGLNESDAESNSEDEATLENSGLNLQEDKEDESIRKTEIIDFSTDEPKTETESNVNAYEECPSGIPIDMWNKFQELHKKHSEQKSTTSRFRGKRRKRSRKDKLKNEKELHSEPSSNETQWKELTQYFGVNDRFDPPVKRKKVEK

SEQ ID NO: 283106 - protein, 233 aa, Artificial Sequence
  derived and/or modified sequence
MWSGLLPPGLNESDAESNSEDEATLENSGLNLQEDKEDESIRKTEIIDFSTDEPKTETESNVNAYEECPSGIPIDMWNKFQELHKKHSEQKSTTSRFRGKRRKRSRKDKLKNEKELHSEPSSNETQWKELTQYFGVNDRFDPPVKRKKVEKSGLEKRIDQAVEEWNIEKAEELSNQLATRELGVKIAKAVACHNFVKAKKEVENSQAARKKKKLAWGFEAKKRWETKSNMGYM

SEQ ID NO: 283107 - DNA, 975 bp, Artificial Sequence
  derived and/or modified sequence
ccgccggttcgggctccggcatgatgagtctgggagggcctcttgtgggcagccgagggaggcggcatgggcggcctcatagctcctcggccgagcctcccggagcaggctagaaaagcccccggcccggggccgcggaagcgacggcggggccgccctcagccttcctcgaaaggggcgtcgcagcggcctccccagcctgttatgtggagggggttctccgtcccacccaggtcaaagtgagaggggattgaggaggctgtcgatagggaaaacaggctcacgtttacagttgctgtattccggaaaacagctccagttaatgggactgccagcaggctagacatccttcgccggaatgtgcagcgcttagttctgtgcccgggaggggcttctctctcttttgggattggagtgtggcattgccgccagaaagcctgcagaattccgggttgtgcagccaagcaggaacggtgtacctttctagacccatcctcttgcaatcttggaccctaagaaaagatgtggagtgggctgctacctcctggcctaaatgaaagtgacgctgagtcaaactcggaagatgaagctacgttggagaactctggacttaacttacaggaagataaagaggatgagagcatcagaaaaacagaaatcatagatttctcaacagatgaaccaaaaactgaaacagagtcaaatgtaaatgcctatgaagagtgtccttctggaattcccatagatatgtggaataaatttcaagaattgcataaaaaacattctgaacagaaaagcacaacctcaagattcagagggaaaagaagaaaacgctccagaaaagataaattgaagaatgaaaaagaattacatagtgaaccgtcctcaaatgaaacccagtggaaagagcttactcagtattttggagtcaatgatagatttgacccgcctgttaaaaggaaaaaagttgagaag

SEQ ID NO: 283108 - DNA, 872 bp, Artificial Sequence
  derived and/or modified sequence
gcgatgttgacggggtcctaagatggctgctgggcgaccacttcctgacagaagaaaagatgtggagtgggctgctacctcctggcctaaatgaaagtgacgctgagtcaaactcggaagatgaagctacgttggagaactctggacttaacttacaggaagataaagaggatgagagcatcagaaaaacagaaatcatagatttctcaacagatgaaccaaaaactgaaacagagtcaaatgtaaatgcctatgaagagtgtccttctggaattcccatagatatgtggaataaatttcaagaattgcataaaaaacattctgaacagaaaagcacaacctcaagattcagagggaaaagaagaaaacgctccagaaaagataaattgaagaatgaaaaagaattacatagtgaaccgtcctcaaatgaaacccagtggaaagagcttactcagtattttggagtcaatgatagatttgacccgcctgttaaaaggaaaaaagttgagaagtcaggccttgaaaagaggatagaccaggctgtggaggagtggaatattgagaaggctgaggaactcagcaaccagctagctactcgagagcttggtgtaaaaattgccaaagcagttgcctgccacaactttgtaaaagccaaaaaggaggttgaaaattcacaggctgcccgaaaaaagaagaaacttgcatgggggtttgaagcaaagaagagatgggaaaccaaaagcaacatgggatacatgtaacttgccagagtgcttcaagacatttgtagactcaaatgctcaatttactgagaatgttttcctgcctatgttaatatgtcagaaaattgatagcactaaaacaaaaataag

SEQ ID NO: 283109 - DNA, 5930 bp, Artificial Sequence
  derived and/or modified sequence
gcgatgttgacggggtcctaagatggctgctgggcgaccacttcctgacagctccagttaatgggactgccagcaggctagacatccttcgccggaatgtgcagcgcttagttctgtgcccgggaggggcttctctctcttttgggattggagtgtggcattgccgccagaaagcctgcagaattccgggttgtgcagccaagcaggaacggtgtacctttctagacccatcctcttgcaatcttggaccctaagaaaagatgtggagtgggctgctacctcctggcctaaatgaaagtgacgctgagtcaaactcggaagatgaagctacgttggagaactctggacttaacttacaggaagataaagaggatgagagcatcagaaaaacagaaatcatagatttctcaacagatgaaccaaaaactgaaacagagtcaaatgtaaatgcctatgaagagtgtccttctggaattcccatagatatgtggaataaatttcaagaattgcataaaaaacattctgaacagaaaagcacaacctcaagattcagagggaaaagaagaaaacgctccagaaaagataaattgaagaatgaaaaagaattacatagtgaaccgtcctcaaatgaaacccagtggaaagagcttactcagtattttggagtcaatgatagatttgacccgcctgttaaaaggaaaaaagttgagaagtcaggccttgaaaagaggatagaccaggctgtggaggagtggaatattgagaaggctgaggaactcagcaaccagctagctactcgagagcttggtgtaaaaattgccaaagcagttgcctgccacaactttgtaaaagccaaaaaggaggttgaaaattcacaggctgcccgaaaaaagaagaaacttgcatgggggtttgaagcaaagaagagatgggaaaccaaaagcaacatgggatacatgtaacttgccagagtgcttcaagacatttgtagactcaaatgctcaatttactgagaatgttttcctgcctatgttaatatgtcagaaaattgatagcactaaaacaaaaataagcataaaatttgggattttgattatcagctcttttcagtctttctttaaggactttgtcctattgaagtgaataaaatgaagcattctgttatttgtataagaaatgtaagaaaaaaaatatagaaagaagaggataggattttgtttatttgtatggatggacccttggtataaaatcacttttggcgctttccattcatttggtttagcacagccagtgagcttctcgtactttctttctttttttttttttttttgagacagagcctcgcttgctctgtcacccaggctagagtgcagtagcacgatcttggctcactgcaaccactgcttcctgggttcaagtgattctcatgcctcagcctcctgagtagctgggattatggacaaatgccaccacacccggctaattttttttttttttttgtatttttagtagagacagagttttgctgtgttggtcaggctggtcttgaactcctggcctcatatgattcacctgcctctgcctcccaaagttctgggagtacagacatgagctaccatgctgcccttgtattttcttatctgtacccagtgtaactacacgtttactggaactgtgtttttaagactgacagttgtttataatggattagtcgtaagtaccaaaaagtctcagttgatattatctttacaaatgacttgaccttaatgttataaaagtagttactgtttttttttaattggaggcagacttgatatttcagagttgcatagtaaaagcaatttgttaatttttgtgtactttcagataaactattacaataaagaaaggagcagaatgtagtatttggaagatgatttaaattcagcaacgcctaaaaatgtcttcctaagtatttttctcagccatgtcattctttaaattatgagatggttcttagaagagaaaatggtgtaattgtattaaacagacaattataactcaagataatataactttgaaccttctaagaactgatttgtttggttttcctcccattccccattcctccttaaaagattgaatgaattaatgagcagaaagagaggattggtaacatgggaaatcgttttcattagatgtacatttcctggttctgacaggaaaggggctccagaaaatcataaaacaagcaggtgaacaagaccaggtgtgtcggcacctccctgctcagtgcccagcggaggtaaagaaccactcagcatggtttttgtcagttcacctcttctgtcgttgtcagaggtttcctacctgtctgatataaactttctctgggttgataatataaattcagaaacatgtaaaatgaatcatgattatattactgttatttttagacttaaaatagtaacaaaattttatttatggtggcacatttaatggctttttttttctgtgttctggaataagagaatacctagctactatttaagcatccaaaaatcatatcttgctttcatttagttgagaaaagccagcatagagaaagcaaagttttagaatattatgtgtcatactaattcagtatccagaccaaatgttggaaagtcttattttatgatttaatatcccttgttccattttacagatatgatcatgtaaaacttacctacaatattcatttcaaactgctaaattaggtaaatacagacttttagtatagaaacctttcctctaaaaatccattatgggggaaatattcactatacaatccagtggttttgtctgaaatcctaaaaatgttatttttgagcaggcgagtggtatagatattctcacacttggggccccgatatgggcatttccctttgacttcagtctcatttttttttttttttctgtttctactccttagagcatttagtgacccctgcaggcatgttgcacttcccatactgaagccttgccagagtggcctcctgtagggtctgacttgggatcctgtccagccaaggaagcccttcttcagcctgctccagtgcccgcagttgccccctcagcatcccctcggggttctcatgtagatgggaacattttaactacgcggaaggcaggcatttcagcagaattaagtatagcgggggctcatctaataaaggaagccacttctcccaagtcgtcactcctttctgggcatgggttgtggaaagctctaaaacgttatgtgtagcagaagaaggggttggagggaagatttgtggggacaggttgtcttggattggccctgctgacatgtcatttgagagcagttttattttatcctttctaataggaattaggtattttactcctagaaacattattccttgagtacgcatgctgctcaaaggatgtagtcatttgtccactccattctagtcacagcaaaataaggattctttttggatcagtaataactttggttcctaaaacttcaatatgtgcatttactaccaccagaatgcctgagttagatcagtaatgtaaacgtcagttattgttaactgagattaatatgtttcaggccgttggtatggcattaatgtaactatgatttactatttaagtactttaggctaaaacatcttactaaagaacagtaattttgagctttacagcactggttctgagaaagggaagttggcagtgcattcttgtttgggagccctcaggatgtttctgattttcagcagaacattctatgtctttcaccgaaaggagagattgaatatataatcttaggtttgctataattagttctgatgacagagttaaatacctcagccaagactgtaaatcagtacgtaaacaggtttctgcaactgatcataaatctcaaactgcatattttaaacacttatttttttaggatgacagataagggagcagcaggctaaggataggaataaaatgttatctgaacttttaagtcacaacttagaactcacattaaaatcttctgattttctttataccttttgtctaaaatattatcttttagcttattaataactttaataagacaagtttgaatttaattcacaaaaaatgaagatataatttataaaatgtccaaatttttgttaagacattactttttaagaaatgtgtgtcttgctaaatataaaacatattgtatgaggttgttgtttaaacaaaatgagagttgtacattattttttaagagatgataaagtttgaggaggcaagccgatgttatgtcagatctcattttgaagttagtgaaacctagtctaatccagaaccaactgaatccaagttttccattttggcagaagttgcttttatttttagtatctggcagagcaacaaatgctttgcatgtcagttcaatattttttcctgccaactgtttattcattggcttaaaatttacactctactaaagtcttagctctgactttcatgaaacaaatagtaatatttggacaaaatatgtacatgaaaatctttttccagaaccaaatgtagactggtatttgtgacatcagtgccttctagcatggtgacgggtcgaaaaatactttgaaaagttgaaggctgtgtaaacccacggcagtgcatctcaagtgatttttattatgaggtaatcagagtatctaggttttcaaatttaaattagtgggtgactttatgctagaaagtagaatatgtgttagaataaatttatcaatatatattcttggcctttgtaggatactgagacaataaggtccatttttcatttttgaggttggggagctctgtagattttgataaaatgtgcagaactgcattctttaatctttattatttcatcctccctccacactgcttgctttaaaagaaaaaaatacctacacacattttctagtgttaactgctgtaatcagcatagacttcctgggaagggattcttgccttcagtaaaggacatgacagcatgtggccaatggagattgccacgaggaaacctggaaaggcattgaaccattttgtgctactgttaaaatgaggtgtgttgtctctttattatctcctactcaatagtgagtattctggaggtgtctgttccctttccggaatttcttcaaatacagagatgcttcagagtagcttcctgccacattggctttcatgatcttaatccctggaacacagctataggcttctgggagatagtttattaaatgccatgcagaatgctatgtttttagatgtgcatgtaaatcaagaattagctgaggaatatctttttattagtagtagtagtaactcatttttagattcaagtaaagtttgttttccaggtgagatgacatttttaagaaattgaatttaagtatgtgcttttatatccggaccaggtttctcaaggaagcagaatacaagggaatgaaaggggaagggagggtagtgcccaagagaaacctcggctcctaagtgctcccctgccaggtttcccccgtgcctgcccactggcaccatcctggcagctccagcccacaccccctcctggaccctgggctgcctctcgctgaatagctgcagggggcctgctatgtgacaggtatggaatgaggtaatccttttccacctctaatttctgaagggtgtgtctgtccagtttttacttgttcattgaatttaaagccttaggaaccaacagctacagtgcaagctgtaattattgatgtctgtttcatattcatctgtaagttctggcatttgatcaagaagtcaatatatcacttcatcttcaggctgaatgtgtctcagctataaaggttttattgtttgatggatagcatacaattatgactgcccacaataaaaagtgttttcatttgtaa

SEQ ID NO: 283110 - protein, 212 aa, Artificial Sequence
  derived and/or modified sequence
MRALGRLAQVCRWLRRFTSCDLLWRRIARASLNSGFTRLGTDLMTSVPVKERVKVSQNWRLGRCREGILLKWRCRQMPWMQLEDDSLYISQANFILAYQFRPDGASLNRRPLGVFAGHDEDVCHFVLANSHIVSAGGDGKIGIHKIHSTFTVKYSAHEQEVNCVDCKGGIIVSGSRDRTAKVWPLASGRLGQCLHTIQTEDRVWSIAISPLL

SEQ ID NO: 283111 - protein, 245 aa, Artificial Sequence
  derived and/or modified sequence
MWLCPLALNLILMAASGAVCEVKDVCVGSPGIPGTPGSHGLPGRDGRDGLKGDPGPPGPMGPPGEMPCPPGNDGLPGAPGIPGECGEKGEPGERGPPGLPAHLDEELQATLHDFRHQILQTRGALSLQGSIMTVGEKVFSSNGQSITFDAIQEACARAGGRIAVPRNPEENEAIASFVKKYNTYAYVGLTEGPSPGDFRYSDGTPVNYTNWYRGEPAGRGKEQCVEMYTDGQWNDRNCLYSRLTI

SEQ ID NO: 283112 - protein, 189 aa, Artificial Sequence
  derived and/or modified sequence
MGPPGEMPCPPGNDGLPGAPGIPGECGEKGEPGERGPPGLPAHLDEELQATLHDFRHQILQTRGALSLQGSIMTVGEKVFSSNGQSITFDAIQEACARAGGRIAVPRNPEENEAIASFVKKYNTYAYVGLTEGPSPGDFRYSDGTPVNYTNWYRGEPAGRGKEQCVEMYTDGQWNDRNCLYSRLTICEF

SEQ ID NO: 283113 - protein, 158 aa, Artificial Sequence
  derived and/or modified sequence
MWLCPLALNLILMAASGAVCEVKDVCVGSPGIPGTPGSHGLPGRDGRDGLKGDPGPPGPMGPPGEMPCPPGNDGLPGAPGIPGECGEKGEPGERGPPGLPAHLDEELQATLHDFRHQILQTRGALSLQGSIMTVGEKVFSSNGQSITFDAIQEACARA

SEQ ID NO: 283114 - DNA, 738 bp, Artificial Sequence
  derived and/or modified sequence
atgtggctgtgccccctggccctgaacctgatcctgatggccgccagcggcgccgtgtgcgaggtgaaggacgtgtgcgtgggcagccccggcatccccggcacccccggcagccacggcctgcccggcagagacggcagagacggcctgaagggcgaccccggcccccccggccccatgggcccccccggcgagatgccctgcccccccggcaacgacggcctgcccggcgcccccggcatccccggcgagtgcggcgagaagggcgagcccggcgagagaggcccccccggcctgcccgcccacctggacgaggagctgcaggccaccctgcacgacttcagacaccagatcctgcagaccagaggcgccctgagcctgcagggcagcatcatgaccgtgggcgagaaggtgttcagcagcaacggccagagcatcaccttcgacgccatccaggaggcctgcgccagagccggcggcagaatcgccgtgcccagaaaccccgaggagaacgaggccatcgccagcttcgtgaagaagtacaacacctacgcctacgtgggcctgaccgagggccccagccccggcgacttcagatacagcgacggcacccccgtgaactacaccaactggtacagaggcgagcccgccggcagaggcaaggagcagtgcgtggagatgtacaccgacggccagtggaacgacagaaactgcctgtacagcagactgaccatctag

SEQ ID NO: 283115 - DNA, 570 bp, Artificial Sequence
  derived and/or modified sequence
atgggcccccccggcgagatgccctgcccccccggcaacgacggcctgcccggcgcccccggcatccccggcgagtgcggcgagaagggcgagcccggcgagagaggcccccccggcctgcccgcccacctggacgaggagctgcaggccaccctgcacgacttcagacaccagatcctgcagaccagaggcgccctgagcctgcagggcagcatcatgaccgtgggcgagaaggtgttcagcagcaacggccagagcatcaccttcgacgccatccaggaggcctgcgccagagccggcggcagaatcgccgtgcccagaaaccccgaggagaacgaggccatcgccagcttcgtgaagaagtacaacacctacgcctacgtgggcctgaccgagggccccagccccggcgacttcagatacagcgacggcacccccgtgaactacaccaactggtacagaggcgagcccgccggcagaggcaaggagcagtgcgtggagatgtacaccgacggccagtggaacgacagaaactgcctgtacagcagactgaccatctgcgagttctag

SEQ ID NO: 283116 - DNA, 747 bp, Artificial Sequence
  derived and/or modified sequence
atgtggctgtgccccctggccctgaacctgatcctgatggccgccagcggcgccgtgtgcgaggtgaaggacgtgtgcgtgggcagccccggcatccccggcacccccggcagccacggcctgcccggcagagacggcagagacggcctgaagggcgaccccggcccccccggccccatgggcccccccggcgagatgccctgcccccccggcaacgacggcctgcccggcgcccccggcatccccggcgagtgcggcgagaagggcgagcccggcgagagaggcccccccggcctgcccgcccacctggacgaggagctgcaggccaccctgcacgacttcagacaccagatcctgcagaccagaggcgccctgagcctgcagggcagcatcatgaccgtgggcgagaaggtgttcagcagcaacggccagagcatcaccttcgacgccatccaggaggcctgcgccagagccggcggcagaatcgccgtgcccagaaaccccgaggagaacgaggccatcgccagcttcgtgaagaagtacaacacctacgcctacgtgggcctgaccgagggccccagccccggcgacttcagatacagcgacggcacccccgtgaactacaccaactggtacagaggcgagcccgccggcagaggcaaggagcagtgcgtggagatgtacaccgacggccagtggaacgacagaaactgcctgtacagcagactgaccatctgcgagttctag

SEQ ID NO: 283117 - DNA, 477 bp, Artificial Sequence
  derived and/or modified sequence
atgtggctgtgccccctggccctgaacctgatcctgatggccgccagcggcgccgtgtgcgaggtgaaggacgtgtgcgtgggcagccccggcatccccggcacccccggcagccacggcctgcccggcagagacggcagagacggcctgaagggcgaccccggcccccccggccccatgggcccccccggcgagatgccctgcccccccggcaacgacggcctgcccggcgcccccggcatccccggcgagtgcggcgagaagggcgagcccggcgagagaggcccccccggcctgcccgcccacctggacgaggagctgcaggccaccctgcacgacttcagacaccagatcctgcagaccagaggcgccctgagcctgcagggcagcatcatgaccgtgggcgagaaggtgttcagcagcaacggccagagcatcaccttcgacgccatccaggaggcctgcgccagagcctag

SEQ ID NO: 283118 - DNA, 738 bp, Artificial Sequence
  derived and/or modified sequence
atgtggttatgtcccctggccctgaatttaatattgatggcagccagtggagcagtctgtgaagtgaaagatgtttgcgtcgggtcccctgggatccctgggaccccaggtagccacgggctgcccggtagagacggaagagatggcttaaagggggatcctggccccccgggcccgatgggaccaccaggcgagatgccttgtccgccggggaatgacggcctgcccggcgcaccgggaatacccggtgagtgcggagagaaaggagagcctggcgagcggggaccacctggcttgcctgcccatctggacgaggaactccaggcaactctgcatgattttcgccaccaaatactgcaaacgcgtggggctctgagccttcaggggagcattatgactgtcggagaaaaagtcttttcaagcaatggacagagcatcacgttcgacgccatccaagaagcatgcgcacgcgcaggcggtaggatcgcggtacctcgcaaccccgaggagaacgaggctatcgcctctttcgtaaaaaagtacaacacttacgcctatgtggggctcacagagggaccgtctccaggggactttagatattcagatggcacccctgtgaactacaccaactggtatagaggcgagcccgcaggccgcgggaaagaacaatgcgtggagatgtacactgatggacagtggaatgaccgcaactgcctatactcccgactgaccatctag

SEQ ID NO: 283119 - DNA, 570 bp, Artificial Sequence
  derived and/or modified sequence
atggggcctccaggtgaaatgccatgcccccccggcaatgatggactgcccggagcccctggcattcccggcgagtgcggcgagaaaggagaacctggcgagaggggaccgccgggacttcctgcacacttggacgaagagttgcaggcaaccctgcacgactttcggcaccaaatattacaaacgagaggcgcgcttagcttacaaggtagcatcatgacagtcggggaaaaagttttctcaagtaatgggcagtcgattacctttgacgcaatccaagaagcatgtgctagagctggggggcggatcgcagtgcctagaaatcccgaagagaatgaagctatcgcaagcttcgtaaaaaagtacaatacctatgcgtatgtcggactgaccgagggtccaagtccaggggacttcagatatagcgacggcacacccgtgaactacacaaactggtatcgaggggagcccgctggcaggggaaaagagcaatgtgtagaaatgtacactgatggccagtggaatgaccggaattgcctgtacagccgactgaccatctgcgaattttag

SEQ ID NO: 283120 - DNA, 747 bp, Artificial Sequence
  derived and/or modified sequence
atgtggctttgccccctggccctgaacctaatcctgatggctgcttccggcgccgtgtgcgaggtgaaggatgtttgtgtgggctccccaggcattcctggcacgccaggttcacatggactcccgggacgggatgggcgcgatggcttaaaaggtgatcctggaccgcctggaccaatgggacccccaggcgagatgccatgcccaccaggaaatgacggcttgcccggggcccccgggatacccggcgaatgcggggagaagggtgagcctggagaacgtggtcctccgggactcccagctcaccttgacgaggagttgcaggccactcttcacgatttccggcaccagattctacagacaagaggcgccctcagtcttcagggaagtattatgaccgtcggcgagaaggtgttctcctccaatggacagagcataaccttcgatgctattcaggaagcctgtgcacgggcaggcggcagaatcgctgtacccagaaatccagaggaaaacgaggccatcgcatcgtttgtgaagaagtacaacacatatgcatatgtggggttgacagagggacctagtcctggtgattttaggtactctgatggtaccccagtcaattacacaaattggtaccgaggcgaacccgcgggtaggggtaaagagcaatgcgttgagatgtacaccgatggacaatggaatgaccgcaactgtctctatagcaggttgactatctgcgagttctag

SEQ ID NO: 283121 - DNA, 747 bp, Artificial Sequence
  derived and/or modified sequence
atgtggttatgccctttagctttgaatctgatcctgatggccgccagcggcgctgtttgcgaggtaaaagatgtgtgtgtcgggtcacctggaatccccggtacccctgggtctcacggattaccaggcagggatggccgagacgggttgaaaggagatcctgggcccccagggcctatggggcctcccggggaaatgccttgtccacccggtaacgacgggttacctggagctcccgggatccctggagagtgcggggagaagggcgaacccggtgaaagaggacccccagggttgccagcgcatctggatgaggagctccaagcgacactacatgacttcaggcaccagattttgcagacacggggggctctaagccttcaaggctctatcatgactgtcggcgagaaggtgttctcctctaatgggcagagtattacatttgacgccatccaggaggcctgtgccagggcgggcggacggatcgccgttcctagaaaccctgaggaaaatgaggcgatcgcgtcttttgtgaagaagtataatacctacgcatacgtgggactgactgaaggcccatctcctggagatttccgttatagtgacggcaccccagtcaattacacaaactggtatagaggcgaacccgctgggcggggcaaggagcagtgtgtggagatgtataccgacgggcagtggaatgatcgtaactgcctctactcacggttgaccatttgcgaattttag

SEQ ID NO: 283122 - DNA, 747 bp, Artificial Sequence
  derived and/or modified sequence
atgtggctttgccccctggccttgaacctgattcttatggccgctagtggcgctgtttgtgaagtgaaagacgtgtgcgtaggctctcccggaatacctggcactcccggatcacacgggctgccaggtagggacggtcgcgacggcctgaaaggcgaccccggaccacctggacccatggggcctccaggtgaaatgccctgtccgcctggtaacgacggcctacccggcgcgcctggaatacctggcgagtgtggggagaagggagagcctggagaaagaggcccccccgggctcccagcccacctggacgaagagcttcaggccactctgcacgatttcagacatcagatcttgcagacacggggcgcactgagtctgcaggggagtataatgactgtgggagagaaagttttctctagtaacggtcaaagcatcacgttcgatgcaatacaggaggcatgcgccagagccggtgggcgcatcgccgtccctagaaacccagaagaaaatgaggcaatcgcttccttcgtcaagaagtataacacgtatgcctatgttgggctgacagaggggcctagcccaggggacttcaggtactctgacggaacaccggttaattatactaactggtatcggggagagcccgccggccgaggcaaggagcagtgcgttgagatgtatactgatggacagtggaatgaccggaattgtttatactcccgtctgaccatttgtgaattctag

SEQ ID NO: 283123 - DNA, 477 bp, Artificial Sequence
  derived and/or modified sequence
atgtggttatgtccccttgccctgaacctgatcctgatggcagcatctggcgccgtctgtgaagttaaagacgtgtgcgtcggctctcccggcatccccgggacaccaggttcacatgggctccctgggagagatggccgcgacggactcaagggcgaccccggtccaccaggacctatgggtccaccaggagagatgccatgtccccctggtaatgacggcctgccaggggcacctggaatacccggcgagtgtggcgagaagggggaacccggagagagaggtccacccgggctaccagcccacctcgatgaagagctgcaggccaccctgcatgattttcgccaccagattttgcagactcgcggagctctgtccttacagggaagtattatgaccgtcggggagaaagtcttctccagcaacggccaatctattacctttgacgccatacaggaagcctgcgccagggcttag

SEQ ID NO: 283124 - DNA, 477 bp, Artificial Sequence
  derived and/or modified sequence
atgtggctgtgtcctctggccctgaaccttattctgatggcagcctctggcgctgtttgtgaggttaaagatgtgtgcgttgggtcaccaggaatccccggtacacccgggtcacacggtttgccaggaagggatggtcgggacgggttaaaaggcgacccaggcccccctggcccaatgggtcctcccggggagatgccttgcccgccaggcaacgacggactcccaggagctcccggcatccctggcgaatgtggcgaaaagggcgagccaggagaaaggggcccccccggtttacctgcccatcttgacgaagagctccaagccacattgcacgattttaggcaccagattctgcaaaccagaggcgctttgtctctgcaggggtccataatgactgtcggtgaaaaggtcttttcaagcaacggacagtcaattaccttcgatgctatccaagaggcatgtgccagagcttag

SEQ ID NO: 283125 - DNA, 738 bp, Artificial Sequence
  derived and/or modified sequence
atgtggctgtgccccctggccctgaacctgatcctgatggccgccagcggggctgtgtgtgaggtgaaggatgtgtgtgtgggcagccctggcatccctggcaccccaggcagccacggcctgcccggcagagatggaagagatggcctgaagggggaccccggccccccaggccccatgggccccccaggagagatgccctgccccccaggaaatgatggcctgcccggggcccctggcatccctggagaatgtggggagaagggggagcctggagagcggggccccccaggcctgcctgcccacctggatgaggagctgcaggccaccctgcatgacttccgccaccagatcctgcagaccaggggggccctgagcctgcagggcagcatcatgacagtgggggagaaggtgttcagcagcaatggccagagcatcacctttgatgccatccaggaggcctgtgcccgggccggcggcagaattgctgtgcccaggaaccctgaggagaatgaggccatcgccagctttgtgaagaagtacaacacctacgcctacgtgggcctgacagagggccccagccctggggacttccgctacagtgatggcacccctgtgaactacaccaactggtacagaggagagcctgctggccggggcaaggagcagtgtgtggagatgtacacagatggccagtggaatgacaggaactgcctgtacagccggctgaccatctag

SEQ ID NO: 283126 - DNA, 570 bp, Artificial Sequence
  derived and/or modified sequence
atgggccccccaggagagatgccctgccccccaggaaatgatggcctgcccggggcccctggcatccctggagaatgtggggagaagggggagcccggggagcggggccccccaggcctgcctgcccacctggatgaggagctgcaggccaccctgcatgacttccgccaccagatcctgcagaccaggggggccctgagcctgcagggcagcatcatgacagtgggggagaaggtgttcagcagcaatggccagagcatcacctttgatgccatccaggaggcctgtgcccgggccggcggcagaattgctgtgcccagaaatccagaagaaaatgaggccatcgccagctttgtgaagaagtacaacacctacgcctacgtgggcctgacagagggccccagccctggggacttccgctacagtgatggcacccctgtgaactacaccaactggtacagaggagagcccgccggccggggcaaggagcagtgtgtggagatgtacacagatggccagtggaatgacaggaactgcctgtacagccggctgaccatctgtgagttctag

SEQ ID NO: 283127 - DNA, 747 bp, Artificial Sequence
  derived and/or modified sequence
atgtggctgtgccccctggccctgaacctgatcctgatggccgccagcggggctgtgtgtgaggtgaaggatgtgtgtgtgggcagccctggcatccctggcaccccaggcagccacggcctgcccggcagagatggaagagatggcctgaagggggaccccggccccccaggccccatgggccccccaggagagatgccctgccccccaggaaatgatggcctgcccggggcccctggcatccctggagaatgtggggagaagggggagcctggagagcggggccccccaggcctgcctgcccacctggatgaggagctgcaggccaccctgcatgacttccgccaccagatcctgcagaccaggggggccctgagcctgcagggcagcatcatgacagtgggggagaaggtgttcagcagcaatggccagagcatcacctttgatgccatccaggaggcctgtgcccgggccggcggcagaattgctgtgcccaggaaccctgaggagaatgaggccatcgccagctttgtgaagaagtacaacacctacgcctacgtgggcctgacagagggccccagccctggggacttccgctacagtgatggcacccctgtgaactacaccaactggtacagaggagagcctgctggccggggcaaggagcagtgtgtggagatgtacacagatggccagtggaatgacaggaactgcctgtacagccggctgaccatctgtgagttctag

SEQ ID NO: 283128 - DNA, 477 bp, Artificial Sequence
  derived and/or modified sequence
atgtggctgtgccccctggccctgaacctgatcctgatggccgccagcggggctgtgtgtgaggtgaaggatgtgtgtgtgggcagccctggcatccctggcaccccaggcagccacggcctgcccggcagagatggaagagatggcctgaagggggaccccggccccccaggccccatgggccccccaggagagatgccctgccccccaggaaatgatggcctgcccggggcccctggcatccctggagaatgtggggagaagggggagcctggagagcggggccccccaggcctgcctgcccacctggatgaggagctgcaggccaccctgcatgacttccgccaccagatcctgcagaccaggggggccctgagcctgcagggcagcatcatgacagtgggggagaaggtgttcagcagcaatggccagagcatcacctttgatgccatccaggaggcctgtgcccgggcctag

SEQ ID NO: 283129 - DNA, 738 bp, Artificial Sequence
  derived and/or modified sequence
atgtggctgtgccccctggccctgaacctgatcctgatggccgcctccggcgcagtttgcgaggttaaggatgtgtgcgtgggttctccaggaattcctggcacgcccggatcccatggactgccggggcgtgacgggcgtgatggactaaaaggcgatcctggcccacctggtccaatgggacctccgggcgagatgccttgtccccccgggaatgatgggctcccgggggctcccggaattccaggagagtgtggtgagaaaggtgagcccggcgagcgcggccctcccggactgcctgcacaccttgatgaagagctgcaagcgacgctgcacgatttccgtcatcagatcctccagacacggggagcattgtcactacaaggatccatcatgacagtaggcgaaaaggtgttctcttcgaacggacagtccattactttcgacgcaatccaggaagcatgcgccagagcaggcggtcggatagctgtcccaagaaaccctgaggagaacgaggcaatagcttcctttgttaagaaatacaacacctacgcctatgtcgggctgacggaaggcccctcgcctggggattttaggtactccgacggaacgcccgtcaattacaccaactggtaccggggcgagccagccggtagaggcaaagagcaatgcgttgagatgtacacggacggccagtggaacgacaggaactgtctgtatagccgattgaccatctag

SEQ ID NO: 283130 - DNA, 570 bp, Artificial Sequence
  derived and/or modified sequence
atgggcccccccggcgagatgccctgcccccccggcaacgacggcttgcctggcgcacccggaattcccggcgagtgtggggaaaaaggtgagccaggcgagcgtggaccacctggtttaccagcacacctggatgaggagctgcaggccactttgcacgatttccgtcatcagatattgcagacccgcggtgccctttcccttcagggctcaatcatgacggtaggagagaaggtgttcagctccaatggccaatctatcacctttgatgcaattcaggaggcttgcgcccgggcaggaggacgcatagccgtgccacgcaatccggaagagaacgaggcgatcgcaagtttcgtcaagaagtacaatacttacgcctacgtgggtttgactgagggccccagccccggggacttccgatactccgacggcacacctgtgaactatacaaactggtaccggggggaaccggccggcagagggaaagaacaatgcgtggagatgtatacagatgggcagtggaacgacaggaactgcctgtactcaaggctgactatttgtgagttttag

SEQ ID NO: 283131 - DNA, 747 bp, Artificial Sequence
  derived and/or modified sequence
atgtggctgtgccccctggccctgaacctgatcctgatggccgccagcggcgccgtgtgtgaggtgaaagatgtatgtgttggatcacccggtatacccggaacccctgggagccacggtttgcccggaagggacgggcgagacggcctgaaaggagatccaggcccacctggcccgatggggcctcctggcgaaatgccttgtcctcccgggaacgatggactccccggagcccccggaatccctggggagtgcggagagaaaggagagcccggagagcgggggcctccggggctgcctgcgcacctggacgaagaactacaggctacactccacgactttagacaccagatcctgcaaacgcggggggcacttagcctgcagggcagcatcatgactgtaggcgagaaggtgtttagcagtaatgggcagagcataacattcgacgcgattcaagaagcctgtgcacgcgccggtggcagaatcgcagttccacgtaaccccgaggagaacgaggcaatcgcctcttttgtaaaaaaatacaatacctacgcttacgtggggttgacggaggggccttcgccgggggatttccgttacagtgacggaactcctgtcaattatacaaactggtatcgaggcgaacccgctggaagaggaaaagaacagtgtgtagagatgtatactgatggtcaatggaacgatcggaattgtctatattcacgactaaccatctgcgaattctag

SEQ ID NO: 283132 - DNA, 747 bp, Artificial Sequence
  derived and/or modified sequence
atgtggctgtgccccctggccctgaacctgatcctgatggccgccagtggcgccgtgtgtgaggtaaaagatgtgtgtgtaggctcccctggcatccccggcactccggggtcacatggtttaccaggcagagatggccgagacggactcaagggcgatcccgggccgccagggccaatgggccccccaggtgagatgccttgcccaccagggaacgacggcctaccgggcgcaccggggatcccaggagagtgtggggagaagggcgaacccggagagagaggcccacccggtctccctgcccacttggatgaggagctccaagcgacgctgcacgattttcggcaccagatcctccagaccaggggcgccttgtctcttcagggatcgataatgaccgtgggggagaaagttttttccagtaacggacagagtatcactttcgacgccatccaggaggcttgtgcccgcgccggcgggcgcatagcggtgccaagaaacccagaagaaaacgaagctatagccagctttgttaagaagtataatacatatgcttacgtaggcctgaccgaaggaccctcccctggtgatttccggtacagcgacggtacccccgttaattataccaactggtacaggggagaaccagcaggaagaggcaaagaacagtgtgttgagatgtataccgacggacagtggaatgacaggaattgcttatacagcagactgacaatctgcgagttctag

SEQ ID NO: 283133 - DNA, 747 bp, Artificial Sequence
  derived and/or modified sequence
atgtggctgtgccccctggccctgaacctgatcctgatggccgccagcggggcggtgtgcgaggtcaaggacgtttgcgttggatcccccggcattcctggtacgcccggatcccacggactgccaggccgcgatgggagggacggcttgaagggcgacccagggcctccaggaccgatggggccaccgggggagatgccatgcccaccaggcaacgatgggcttcctggcgctcccggcatcccaggcgagtgcggagaaaagggcgagcctggtgaaagaggccccccaggcctccctgctcacctggatgaagaacttcaggcaacgctgcacgacttccgtcatcagattctacagactcgaggcgcactttcactgcaggggagcatcatgacagtgggcgaaaaggtcttctctagtaacgggcagtccatcacttttgacgccatccaggaagcctgcgcacgcgccggaggccgtatcgctgtgccgcgaaatccagaggagaacgaggcgatagcctctttcgtaaagaaatacaacacatacgcctatgtaggcctgactgaagggccttcgccaggcgacttcaggtattccgacggtacgccagtgaactatacaaactggtataggggagagcctgctggcagaggaaaagagcagtgtgtggagatgtacacagacgggcagtggaatgataggaattgcctctatagcagactgaccatctgtgaattttag

SEQ ID NO: 283134 - DNA, 477 bp, Artificial Sequence
  derived and/or modified sequence
atgtggctgtgccccctggccctgaacctgatcctgatggccgcctccggggccgtgtgtgaggtgaaggacgtttgtgtaggaagccccgggatacctggaactccaggctcacacggtctgcccggaagagacggtcgggacggccttaaaggcgatcccggtccgcctggcccgatgggccctcctggggaaatgccttgcccacccggaaatgacggtctccccggtgccccaggcatcccaggggaatgcggggaaaagggcgagcccggcgaacgcggacctccaggcttacctgctcaccttgacgaggagctacaggctacgctgcacgattttaggcaccagatactacagactcgcggcgccctgtcgttgcaggggtctattatgaccgtcggtgaaaaggtgttcagctcaaacggccaaagcataactttcgacgctatccaggaggcatgtgcaagggcctag

SEQ ID NO: 283135 - DNA, 477 bp, Artificial Sequence
  derived and/or modified sequence
atgtggctgtgccccctggccctgaacctgatcctgatggccgcctccggcgccgtgtgtgaggttaaagacgtgtgtgttggctcccccggcataccaggaacccccggttcccacggattgcctgggcgcgacgggcgagatggtctgaaaggcgatccaggaccacctggacctatggggccacccggggaaatgccatgcccaccgggcaacgacgggcttcccggagcccctggtattcctggcgagtgtggagagaaaggagagcccggggagagaggacctccgggactgcccgcccaccttgacgaggagctgcaggctacgcttcacgactttagacaccaaattctccagacaaggggagccctcagcttacagggcagtattatgaccgtgggggaaaaagttttcagttctaatggacaaagcataactttcgacgcgatccaagaggcctgtgctcgagcatag

SEQ ID NO: 283136 - DNA, 738 bp, Artificial Sequence
  derived and/or modified sequence
atgtggctgtgcccattagccctgaatcttatcttgatggctgcgagcggcgctgtgtgtgaagtgaaagacgtgtgtgtgggctcaccgggtataccgggtacccctggatcacatggtctgccaggcagggacggacgggacggtctaaagggagatccaggtcctccagggccaatgggtccacctggcgagatgccatgtcctcctggaaacgacggtcttcccggtgccccaggaataccaggtgagtgtggcgagaagggagagcccggagaacgcggtccaccaggattgcccgcacacttggacgaagaactccaagctaccctgcacgactttcgtcatcagatcttgcagacaagaggagctttgagcttgcaggggtccattatgaccgttggggagaaggtcttttcgtcaaatggacagtctatcactttcgatgccatccaggaggcctgtgccagggccggaggcaggatcgccgttcccaggaatcctgaggaaaatgaggccattgccagcttcgtgaaaaaatataacacttatgcttacgtcggccttaccgagggaccctctcccggagatttccgatacagtgacggcacacccgtcaactataccaactggtacaggggcgaaccagcgggtcggggtaaggaacagtgcgtggagatgtacacggatggacaatggaacgaccgaaactgcctctactctcggctgaccatttag

SEQ ID NO: 283137 - DNA, 570 bp, Artificial Sequence
  derived and/or modified sequence
atgggtcctcccggagagatgccctgccccccaggcaacgatgggttgcccggagctccaggaatcccaggagagtgcggtgagaaaggcgagcctggggagcgcggacctcctgggctccccgcacatctagacgaggagttacaggccaccctgcacgactttagacatcagatccttcaaactagaggcgctctgtcccttcagggctcaatcatgaccgtcggagagaaggtgttcagcagcaatggacaatcaatcacatttgacgccatccaggaggcctgtgccagagccggaggacggatagctgtacccagaaatcctgaagagaatgaggccatcgctagttttgtgaagaaatacaatacatatgcctatgtcggcctgacagaggggcctagtcccggagacttccgctattctgacgggacccctgttaattacaccaattggtaccgcggagaacctgcgggacgcggaaaggagcaatgcgtggaaatgtacactgatgggcagtggaacgatcgtaattgtctctattctagattgactatctgcgagttttag

SEQ ID NO: 283138 - DNA, 747 bp, Artificial Sequence
  derived and/or modified sequence
atgtggctgtgtccactggctcttaatcttattctgatggccgcatcaggagcggtctgtgaggtcaaagacgtctgtgttggcagtcctggcattcccggaactcctggcagccatggacttcccggacgggacgggagagatggcctgaaaggagatcctgggcctccgggtccaatggggccaccaggggaaatgccgtgtcccccaggtaacgatggactgcctggagctcctggcattccaggtgagtgcggcgagaagggagaacctggcgaaagaggtccaccaggcttgcccgctcacctcgatgaagaactccaggccactctgcacgactttaggcatcagatccttcagacaagaggagccttgtcgctgcagggtagcattatgaccgtaggcgaaaaagtgttttccagcaacggtcagtccataaccttcgatgccattcaagaggcttgtgcccgtgccggagggaggatcgctgtgccaaggaatccagaggaaaacgaagccatcgccagcttcgtcaagaaatacaacacttacgcgtacgtgggtctaactgaggggccttctcccggagattttcgctacagcgatggcaccccagtgaattacaccaattggtataggggggagcccgctggtcgcggtaaagaacagtgtgttgagatgtacacagatggacagtggaatgacaggaactgcttatactccagactcacaatctgtgaattttag

SEQ ID NO: 283139 - DNA, 747 bp, Artificial Sequence
  derived and/or modified sequence
atgtggctttgtcctctcgctcttaatctaattctgatggcagcgtccggggcagtgtgtgaagtgaaagacgtctgtgttggctctccgggaatccctggcactcccggaagccacggtctcccgggtagagacggacgcgacgggttgaaaggggatccgggaccgcctggccctatgggcccaccgggtgagatgccgtgtcctccaggtaacgacggactccccggtgcaccaggaattcctggggagtgcggtgaaaaaggcgagcctggagaacgagggcctccaggactgcccgctcacctggacgaggagctacaagccacgttgcatgactttcgacatcagatactgcagaccaggggagctctctccctgcaagggtcaattatgaccgttggggagaaggttttttcttcgaatggccagtcaataacattcgatgctatccaagaggcttgcgcacgagcagggggtcggatagccgtcccccgaaaccccgaggagaacgaagcaattgccagtttcgtgaagaagtataacacctacgcgtacgtcggattgacagaaggcccaagtccaggcgattttcggtatagcgacggaacacccgtcaactataccaattggtacaggggggagccagccggtcggggaaaagaacagtgtgtcgagatgtataccgacggccaatggaatgatcggaattgcttatactctcgcctcacaatctgtgagttctag

SEQ ID NO: 283140 - DNA, 747 bp, Artificial Sequence
  derived and/or modified sequence
atgtggttatgtcccctggccctgaacctaatcctgatggccgcttccggggcagtgtgcgaggtaaaagatgtgtgtgtgggcagtcctggtatccccggaactcctggaagccatggcttgcctggcagggacgggcgtgacgggctaaaaggcgatccgggacctcctggacccatgggaccaccaggcgaaatgccgtgccctccaggcaatgacgggctgccaggtgcacctggcatcccaggcgaatgtggagaaaagggggagcctggggagcgcggtcccccaggcctgccggcacaccttgatgaggaacttcaggcaacactgcatgattttagacatcagatcctgcagacgcggggagccctaagcttacagggatctattatgacggtgggcgagaaggtattcagctcgaatggtcagtccatcacgtttgacgcaatccaagaagcctgtgcgagagccggaggtaggattgcagtgcccagaaacccggaggaaaatgaagctatcgccagttttgtgaagaagtacaatacctacgcctacgtgggcttaaccgagggccctagcccgggtgacttcagatactccgatggaactcctgtcaactacacgaactggtaccgtggagagcccgcagggagaggcaaggaacagtgtgtggagatgtacacggatggccaatggaatgatcggaactgcctctacagcagactgaccatttgcgaattttag

SEQ ID NO: 283141 - DNA, 477 bp, Artificial Sequence
  derived and/or modified sequence
atgtggttgtgcccactggccctgaacctcattctaatggccgcatctggagccgtgtgtgaggtgaaggacgtgtgcgtgggatctccaggaattccaggcactccgggatcacacggacttccaggcagggacggacgcgacgggctcaaaggcgatccgggacccccagggcctatgggaccacccggtgaaatgccctgccctcccggtaatgacggactgccaggagccccagggatcccaggcgagtgtggggaaaagggggaacctggcgagcggggacccccaggcttgcctgctcatcttgatgaagagctgcaggcgacgctgcatgattttagacatcaaattctgcagactcgcggagcactcagcttgcagggaagtatcatgacagtaggcgaaaaagtattcagctcgaacggtcagagcataacatttgacgccatacaggaagcctgtgccagagcgtag

SEQ ID NO: 283142 - DNA, 477 bp, Artificial Sequence
  derived and/or modified sequence
atgtggctgtgccccttggctctgaacctgatcctgatggccgcatctggtgctgtgtgcgaagtaaaggacgtgtgtgtcggatcccctggaatcccgggtacacctggctctcacggcctaccaggccgagatggcagggatgggctgaaaggcgacccaggtcctcctgggccaatggggcctcccggagagatgccctgtcctcctggcaatgatggattgcccggtgctcctggcatcccaggcgagtgtggagagaagggcgagcccggtgagagaggtccgcctggactacccgctcaccttgatgaggagttgcaggctactctacatgacttccggcatcagatcctgcaaaccagaggtgcgctcagtctgcagggcagcattatgacagtgggagagaaggtgtttagctctaatgggcagagcattacttttgacgctatccaagaagcttgtgccagagcatag

SEQ ID NO: 283143 - DNA, 1015 bp, Artificial Sequence
  derived and/or modified sequence
ttggaggcagagacccaagcagctggaggctctgtgtgtgggccccatgggtccacctggagaaatgccatgtcctcctggaaatgatgggctgcctggagcccctggtatccctggagagtgtggagagaagggggagcctggcgagaggggccctccagggcttccagctcatctagatgaggagctccaagccacactccacgactttagacatcaaatcctgcagacaaggggagccctcagtctgcagggctccataatgacagtaggagagaaggtcttctccagcaatgggcagtccatcacttttgatgccattcaggaggcatgtgccagagcaggcggccgcattgctgtcccaaggaatccagaggaaaatgaggccattgcaagcttcgtgaagaagtacaacacatatgcctatgtaggcctgactgagggtcccagccctggagacttccgctactcagacgggacccctgtaaactacaccaactggtaccgaggggagcccgcaggtcggggaaaagagcagtgtgtggagatgtacacagatgggcagtggaatgacaggaactgcctgtactcccgactgaccatctgtgagttctgagaggcatttaggccatgggacagggaggacgctctctggccttcggcctccatcctgaggctccacttggtctgtgagatgctagaactccctttcaacagaattcacttgtggctattgggactggaggcacccttagccacttcattcctctgatgggccctgactcttccccataatcactgaccagccttgacactccccttgcaaactctcccagcactgcaccccaggcagccactcttagccttggccttcgacatgagatggagccctccttattccccatctggtccagttccttcacttacagatggcagcagtgaggtcttggggtagaaggaccctccaaagtcacacaaagtgcctgcctcctggtcccctcagctctctctctgc

SEQ ID NO: 283144 - protein, 317 aa, Artificial Sequence
  derived and/or modified sequence
MPQLNGGGGDDLGANDELISFKDEGEQEEKSSENSSAERDLADVKSSLVNESETNQNSSSDSEAERRPPPRSESFRDKSRESLEEAAKRQDGGLFKGPPYPGYPFIMIPDLTSPYLPNGSLSPTARTYLQMKWPLLDVQAGSLQSRQALKDARSPSPAHIVQSPLPCCTQGHDCQHFYPPSDFTVSTQVFRDMKRSHSLQKVGEPWCIESNKVPVVQHPHHVHPLTPLITYSNEHFTPGNPPPHLPADVDPKTGIPRPPHPPDISPYYPLSPGTVGQIPHPLGWLVPQQGQPVYPITTGGFRHPYPTALTVNASMSR

SEQ ID NO: 283145 - protein, 619 aa, Artificial Sequence
  derived and/or modified sequence
MPQLNGGGGDDLGANDELISFKDEGEQEEKSSENSSAERDLADVKSSLVNESETNQNSSSDSEAERRPPPRSESFRDKSRESLEEAAKRQDGGLFKGPPYPGYPFIMIPDLTSPYLPNGSLSPTARTLHFQSGSTHYSAYKTIEHQIAVQYLQMKWPLLDVQAGSLQSRQALKDARSPSPAHIVSNKVPVVQHPHHVHPLTPLITYSNEHFTPGNPPPHLPADVDPKTGIPRPPHPPDISPYYPLSPGTVGQIPHPLGWLVPQQGQPVYPITTGGFRHPYPTALTVNASMSRFPPHMVPPHHTLHTTGIPHPAIVTPTVKQESSQSDVGSLHSSKHQDSKKEEEKKKPHIKKPLNAFMLYMKEMRAKVVAECTLKESAAINQILGRRWHALSREEQAKYYELARKERQLHMQLYPGWSARDNYGKKKKRKRDKQPGETNEHSECFLNPCLSLPPITDLSAPKKCRARFGLDQQNNWCGPCRRKKKCVRYIQGEGSCLSPPSSDGSLLDSPPPSPNLLGSPPRDAKSQTEQTQPLSLSLKPDPLAHLSMMPPPPALLLAEATHKASALCPNGALDLPPAALQPAAPSSSIAQPSTSSLHSHSSLAGTQPQPLSLVTKSLE

SEQ ID NO: 283146 - protein, 494 aa, Artificial Sequence
  derived and/or modified sequence
MPQLNGGGGDDLGANDELISFKDEGEQEEKSSENSSAERDLADVKSSLVNESETNQNSSSDSEAERRPPPRSESFRDKSRESLEEAAKRQDGGLFKGPPYPGYPFIMIPDLTSPYLPNGSLSPTARTLHFQSGSTHYSAYKTIEHQIAVQYLQMKWPLLDVQAGSLQSRQALKDARSPSPAHIVSNKVPVVQHPHHVHPLTPLITYSNEHFTPGNPPPHLPADVDPKTGIPRPPHPPDISPYYPLSPGTVGQIPHPLGWLVPQQGQPVYPITTGGFRHPYPTALTVNASMSRFPPHMVPPHHTLHTTGIPHPAIVTPTVKQESSQSDVGSLHSSKHQDSKKEEEKKKPHIKKPLNAFMLYMKEMRAKVVAECTLKESAAINQILGRRWHALSREEQAKYYELARKERQLHMQLYPGWSARDNYGKKKKRKRDKQPGETNEHSECFLNPCLSLPPITDLSAPKKCRARFGLDQQNNWCGPCRCKYSKEVSGTVRA

SEQ ID NO: 283147 - protein, 619 aa, Artificial Sequence
  derived and/or modified sequence
MPQLNGGGGDDLGANDELISFKDEGEQEEKSSENSSAERDLADVKSSLVNESETNQNSSSDSEAERRPPPRSESFRDKSRESLEEAAKRQDGGLFKGPPYPGYPFIMIPDLTSPYLPNGSLSPTARTLHFQSGSTHYSAYKTIEHQIAVQYLQMKWPLLDVQAGSLQSRQALKDARSPSPAHIVSNKVPVVQHPHHVHPLTPLITYSNEHFTPGNPPPHLPADVDPKTGIPRPPHPPDISPYYPLSPGTVGQIPHPLGWLVPQQGQPVYPITTGGFRHPYPTALTVNASMSRFPPHMVPPHHTLHTTGIPHPAIVTPTVKQESSQSDVGSLHSSKHQDSKKEEEKKKPHIKKPLNAFMLYMKEMRAKVVAECTLKESAAINQILGRRWHALSREEQAKYYELARKERQLHMQLYPGWSARDNYGKKKKRKRDKQPGETNEHSECFLNPCLSLPPITDANTPKKCRALFGLDRQTLWCKPCRRKKKCVRYIQGEGSCLSPPSSDGSLLDSPPPSPNLLGSPPRDAKSQTEQTQPLSLSLKPDPLAHLSMMPPPPALLLAEATHKASALCPNGALDLPPAALQPAAPSSSIAQPSTSSLHSHSSLAGTQPQPLSLVTKSLE

SEQ ID NO: 283148 - DNA, 1860 bp, Artificial Sequence
  derived and/or modified sequence
atgccccagctgaacggcggcggcggcgacgacctgggcgccaacgacgagctgatcagcttcaaggacgagggcgagcaggaggagaagagcagcgagaacagcagcgccgagagagacctggccgacgtgaagagcagcctggtgaacgagagcgagaccaaccagaacagcagcagcgacagcgaggccgagagaagacccccccccagaagcgagagcttcagagacaagagcagagagagcctggaggaggccgccaagagacaggacggcggcctgttcaagggccccccctaccccggctaccccttcatcatgatccccgacctgaccagcccctacctgcccaacggcagcctgagccccaccgccagaaccctgcacttccagagcggcagcacccactacagcgcctacaagaccatcgagcaccagatcgccgtgcagtacctgcagatgaagtggcccctgctggacgtgcaggccggcagcctgcagagcagacaggccctgaaggacgccagaagccccagccccgcccacatcgtgagcaacaaggtgcccgtggtgcagcacccccaccacgtgcaccccctgacccccctgatcacctacagcaacgagcacttcacccccggcaacccccccccccacctgcccgccgacgtggaccccaagaccggcatccccagacccccccacccccccgacatcagcccctactaccccctgagccccggcaccgtgggccagatcccccaccccctgggctggctggtgccccagcagggccagcccgtgtaccccatcaccaccggcggcttcagacacccctaccccaccgccctgaccgtgaacgccagcatgagcagattccccccccacatggtgcccccccaccacaccctgcacaccaccggcatcccccaccccgccatcgtgacccccaccgtgaagcaggagagcagccagagcgacgtgggcagcctgcacagcagcaagcaccaggacagcaagaaggaggaggagaagaagaagccccacatcaagaagcccctgaacgccttcatgctgtacatgaaggagatgagagccaaggtggtggccgagtgcaccctgaaggagagcgccgccatcaaccagatcctgggcagaagatggcacgccctgagcagagaggagcaggccaagtactacgagctggccagaaaggagagacagctgcacatgcagctgtaccccggctggagcgccagagacaactacggcaagaagaagaagagaaagagagacaagcagcccggcgagaccaacgagcacagcgagtgcttcctgaacccctgcctgagcctgccccccatcaccgacctgagcgcccccaagaagtgcagagccagattcggcctggaccagcagaacaactggtgcggcccctgcagaagaaagaagaagtgcgtgagatacatccagggcgagggcagctgcctgagcccccccagcagcgacggcagcctgctggacagccccccccccagccccaacctgctgggcagcccccccagagacgccaagagccagaccgagcagacccagcccctgagcctgagcctgaagcccgaccccctggcccacctgagcatgatgccccccccccccgccctgctgctggccgaggccacccacaaggccagcgccctgtgccccaacggcgccctggacctgccccccgccgccctgcagcccgccgcccccagcagcagcatcgcccagcccagcaccagcagcctgcacagccacagcagcctggccggcacccagccccagcccctgagcctggtgaccaagagcctggagtag

SEQ ID NO: 283149 - DNA, 1485 bp, Artificial Sequence
  derived and/or modified sequence
atgccccagctgaacggcggcggcggcgacgacctgggcgccaacgacgagctgatcagcttcaaggacgagggcgagcaggaggagaagagcagcgagaacagcagcgccgagagagacctggccgacgtgaagagcagcctggtgaacgagagcgagaccaaccagaacagcagcagcgacagcgaggccgagagaagacccccccccagaagcgagagcttcagagacaagagcagagagagcctggaggaggccgccaagagacaggacggcggcctgttcaagggccccccctaccccggctaccccttcatcatgatccccgacctgaccagcccctacctgcccaacggcagcctgagccccaccgccagaaccctgcacttccagagcggcagcacccactacagcgcctacaagaccatcgagcaccagatcgccgtgcagtacctgcagatgaagtggcccctgctggacgtgcaggccggcagcctgcagagcagacaggccctgaaggacgccagaagccccagccccgcccacatcgtgagcaacaaggtgcccgtggtgcagcacccccaccacgtgcaccccctgacccccctgatcacctacagcaacgagcacttcacccccggcaacccccccccccacctgcccgccgacgtggaccccaagaccggcatccccagacccccccacccccccgacatcagcccctactaccccctgagccccggcaccgtgggccagatcccccaccccctgggctggctggtgccccagcagggccagcccgtgtaccccatcaccaccggcggcttcagacacccctaccccaccgccctgaccgtgaacgccagcatgagcagattccccccccacatggtgcccccccaccacaccctgcacaccaccggcatcccccaccccgccatcgtgacccccaccgtgaagcaggagagcagccagagcgacgtgggcagcctgcacagcagcaagcaccaggacagcaagaaggaggaggagaagaagaagccccacatcaagaagcccctgaacgccttcatgctgtacatgaaggagatgagagccaaggtggtggccgagtgcaccctgaaggagagcgccgccatcaaccagatcctgggcagaagatggcacgccctgagcagagaggagcaggccaagtactacgagctggccagaaaggagagacagctgcacatgcagctgtaccccggctggagcgccagagacaactacggcaagaagaagaagagaaagagagacaagcagcccggcgagaccaacgagcacagcgagtgcttcctgaacccctgcctgagcctgccccccatcaccgacctgagcgcccccaagaagtgcagagccagattcggcctggaccagcagaacaactggtgcggcccctgcagatgcaagtacagcaaggaggtgagcggcaccgtgagagcctag

SEQ ID NO: 283150 - DNA, 1809 bp, Artificial Sequence
  derived and/or modified sequence
atgccccagctgaacggcggcggcggcgacgacctgggcgccaacgacgagctgatcagcttcaaggacgagggcgagcaggaggagaagagcagcgagaacagcagcgccgagagagacctggccgacgtgaagagcagcctggtgaacgagagcgagaccaaccagaacagcagcagcgacagcgaggccgagagaagacccccccccagaagcgagagcttcagagacaagagcagagagagcctggaggaggccgccaagagacaggacggcggcctgttcaagggccccccctaccccggctaccccttcatcatgatccccgacctgaccagcccctacctgcccaacggcagcctgagccccaccgccagaaccctgcacttccagagcggcagcacccactacagcgcctacaagaccatcgagcaccagatcgccgtgcagtacctgcagatgaagtggcccctgctggacgtgcaggccggcagcctgcagagcagacaggccctgaaggacgccagaagccccagccccgcccacatcgtgagcaacaaggtgcccgtggtgcagcacccccaccacgtgcaccccctgacccccctgatcacctacagcaacgagcacttcacccccggcaacccccccccccacctgcccgccgacgtggaccccaagaccggcatccccagacccccccacccccccgacatcagcccctactaccccctgagccccggcaccgtgggccagatcccccaccccctgggctggctggtgccccagcagggccagcccgtgtaccccatcaccaccggcggcttcagacacccctaccccaccgccctgaccgtgaacgccagcatgagcagattccccccccacatggtgcccccccaccacaccctgcacaccaccggcatcccccaccccgccatcgtgacccccaccgtgaagcaggagagcagccagagcgacgtgggcagcctgcacagcagcaagcaccaggacagcaagaaggaggaggagaagaagaagccccacatcaagaagcccctgaacgccttcatgctgtacatgaaggagatgagagccaaggtggtggccgagtgcaccctgaaggagagcgccgccatcaaccagatcctgggcagaagatggcacgccctgagcagagaggagcaggccaagtactacgagctggccagaaaggagagacagctgcacatgcagctgtaccccggctggagcgccagagacaactacggcaagaagaagaagagaaagagagacaagcagcccggcgagaccaacgacctgagcgcccccaagaagtgcagagccagattcggcctggaccagcagaacaactggtgcggcccctgcagaagaaagaagaagtgcgtgagatacatccagggcgagggcagctgcctgagcccccccagcagcgacggcagcctgctggacagccccccccccagccccaacctgctgggcagcccccccagagacgccaagagccagaccgagcagacccagcccctgagcctgagcctgaagcccgaccccctggcccacctgagcatgatgccccccccccccgccctgctgctggccgaggccacccacaaggccagcgccctgtgccccaacggcgccctggacctgccccccgccgccctgcagcccgccgcccccagcagcagcatcgcccagcccagcaccagcagcctgcacagccacagcagcctggccggcacccagccccagcccctgagcctggtgaccaagagcctggagtag

SEQ ID NO: 283151 - DNA, 1860 bp, Artificial Sequence
  derived and/or modified sequence
atgccccagctgaacggcggcggcggcgacgacctgggcgccaacgacgagctgatcagcttcaaggacgagggcgagcaggaggagaagagcagcgagaacagcagcgccgagagagacctggccgacgtgaagagcagcctggtgaacgagagcgagaccaaccagaacagcagcagcgacagcgaggccgagagaagacccccccccagaagcgagagcttcagagacaagagcagagagagcctggaggaggccgccaagagacaggacggcggcctgttcaagggccccccctaccccggctaccccttcatcatgatccccgacctgaccagcccctacctgcccaacggcagcctgagccccaccgccagaaccctgcacttccagagcggcagcacccactacagcgcctacaagaccatcgagcaccagatcgccgtgcagtacctgcagatgaagtggcccctgctggacgtgcaggccggcagcctgcagagcagacaggccctgaaggacgccagaagccccagccccgcccacatcgtgagcaacaaggtgcccgtggtgcagcacccccaccacgtgcaccccctgacccccctgatcacctacagcaacgagcacttcacccccggcaacccccccccccacctgcccgccgacgtggaccccaagaccggcatccccagacccccccacccccccgacatcagcccctactaccccctgagccccggcaccgtgggccagatcccccaccccctgggctggctggtgccccagcagggccagcccgtgtaccccatcaccaccggcggcttcagacacccctaccccaccgccctgaccgtgaacgccagcatgagcagattccccccccacatggtgcccccccaccacaccctgcacaccaccggcatcccccaccccgccatcgtgacccccaccgtgaagcaggagagcagccagagcgacgtgggcagcctgcacagcagcaagcaccaggacagcaagaaggaggaggagaagaagaagccccacatcaagaagcccctgaacgccttcatgctgtacatgaaggagatgagagccaaggtggtggccgagtgcaccctgaaggagagcgccgccatcaaccagatcctgggcagaagatggcacgccctgagcagagaggagcaggccaagtactacgagctggccagaaaggagagacagctgcacatgcagctgtaccccggctggagcgccagagacaactacggcaagaagaagaagagaaagagagacaagcagcccggcgagaccaacgagcacagcgagtgcttcctgaacccctgcctgagcctgccccccatcaccgacgccaacacccccaagaagtgcagagccctgttcggcctggacagacagaccctgtggtgcaagccctgcagaagaaagaagaagtgcgtgagatacatccagggcgagggcagctgcctgagcccccccagcagcgacggcagcctgctggacagccccccccccagccccaacctgctgggcagcccccccagagacgccaagagccagaccgagcagacccagcccctgagcctgagcctgaagcccgaccccctggcccacctgagcatgatgccccccccccccgccctgctgctggccgaggccacccacaaggccagcgccctgtgccccaacggcgccctggacctgccccccgccgccctgcagcccgccgcccccagcagcagcatcgcccagcccagcaccagcagcctgcacagccacagcagcctggccggcacccagccccagcccctgagcctggtgaccaagagcctggagtag

SEQ ID NO: 283152 - DNA, 1860 bp, Artificial Sequence
  derived and/or modified sequence
atgccacaattgaacggcgggggcggcgacgatctgggggccaatgacgagctgataagttttaaggacgaaggcgagcaagaggagaaatccagcgagaactcatcagccgaacgcgatcttgccgatgtgaagtcctcacttgtgaatgagtcagagactaatcaaaacagcagctccgacagtgaagcagaacggcgccctccaccgagatccgagagctttcgggataagagccgggaatccttagaggaggcagctaaacggcaggatggcggtctcttcaagggacctccttaccctggctaccccttcatcatgatcccagacctgacatctccatacttgcccaatggcagcctgagccctacggctcgtacattgcactttcagagcggatctacccactacagcgcctacaagacaatcgaacatcagatagcggtccaatacttgcagatgaagtggccgctgctcgacgtccaggcaggtagtttgcagtctaggcaggccttgaaggatgcccgcagcccttccccagcccacattgttagcaacaaagtgccagtcgtccagcacccgcatcacgtccaccctcttactcctctcattacatatagtaacgagcacttcacaccgggcaacccgcctccacatcttccagccgatgtggatcccaaaacagggattcccagacccccccatccacctgatatatctccctactatccattgtctcctgggactgtgggccagatcccccaccctcttggttggttggtcccccagcagggtcagccagtttatcctatcacgacgggcggctttagacacccctatcctactgcactcacagtgaatgcctcaatgagccgtttccctccccacatggtgcctccacatcacaccctgcacacaaccgggatcccccaccccgccatcgtgacccctacggtaaagcaggaatctagccagtccgacgtcggctcccttcatagcagcaagcaccaagattcgaaaaaggaggaagagaaaaagaagccccatatcaagaagccattgaacgctttcatgctgtacatgaaagagatgagggccaaggtcgttgcagaatgtaccctcaaagagtctgcagccataaaccaaatccttgggcgccggtggcacgccctaagcagagaggaacaggctaagtattacgagctggcgaggaaggagagacaattgcacatgcaattatatcctgggtggtctgctagggacaactacggtaagaagaagaaacggaaaagagacaagcagcctggtgagaccaacgagcactcagagtgtttcttgaacccttgcctctcattgccacctataacggatctgagcgctcctaagaagtgtcgagccaggttcggcctggaccaacagaataactggtgtggcccctgtagaaggaagaagaaatgcgtgcgttacatccagggggagggctcttgtctgtctcccccctctagcgatggtagtctgttagattcccctccacctagtcccaaccttctggggtctcccccgcgcgacgccaagtcccagaccgaacagacccaacccttaagcctttcacttaaaccagaccctctggctcatctatcaatgatgccaccccccccagccctgctgctagccgaggcgacccacaaagcctcagccctttgcccaaacggggccctagatcttccccccgcagccctgcagcctgccgcacccagttcatcaattgctcagccctctactagcagtctgcactcccatagttcactagccgggacccagccccagcctctctcccttgttacaaaaagtctggagtag

SEQ ID NO: 283153 - DNA, 1485 bp, Artificial Sequence
  derived and/or modified sequence
atgcctcagctgaatggtggggggggcgatgatctgggagccaacgatgaactcatcagcttcaaggatgaaggagagcaagaagagaaatccagtgagaattcatcagcggagcgagacctggccgacgtgaagtcatcccttgtgaacgagtctgaaactaatcaaaacagtagttccgattccgaagcggagcgccgaccaccacccaggtccgaatcatttcgtgataagtctcgagagagtctggaggaggcagccaaacggcaggacggggggctgttcaaggggccgccatacccagggtatccatttattatgatacctgatctgaccagtccatatctccccaatggtagcctgtctcctacggcacgcaccttgcatttccagtctggctctacacattattccgcatataagacaatagagcaccagattgccgtgcagtacctgcagatgaagtggccccttctagacgtccaagccggctctcttcagtcaaggcaggcacttaaggacgcccggagtccgagcccggctcatattgtctcaaataaggtgccagtggtccagcacccgcaccacgtccatcccctaacaccacttattacttattcaaacgagcattttacccctggaaacccgccaccccacttgcccgctgacgtcgaccctaaaacagggatccctcgtcccccacacccacccgatatctctccctactacccgttgagtcccgggaccgtggggcagatacctcatcctctcggttggctggtccctcaacaaggacagcctgtgtatcccataacaaccggggggtttaggcacccttaccctaccgccttgacagtgaatgcatcaatgagccgattccccccccatatggttcctccccaccacactctccatacaacagggatccctcatcctgctattgtgacccctaccgtgaaacaggaaagctctcaatctgacgtcggatcactgcattccagtaagcaccaggatagcaaaaaggaagaagaaaagaaaaaacctcatatcaagaaaccgctcaacgccttcatgttgtatatgaaggagatgcgtgctaaagtcgtggctgagtgcactctgaaggaatcggcagcaattaaccaaattttgggccggaggtggcacgccttgtcacgcgaggaacaagccaaatactatgagctcgcccggaaagagaggcagctacacatgcaactgtatccgggatggagcgcgcgtgataactacggaaaaaagaagaagaggaagagagacaaacagcccggcgagactaacgaacactcagagtgcttcctgaatccctgtcttagcttgccccctataacagatttaagcgcaccaaaaaagtgcagggcccggtttggactggatcagcaaaataactggtgcggaccctgccgctgtaagtactcaaaagaagtgagtgggacagtgcgagcctag

SEQ ID NO: 283154 - DNA, 1809 bp, Artificial Sequence
  derived and/or modified sequence
atgccccagctgaatgggggtggcggagatgatctcggtgccaacgacgaactaatctcctttaaagacgagggcgagcaggaggaaaaatcgtccgagaattcatccgcagagcgggatcttgctgacgtgaagtccagcctagtcaacgagtccgagactaatcaaaactcatcctccgactctgaggcagagcggagacccccgcctagatccgagtcctttagagataaatcccgcgaatcactggaggaggctgccaaaagacaggacggcggactgttcaaaggtcccccatacccgggctatcccttcattatgatccccgacttaacctcgccttacctaccgaacggatcactgagcccaacagctcgcacactccactttcagtctgggtcaacacactatagcgcttacaagactatcgaacaccagattgctgttcaatatttgcagatgaagtggccccttctggacgtccaagccgggagcctgcagtctcgccaggccctgaaagacgctaggtctccttctcctgcccacattgtgagcaataaggtgcctgtggttcagcatccacaccacgtccaccctttaacccctctcatcacgtatagtaacgagcatttcactcctggaaatccgcctcctcatcttcctgcagacgtagaccccaagactggcatcccccggccaccccaccctcctgacatttcaccgtactatcccctgtccccaggcaccgtgggtcaaattccgcaccccctcggttggctcgttcctcagcagggccagccggtttatccaatcacgacaggaggttttcggcatccttaccccactgccctgacggttaacgcctctatgagtaggttcccaccgcatatggttccaccgcaccacacactgcacactaccgggattcctcatccggcaatagttactcctactgtgaagcaggagagttctcagagcgatgttggcagccttcattcaagtaaacaccaagactcaaagaaagaggaggagaaaaaaaaacctcacatcaaaaagccactcaacgccttcatgctctacatgaaggaaatgcgcgccaaggtcgtcgcagagtgcacgctgaaggaatcagccgccatcaaccaaatccttggcagacgctggcacgccctgagccgtgaggaacaggccaagtactatgagctggccagaaaggaaaggcaactgcatatgcaactctatccaggttggagtgcccgtgacaattacggtaagaagaagaagaggaagagggataaacagcccggagagacgaatgatctcagtgccccaaagaagtgtcgcgcacgcttcggcctggatcagcagaataattggtgcggaccctgtaggaggaaaaaaaaatgtgtgagatacatccagggggaaggatcctgtctcagtcctcccagctctgacggctccctgcttgatagccctccaccatcacctaacttgctcggtagccctccccgggacgcaaagtcgcaaaccgagcagacacaaccactgtccctgagcctgaaaccggatcccctggcccacctatcaatgatgccacctccccctgccctattgctggctgaagctactcataaagcatctgctttatgtccgaacggcgcgctggacctacccccagctgccttgcagcccgccgccccctcgtcttctatcgctcagccatccaccagtagcctgcatagccactcatcactggcgggaacacagcctcagcccctgagtctggtcacaaaatctctggaatag

SEQ ID NO: 283155 - DNA, 1860 bp, Artificial Sequence
  derived and/or modified sequence
atgcctcaattgaacggcggagggggagatgacttgggcgcaaatgacgaactaatttcttttaaggatgagggagagcaagaagaaaagtcctccgagaacagtagcgccgagcgtgatttggctgatgtgaagtcctcacttgtgaatgagagcgaaactaatcagaacagttcttcagacagtgaagccgagcggcggcctcctccacggagtgaatcctttcgcgacaagtctagagaatcactggaagaagctgctaagcggcaagatggtgggcttttcaaaggacctccttatcccggatatccttttataatgatcccagacctaacctccccatacctcccaaacgggagcctgagccctactgctagaacactgcatttccagtcaggcagcactcactattctgcgtacaagacaatcgagcaccaaatcgcagtgcaatacttgcaaatgaagtggccactgctagacgtccaggccgggtcactgcaaagtagacaggcactgaaggatgcacgctcacccagtcccgcacatatcgtgagtaataaggtgcccgtggttcaacatccacatcatgtgcaccccctgaccccacttattacctactctaatgagcacttcacaccaggcaacccgcctccccacttgcctgctgatgtggatccaaaaaccggcatcccacgcccgccccacccacctgatattagcccttactatcctcttagtcccggaactgtaggccagattccacacccactgggatggctcgtcccacagcaagggcagccagtctaccccatcactaccggtgggttccgacatccctatcctaccgctctcaccgtgaatgcctctatgtctagatttcctccccatatggttccccctcatcacaccctgcatacgaccgggatcccgcacccagccatcgttacgcccacggtgaagcaagaaagctcccagtccgacgtcggctcgctgcacagctccaagcaccaggattccaagaaggaagaggaaaagaaaaagcctcatattaagaagccgctgaacgcttttatgctgtatatgaaagagatgcgggccaaggtggtggcggaatgcaccctgaaggaaagtgctgcaattaatcagatactcggacgcagatggcatgccttatcgagggaggaacaggccaagtattacgaattagcccgcaaagagagacagttgcacatgcagctgtatcctggctggagcgctagggataactacggcaagaagaaaaagcggaagagggacaagcagcccggcgaaaccaacgagcattcagagtgttttctgaacccgtgtctgtcacttccgccaatcaccgacgctaatacccctaaaaagtgtagggccttgttcgggctagatagacagactctttggtgcaaaccctgtaggcgtaagaaaaagtgtgtccggtacatccaaggggagggctcctgcctgagccccccctccagtgacgggtcacttctggactcaccccctccgagcccaaacctgctgggctctcctcccagagacgcaaaaagtcagaccgagcaaactcaacccctttccctctctctgaagcccgaccccttggcccatctgtccatgatgccgccccctcccgcactattgttagccgaggctacccacaaggcatccgccttgtgccctaacggcgccctcgacctgcccccagcggccttgcaacctgctgcaccttccagctccattgcccaaccgtctacttcgtctctccactctcatagtagcctcgcagggacccagcctcaacctctatcccttgtcacaaaatcactggaatag

SEQ ID NO: 283156 - DNA, 1860 bp, Artificial Sequence
  derived and/or modified sequence
atgccccagctgaatggaggcggcggagatgacctgggcgccaatgatgagctgatctccttcaaggatgaaggagagcaggaggagaagagcagcgagaacagcagcgctgagcgggacctggctgatgtgaagagcagcctggtgaatgaaagtgagaccaaccagaacagcagcagtgacagcgaggccgagcggcggcccccacccaggtctgagagcttccgggacaagagccgggagagcctggaggaggccgccaagaggcaggacggcggcctcttcaagggccccccctacccaggctaccccttcatcatgatcccagacctgaccagcccctacctgcccaacggcagcctgagccccacagcccggaccctgcacttccagagcggcagcacccactacagcgcctacaagaccatcgagcaccagattgctgtgcagtacctgcagatgaagtggcccctgctggatgtgcaggccggcagcctgcagagccggcaggccctgaaggatgcccggagccccagccctgcccacatcgtgagcaacaaggtgcctgtggtgcagcacccccaccacgtgcaccccctgacccccctcatcacctacagcaatgagcacttcaccccaggcaaccccccaccccacctgcctgcagatgtggaccccaagacaggcatccccaggcctccccaccccccagacatcagcccctactaccccctgagccctggcaccgtgggccagatcccccaccccctgggctggctggtgccccagcagggccagcctgtgtaccccatcaccactggaggcttccgccacccctaccccacagccctgactgtgaatgcctccatgagccgcttccccccccacatggtgcccccccaccacaccctgcacaccaccggcatcccccacccagccatcgtgacccccaccgtgaagcaggagagcagccagagtgatgtgggcagcctgcacagcagcaagcaccaggacagcaagaaggaggaggagaagaagaagccccacatcaagaagcccctgaatgccttcatgctgtacatgaaggagatgagggccaaggtggtggctgaatgtaccctgaaggagagcgctgccatcaaccagatcctgggccgccgctggcacgccctgagccgggaggagcaggccaagtactatgagctggccaggaaggagcggcagctgcacatgcagctgtacccaggctggagcgcccgggacaactacggcaagaagaagaagaggaagagggacaagcagcctggagagaccaatgagcacagcgagtgcttcctgaacccctgcctgagcctgccccccatcacagacctgagcgcccccaagaagtgccgggcccgcttcggcctggaccagcagaacaactggtgtggcccctgcaggaggaagaagaagtgtgtgcgctacatccagggcgagggcagctgcctgagcccccccagcagtgatggcagcctgctggacagccccccacccagccccaacctgctgggcagccccccaagagatgccaagagccagacagagcagacccagcccctgagcctgagcctgaagccagaccccctggcccacctgtccatgatgcctcctcctccagccctgctgctggccgaggccacccacaaggccagcgccctgtgccccaacggggccctggacctgcccccagctgccctgcagcctgctgcccccagcagcagcatcgcccagcccagcaccagcagcctgcacagccacagcagcctggccggcacccagccccagcccctgagcctggtgaccaagagcctggagtag

SEQ ID NO: 283157 - DNA, 1485 bp, Artificial Sequence
  derived and/or modified sequence
atgccccagctgaatggaggcggcggagatgacctgggcgccaatgatgagctgatctccttcaaggatgaaggagagcaggaggagaagagcagcgagaacagcagcgctgagcgggacctggctgatgtgaagagcagcctggtgaatgaaagtgagaccaaccagaacagcagcagtgacagcgaggccgagcggcggcccccacccaggtctgagagcttccgggacaagagccgggagagcctggaggaggccgccaagaggcaggacggcggcctcttcaagggccccccctacccaggctaccccttcatcatgatcccagacctgaccagcccctacctgcccaacggcagcctgagccccacagcccggaccctgcacttccagagcggcagcacccactacagcgcctacaagaccatcgagcaccagattgctgtgcagtacctgcagatgaagtggcccctgctggatgtgcaggccggcagcctgcagagccggcaggccctgaaggatgcccggagccccagccctgcccacatcgtgagcaacaaggtgcctgtggtgcagcacccccaccacgtgcaccccctgacccccctcatcacctacagcaatgagcacttcaccccaggcaaccccccaccccacctgcctgcagatgtggaccccaagacaggcatccccaggcctccccaccccccagacatcagcccctactaccccctgagccctggcaccgtgggccagatcccccaccccctgggctggctggtgccccagcagggccagcctgtgtaccccatcaccactggaggcttccgccacccctaccccacagccctgactgtgaatgcctccatgagccgcttccccccccacatggtgcccccccaccacaccctgcacaccaccggcatcccccacccagccatcgtgacccccaccgtgaagcaggagagcagccagagtgatgtgggcagcctgcacagcagcaagcaccaggacagcaagaaggaggaggagaagaagaagccccacatcaagaagcccctgaatgccttcatgctgtacatgaaggagatgagggccaaggtggtggctgaatgtaccctgaaggagagcgctgccatcaaccagatcctgggccgccgctggcacgccctgagccgggaggagcaggccaagtactatgagctggccaggaaggagcggcagctgcacatgcagctgtacccaggctggagcgcccgggacaactacggcaagaagaagaagaggaagagggacaagcagcctggagagaccaatgagcacagcgagtgcttcctgaacccctgcctgagcctgccccccatcacagacctgagcgcccccaagaagtgccgggcccgcttcggcctggaccagcagaacaactggtgtggcccctgccgctgcaagtacagcaaggaggtgtctggaacagtgcgggcctag

SEQ ID NO: 283158 - DNA, 1809 bp, Artificial Sequence
  derived and/or modified sequence
atgccccagctgaatggaggcggcggagatgacctgggcgccaatgatgagctgatctccttcaaggatgaaggagagcaggaggagaagagcagcgagaacagcagcgctgagcgggacctggctgatgtgaagagcagcctggtgaatgaaagtgagaccaaccagaacagcagcagtgacagcgaggccgagcggcggcccccacccaggtctgagagcttccgggacaagagccgggagagcctggaggaggccgccaagaggcaggacggcggcctcttcaagggccccccctacccaggctaccccttcatcatgatcccagacctgaccagcccctacctgcccaacggcagcctgagccccacagcccggaccctgcacttccagagcggcagcacccactacagcgcctacaagaccatcgagcaccagattgctgtgcagtacctgcagatgaagtggcccctgctggatgtgcaggccggcagcctgcagagccggcaggccctgaaggatgcccggagccccagccctgcccacatcgtgagcaacaaggtgcctgtggtgcagcacccccaccacgtgcaccccctgacccccctcatcacctacagcaatgagcacttcaccccaggcaaccccccaccccacctgcctgcagatgtggaccccaagacaggcatccccaggcctccccaccccccagacatcagcccctactaccccctgagccctggcaccgtgggccagatcccccaccccctgggctggctggtgccccagcagggccagcctgtgtaccccatcaccactggaggcttccgccacccctaccccacagccctgactgtgaatgcctccatgagccgcttccccccccacatggtgcccccccaccacaccctgcacaccaccggcatcccccacccagccatcgtgacccccaccgtgaagcaggagagcagccagagtgatgtgggcagcctgcacagcagcaagcaccaggacagcaagaaggaggaggagaagaagaagccccacatcaagaagcccctgaatgccttcatgctgtacatgaaggagatgagggccaaggtggtggctgaatgtaccctgaaggagagcgctgccatcaaccagatcctgggccgccgctggcacgccctgagccgggaggagcaggccaagtactatgagctggccaggaaggagcggcagctgcacatgcagctgtacccaggctggagcgcccgggacaactacggcaagaagaagaagaggaagagggacaagcagcctggagagaccaatgacctgagcgcccccaagaagtgccgggccaggtttggcctggaccagcagaacaactggtgtggcccctgcaggaggaagaagaagtgtgtgcgctacatccagggcgagggcagctgcctgagcccccccagcagtgatggcagcctgctggacagccccccacccagccccaacctgctgggcagccccccaagagatgccaagagccagacagagcagacccagcccctgagcctgagcctgaagccagaccccctggcccacctgtccatgatgcctcctcctccagccctgctgctggccgaggccacccacaaggccagcgccctgtgccccaatggagccctggacctgcccccagctgccctgcagcctgctgcccccagcagcagcatcgcccagcccagcaccagcagcctgcacagccacagcagcctggccggcacccagccccagcccctgagcctggtgaccaagagcctggagtag

SEQ ID NO: 283159 - DNA, 1860 bp, Artificial Sequence
  derived and/or modified sequence
atgccccagctgaatggaggcggcggagatgacctgggcgccaatgatgagctgatctccttcaaggatgaaggagagcaggaggagaagagcagcgagaacagcagcgctgagcgggacctggctgatgtgaagagcagcctggtgaatgaaagtgagaccaaccagaacagcagcagtgacagcgaggccgagcggcggcccccacccaggtctgagagcttccgggacaagagccgggagagcctggaggaggccgccaagaggcaggacggcggcctcttcaagggccccccctacccaggctaccccttcatcatgatcccagacctgaccagcccctacctgcccaacggcagcctgagccccacagcccggaccctgcacttccagagcggcagcacccactacagcgcctacaagaccatcgagcaccagattgctgtgcagtacctgcagatgaagtggcccctgctggatgtgcaggccggcagcctgcagagccggcaggccctgaaggatgcccggagccccagccctgcccacatcgtgagcaacaaggtgcctgtggtgcagcacccccaccacgtgcaccccctgacccccctcatcacctacagcaatgagcacttcaccccaggcaaccccccaccccacctgcctgcagatgtggaccccaagacaggcatccccaggcctccccaccccccagacatcagcccctactaccccctgagccctggcaccgtgggccagatcccccaccccctgggctggctggtgccccagcagggccagcctgtgtaccccatcaccactggaggcttccgccacccctaccccacagccctgactgtgaatgcctccatgagccgcttccccccccacatggtgcccccccaccacaccctgcacaccaccggcatcccccacccagccatcgtgacccccaccgtgaagcaggagagcagccagagtgatgtgggcagcctgcacagcagcaagcaccaggacagcaagaaggaggaggagaagaagaagccccacatcaagaagcccctgaatgccttcatgctgtacatgaaggagatgagggccaaggtggtggctgaatgtaccctgaaggagagcgctgccatcaaccagatcctgggccgccgctggcacgccctgagccgggaggagcaggccaagtactatgagctggccaggaaggagcggcagctgcacatgcagctgtacccaggctggagcgcccgggacaactacggcaagaagaagaagaggaagagggacaagcagcctggagagaccaatgagcacagcgagtgcttcctgaacccctgcctgagcctgccccccatcacagatgccaacacccccaagaagtgccgggccctgtttggcctggaccggcagaccctgtggtgcaagccctgcaggaggaagaagaagtgtgtgcgctacatccagggcgagggcagctgcctgagcccccccagcagtgatggcagcctgctggacagccccccacccagccccaacctgctgggcagccccccaagagatgccaagagccagacagagcagacccagcccctgagcctgagcctgaagccagaccccctggcccacctgtccatgatgcctcctcctccagccctgctgctggccgaggccacccacaaggccagcgccctgtgccccaacggggccctggacctgcccccagctgccctgcagcctgctgcccccagcagcagcatcgcccagcccagcaccagcagcctgcacagccacagcagcctggccggcacccagccccagcccctgagcctggtgaccaagagcctggagtag

SEQ ID NO: 283160 - DNA, 1860 bp, Artificial Sequence
  derived and/or modified sequence
atgccccagctgaacggcggcggcggcgacgacctgggcgccaacgatgagctaatctccttcaaggatgagggtgaacaagaggagaaatcatccgagaactccagtgccgagagagacctggccgatgtcaaatcatcactggtgaacgagtccgagaccaaccaaaactcctcatcagatagtgaggctgaacggcgccctcctcctcggagcgaaagtttccgggataaatcaagagagtcactagaagaagccgcgaaaaggcaggatgggggactgttcaagggtcccccgtatcctgggtatccatttattatgatccccgatctgaccagcccgtatttaccaaacgggtctctctcacccacagccagaacactccatttccagtccgggtctactcactactcagcttataagacgatcgagcatcagatcgccgtccagtatctgcagatgaagtggcccctgttagatgtccaggccggatctctacagagccgacaggcactcaaggacgctcggtccccatctccagcacacatcgttagcaataaggttccggtagtccagcacccacatcatgtgcatcctctgacccccctgatcacttattcaaatgaacattttactccaggcaacccacctcctcatctcccagccgacgtggatccaaagaccggaatccccagacccccacatccacctgatatatctccctattaccctctgagtcccggcactgtaggtcagatcccccatcccctggggtggttagtcccccagcagggacagcccgtgtatcctataacaaccgggggctttcggcatccttacccgactgccttaaccgtgaacgccagtatgtccagatttccaccgcatatggtcccaccgcaccacacactgcacacgacaggcattccacaccccgctattgtgaccccaactgtgaagcaggaaagtagccagagcgatgtggggagtctccatagctcaaaacaccaggatagcaaaaaggaggaagagaagaaaaagccgcatatcaagaagccactcaatgcattcatgctatacatgaaggagatgagagccaaagtggttgcagagtgtacattgaaagagtccgccgccataaaccagatcctgggacggcgctggcacgccctatctagggaagagcaggccaagtattatgagctcgcgcgcaaagaaagacaattacacatgcaactttaccctggatggtccgcgagagacaattatggtaagaagaaaaagcgaaagcgcgataagcaacctggagagacgaacgagcattccgaatgctttctgaatccctgtctgtcgctgcccccaataacagacctaagtgcacctaagaaatgtcgagctcgattcggcttggaccagcagaataactggtgcggcccttgtaggcgcaagaaaaaatgtgttaggtacatacagggcgagggctcttgtctatcgccaccatccagcgacggatccctgctagactccccaccgccctctcctaacctcctgggctctcccccccgtgatgcaaagtcccagactgaacagacccagcccctgagtctgtcccttaagcctgaccctctcgcccatttgagtatgatgcccccgccccctgcattgctgcttgcagaggcgactcacaaggcttccgctctttgtccaaatggggctctcgacctcccccctgctgcccttcagccagccgcgccgagctcttccatcgctcagccaagcacctcctctctgcacagccacagttccttggccgggactcaaccccaacctctgtccctggtcacaaagtccctcgagtag

SEQ ID NO: 283161 - DNA, 1485 bp, Artificial Sequence
  derived and/or modified sequence
atgccccagctgaacggcggcggcggcgacgacctgggcgccaacgacgagctcatatcctttaaggacgagggagaacaagaggaaaaaagctcagaaaatagctccgcagagagggacctcgctgatgtgaagtcatctctcgttaacgagagtgaaacgaaccaaaattcatcaagtgactcagaggccgaaaggcgacccccgccacgctccgaaagcttcagggacaagagtagggagtccctcgaggaagctgcaaagcggcaagacggagggctgtttaaaggaccgccttatcccggctatccctttatcatgattccagacctaacaagtccctatctacccaacggctccctcagcccaacggcccgcaccctgcatttccaatccggctctacccattactccgcttataaaaccatagagcaccagatcgcagtccaatatcttcagatgaagtggcccctgctggatgtacaagccggcagtctgcaaagccgacaagcacttaaggacgcccggtctccttccccggcccatatcgtgtcaaacaaggtcccagtggtgcagcatccccaccatgtgcatcccctgacgcctctgatcacgtattcaaatgaacattttacgccaggtaaccctccaccacacctccctgcagacgtcgaccccaaaacgggaatacctcggcctccccatcctccagatatcagtccttactatcccctgtcacctggaaccgtgggccagatcccgcatcccttgggctggctggttcctcagcaaggacagccggtctaccctatcacgactggtgggttcaggcatccataccctactgccttgacagtaaacgcctcaatgagcagattccccccacacatggtgcccccacaccacacattgcatacaacgggaattccccaccccgccatcgtcactcccacagtcaagcaggagtccagtcaatccgatgtaggatcgctccattcctcgaaacatcaagattcaaaaaaggaggaggagaaaaaaaaaccacatataaaaaaaccattaaacgctttcatgctgtatatgaaagaaatgagagctaaggtcgtggctgaatgtacactaaaagaaagcgctgctatcaatcagatactcggccggaggtggcacgccctgtccagagaagaacaggcgaagtactacgagctggccagaaaggaacgacagctgcacatgcagctgtaccccggatggagcgcacgggacaactacggaaaaaagaaaaagagaaagagggataagcaacccggcgagaccaacgaacactcagagtgcttcctcaacccttgcttatccctcccaccgatcacggatctgagcgctcctaaaaagtgtcgggcccggtttggcctagatcagcagaacaattggtgcggcccctgccgctgcaagtactctaaagaggtgtctggaaccgttcgggcctag

SEQ ID NO: 283162 - DNA, 1809 bp, Artificial Sequence
  derived and/or modified sequence
atgccccagctgaacggcggcggcggcgacgacctgggcgccaacgacgagctgatcagctttaaagatgagggagagcaggaagagaaatcttcggaaaacagttcagctgaacgtgatcttgctgatgtcaagagcagcctcgtaaacgagagcgagaccaaccagaattcttcttctgattcagaggcggagcgccgtcccccccctcgttcagaaagctttagggacaaatctcgcgagtccctggaagaagccgcaaagaggcaggatggtggcttgttcaaaggaccgccctacccggggtatccgtttataatgatcccagatctgacctctccataccttcctaacggatcactgtcaccaaccgccaggacactacatttccagagcggatccacccactatagcgcctataaaacaatcgagcaccagattgccgtgcagtacctgcaaatgaagtggcccttactcgatgttcaggcagggtccctccagtcacgccaagcccttaaggatgccaggtcacccagccctgcacatattgtcagcaacaaagtgccggttgtgcaacacccccaccacgttcaccccctgactccacttattacctatagcaatgagcattttacccccggtaaccctccaccccatttgcccgccgacgtggaccccaagaccgggatacctcgccccccgcaccctccagacatttctccttactaccccctctcgccagggaccgtgggccagattccacaccctctggggtggctggtcccccagcagggccaaccagtgtacccaatcacgacaggcggctttcgacatccctacccgacggcactgactgtaaacgcttctatgagtcggttcccccctcacatggttcctccccatcacactctccacacaaccggcatccctcatccagcaattgtgactccaaccgtaaaacaggagagctcccagagtgatgtgggtagtctgcattcctccaagcaccaggacagcaaaaaggaagaagaaaaaaagaaaccccacattaaaaaaccattaaacgcgttcatgctatacatgaaagaaatgcgcgcaaaggtggtggccgaatgtaccttaaaagagtctgccgctattaaccagattctggggagacgctggcatgcactttctcgagaagagcaggccaagtattatgaactggccagaaaggaacgacaactgcatatgcagttatatcccggatggtctgccagagataactatggtaagaagaagaaacggaagcgggataagcaaccgggtgaaaccaacgaccttagtgcacccaagaaatgcagggctagattcggcttggaccaacagaataattggtgtggcccctgcagaaggaagaagaagtgtgtgaggtatatccagggggagggtagttgcctatcaccgccatcctccgatggaagcttgctagatagtcctcctccttcacccaaccttctcggcagtcccccaagagatgccaagtcacagactgagcagacacagccgttgagcctctctctgaaacccgatccactggcccacttatcaatgatgccccccccccccgccctcctacttgccgaggccacacataaggctagtgccctctgcccgaatggagctctcgatttgccgccagccgccctccagcctgcagcgccgagttcatccatcgcgcagccaagcacctcgtctctacattcgcattcctccctcgccggaacgcagcctcaaccactgagccttgtgactaaaagcctggaatag

SEQ ID NO: 283163 - DNA, 1860 bp, Artificial Sequence
  derived and/or modified sequence
atgccccagctgaacggcggcggcggcgacgacctgggcgccaacgatgaactgattagtttcaaggatgaaggcgaacaggaagaaaaatcttccgaaaacagctccgcagagagggacttggccgacgtcaaatcaagtctggtgaatgaatccgaaacaaaccagaatagttctagcgactctgaggctgagagaaggccaccaccgcgatcggagtcttttcgggacaaaagtagagaatcactagaagaagctgccaagagacaggacggcggcctcttcaagggcccaccttaccctggctaccctttcatcatgattcccgatttaacaagcccgtacctgcctaacggttccctgtcccccaccgctaggacgctccacttccagtctgggagtacccactatagtgcgtataaaacaattgaacaccaaattgcggttcagtacctgcagatgaaatggcctcttctcgacgtccaggccggtagcctccagtccaggcaggcactcaaagacgcacggagcccaagccccgctcatatcgtaagtaacaaagtgccggtggttcaacacccgcaccacgtgcacccgttaacccctttgattacatattctaatgaacatttcacgcctggaaacccgcctccgcatcttccagccgatgtagatcccaagaccgggattccccgcccgcctcaccctccagacattagcccttattatcccttaagtcctggcaccgttggacagattcctcacccgttgggatggttggtgccacagcagggccaaccagtttaccctataaccacagggggcttcagacatccatacccgaccgcactcactgtgaacgcgtctatgagcagatttccacctcatatggttcccccacaccacacactgcacacaacaggaattccacatccagccatagtcacccccacagtaaagcaggagagcagccaatcagatgtggggagtctccactccagtaagcatcaggactcaaaaaaggaagaagaaaagaaaaaacctcatataaagaagccactgaatgcatttatgttgtatatgaaagagatgcgcgcaaaggtggttgctgagtgtacgcttaaagaaagcgccgctattaatcagatcttaggacgccggtggcacgccctgagtcgcgaagaacaagccaaatactacgaattggctcgcaaagagcggcagctccatatgcagctttatccagggtggtccgcacgagacaactacgggaaaaagaagaaaagaaagcgcgacaagcagccaggggagactaatgaacattctgagtgttttctcaacccgtgcctgtcccttcctccaatcactgatgctaacacgcccaagaagtgtcgagctctgttcggcttagaccggcagactttatggtgcaagccatgccgccgcaaaaagaagtgtgtgcggtatatccagggtgaaggatcatgtctgagccccccatcctctgacgggtccctattagactctccccccccttcacctaatttgttgggctccccgcctcgtgatgccaagagccaaacagaacagactcagcccctgagcttgtctcttaaaccggaccctctggcccacttgtccatgatgccacctccaccagctttgctgcttgctgaggctactcataaggccagcgcactgtgtcctaacggggcgctcgacttgccccctgcagctctccagccggccgctccaagctcgtctatagcacaaccgtcaacatcgagcctccactctcactccagccttgccggaacccagccacagccgctctctctggtcacgaaatcactcgagtag

SEQ ID NO: 283164 - DNA, 1860 bp, Artificial Sequence
  derived and/or modified sequence
atgcctcaactcaatggtgggggtggggacgacctcggggctaatgacgagttgatttcttttaaggatgagggcgagcaagaagagaaaagctctgagaactcgtctgcagagagggaccttgccgatgttaaatcctctttggtgaatgaaagcgaaactaatcagaatagttcctcagactcagaggctgagcggcgtccgccacccagaagtgaaagttttagagataaatctcgcgagtcactagaggaggccgcaaagcgacaagacggtggcctttttaagggccctccctatcctggatacccctttatcatgattccagatctgacatccccttacctgccgaacggctcactcagtcccacagcacgaacactacacttccaatctgggtccactcactactctgcgtataagactattgaacaccagatagcagtgcaatacctgcagatgaagtggcctctgttggatgtgcaggctgggagcctccagtcccggcaggccctgaaggacgctcgctccccctcaccggctcacatagttagcaataaagtgcctgtggtccagcatccacatcatgtacacccactcactccactcattacgtattcaaacgaacactttacccctggcaatccacctccacatttacccgcagatgtggatccaaagactgggatccctaggcctccgcacccaccagatatctccccctactaccctctctcacctggtaccgtaggacaaatacctcatcccctcgggtggctggtgcctcagcaaggtcagcctgtctacccaatcaccaccgggggattccgccatccataccctaccgccctaactgtgaacgcctccatgtctaggttcccccctcacatggtccctccgcatcatactttgcatacgaccggaatcccccaccccgctatcgtgaccccaaccgtgaagcaagagtcctcccagagcgatgttgggtctctgcacagctctaagcaccaggatagcaagaaggaagaggaaaaaaagaaacctcacatcaagaaaccactgaatgcatttatgctgtacatgaaggaaatgagggctaaggtagttgctgaatgtaccctgaaagaaagcgcggcaataaaccaaattctcgggcgaagatggcacgccctctcaagggaggaacaggctaagtactacgaactggcgagaaaggagcgccagttgcacatgcagctctacccaggctggtcagccagggataactatggcaaaaagaaaaaacgcaagcgggataaacagccaggcgaaaccaatgagcactcggaatgctttctcaacccttgcctgtccttgcctccaatcacagatttgagcgcgcctaagaaatgcagagcaaggttcggccttgaccagcaaaataattggtgtgggccatgtagaaggaagaaaaaatgcgtgcgttatatccagggcgagggctcctgtctgtccccccctagtagcgatgggtccctgctggattctccacccccatccccgaacctattggggtcacccccaagagatgcgaagagccagactgagcaaacacagccattatctctgtccctgaagccagacccattggcacatttgtcaatgatgccccctccaccggcacttctgctcgcggaggctacgcacaaagcctccgcactgtgccctaacggcgctttagacttgccacccgcagccctccaaccagcagcaccatcgtccagcatcgcacagccctccacaagtagcctccactctcacagtagcctggcagggacccagccccaacccctatctttagtgacaaaatctctggagtag

SEQ ID NO: 283165 - DNA, 1485 bp, Artificial Sequence
  derived and/or modified sequence
atgcctcagctcaatggtggcggtggagacgatctcggagctaatgatgagcttatctcattcaaggatgagggggaacaggaagaaaaaagctcagaaaattcaagcgccgagagggacttagctgacgtgaagtcctcactcgtcaatgagagcgagacaaaccagaactcatccagtgacagcgaggctgagcgcaggccccctccaaggtctgaaagctttcgcgacaaaagtcgggagtccctggaggaagccgctaaaaggcaggatggcggtctgtttaaggggccaccttaccctggataccccttcattatgattccagatcttaccagcccatatctccccaatggctccctttctccaaccgccagaaccctgcactttcagagtggatctacgcactattcagcttataaaacgattgagcatcagatagccgtgcagtacctccagatgaagtggcccctcctggacgtccaagctggctcgctgcagtctcgacaggctttaaaggacgcccgatcaccatctccagctcacattgtgtctaataaggtgcccgtggtgcagcaccctcaccacgtccatcctttgactcccctcattacatatagtaatgagcacttcacacctgggaatccccctcctcatctccccgctgacgtcgaccccaaaacaggtattcccagaccgccacacccccctgatatcagcccctattaccccttgtctcccggtactgttggccaaatcccccacccattgggttggctagtcccgcagcaaggacagcctgtgtacccgattacgacaggaggcttcaggcacccctatcctactgcccttacggttaacgcttcaatgtcaaggttcccaccccatatggtgccacctcaccacacccttcacacgacaggtatcccacatcctgctatcgttacccctaccgttaagcaagagtcttcacagtctgatgttggaagtttacattcctctaagcatcaggattccaaaaaggaagaagagaagaaaaagccgcacatcaagaaacctctgaacgccttcatgttgtatatgaaagagatgagggcaaaggtggttgccgagtgtacgctgaaggagagcgccgctatcaaccaaattttaggcagacggtggcatgccttgtcacgagaagaacaggcaaagtactacgaacttgctagaaaggagagacagctgcacatgcagctttaccccggatggtccgcacgcgataactatggaaaaaaaaagaagaggaagagggataagcaacctggcgaaaccaacgaacactctgaatgttttctgaatccatgcctttccctgccgccaattacagatttaagtgcgccaaaaaaatgtcgcgcaagatttggcctggatcagcagaacaactggtgtggcccttgtcggtgtaaatacagcaaggaggtatcagggactgtgcgggcttag

SEQ ID NO: 283166 - DNA, 1809 bp, Artificial Sequence
  derived and/or modified sequence
atgccacagctgaatggaggtgggggtgacgatctaggtgcgaacgatgagcttatatccttcaaggacgagggtgaacaggaggagaaatcctccgagaacagctccgccgaacgagacctggctgacgtgaagtcgtcgctggtgaacgagtcggaaacgaaccagaattcttcatctgacagtgaagctgaacgaaggccacctcctcgatccgagtcctttcgtgataagtcccgcgaatctctagaggaggctgctaaaagacaggacgggggtctcttcaagggtcccccttatcccggatacccatttatcatgatacctgacctgactagcccctatttgcccaatggctcactgagccccacggcaaggactctgcactttcagagcggtagcacacactattccgcttataagacgattgagcaccagattgccgtccagtacttacaaatgaaatggcctctgctcgacgtgcaagcaggctcattgcagtcaagacaagctctgaaggacgctagatccccatccccagcacatattgtgagcaataaggtgccagttgtccagcacccgcaccacgttcatccactgaccccccttattacatattccaatgaacacttcaccccgggaaacccaccaccgcacctccctgccgatgttgatcccaaaaccgggatcccccgtccaccgcatcctccagacattagtccctactaccccctgtcaccaggtacagtagggcagatcccacacccactcgggtggctggtaccccagcagggccaaccggtgtatccaatcaccacgggaggtttcaggcacccatacccaacagcgttgaccgtgaatgcttcgatgtcccgtttccctccccacatggtccctcctcaccacacactccatactaccgggattccccaccctgctattgtaactccaactgtcaagcaggagagctcacagtcagacgtgggaagcctgcactcatctaaacaccaggattccaagaaggaggaagaaaagaaaaagccccatatcaaaaagcctctgaatgctttcatgctgtatatgaaagagatgagggctaaggtggtcgccgagtgcactctgaaggagtctgctgctatcaatcagatcttaggaaggcggtggcacgccctatcccgggaagagcaggctaagtactatgagttagcacgcaaagaacggcagttacacatgcagctgtatcctggctggtcagccagggacaattatggcaagaagaagaaacggaaacgtgataagcagcccggtgaaacaaacgatctgtctgcaccaaaaaagtgccgagccagattcggattagaccagcagaacaactggtgcggaccatgtcggcgtaagaagaagtgtgtgagatacatccaaggagaaggttcctgcctgagccccccatcttccgatggcagtttactggactctccacctcccagcccaaatctgctgggttctccccctagggacgcaaaaagccagacagagcaaacacagcctctcagtctctccttaaagccggaccccctagctcacttgagtatgatgccaccaccaccagctctgctgttagctgaagccacccataaggcttctgccttatgtcccaacggagctctcgatctcccacccgcagccttacagccagccgcaccatcgtcttcgatagcgcagccctcaacatcgagtcttcacagccatagttctctggccggtactcaaccacagcccctcagcctggtgaccaagtccctggagtag

SEQ ID NO: 283167 - DNA, 1860 bp, Artificial Sequence
  derived and/or modified sequence
atgccgcaacttaacgggggtgggggtgacgatctcggcgctaacgacgaactgatcagctttaaggatgagggggagcaggaagagaagtcttccgagaacagctcagccgagagagatcttgccgacgtgaagtcttctcttgtcaatgaatcagagacgaaccagaactctagcagtgacagtgaggcagagagacgtcccccacccaggtccgaatccttcagagataaatctcgcgagtcccttgaggaggcagctaaaaggcaggatggtggcctgtttaagggccctccttaccctggatacccgtttattatgattcctgatctcacgagcccatatctccccaacggttccttatccccaactgcacgaacactacatttccagagcggctccacacactactccgcttacaaaaccatcgaacaccagatcgctgtgcagtacttgcagatgaagtggcccttgcttgatgtgcaggcgggttcactgcagtcaaggcaagcgttaaaggacgccagatccccttcacccgcacatatcgtgtcaaacaaggtgcctgttgtgcagcatccacaccacgtgcatccattgacacccctgattacttattctaatgagcacttcactcctggaaatccaccaccccacctgccagctgacgtcgatcccaaaaccggaatcccgaggccccctcatcctcctgacatatctccatattatccattatcccctggtacggtcggccagatcccccaccccctcggctggctcgtcccccagcaaggccagcccgtgtaccctatcacaaccggcggatttcgacatccatatcctacagccctgacagtaaacgcgagcatgtcacgttttcccccacacatggtcccccctcatcatactctccacactactggtatcccgcatcctgctattgttacacctaccgtcaaacaagagtcaagtcaatcagacgtcggctctttgcattcttctaaacaccaggattctaagaaggaggaggaaaagaagaaaccccatatcaaaaagcctctgaacgcctttatgctctatatgaaagaaatgagggcgaaagtcgtggctgagtgcaccctgaaggagagcgcggcaatcaatcaaattctcggccgtagatggcatgccctctctagggaagaacaagcaaagtattatgagcttgcccgtaaggaaaggcagctgcacatgcaactgtatcccggttggagcgccagagataactacggtaagaagaagaagagaaagcgggataaacagcctggcgagaccaacgaacattccgaatgcttcctcaacccttgtctgtcgctgcccccaatcacggatgcaaatacccctaaaaagtgtcgcgctctttttggattggatcggcagaccctctggtgcaagccttgtagaaggaagaaaaagtgtgttcgctacatccagggcgaggggtcatgcctctctccgccttcctcagacggttctttattggattccccccctcctagtcccaacctactgggctcacctccgagagatgccaagtcccaaacagagcaaacccaaccgctctctctgtccctaaaacctgaccccctcgcgcacctgtcaatgatgccacctccaccagcgcttctgcttgccgaagccacgcataaggcaagcgccctttgcccgaatggcgcactcgacctgcctccagccgcactccaacctgctgccccttcttcatccatcgctcaacctagcacaagctcactgcatagccactcgagtctggccggaacccagccgcagcccctgagtctggtcactaaaagtcttgagtag

SEQ ID NO: 283168 - DNA, 4073 bp, Artificial Sequence
  derived and/or modified sequence
aataatctccgctcccagactactccgttcctccggatttcgatccccctttttctatctgtcaatcagcgccgcctttgaactgaaaagctctcagtctaacttcaactcactcaaatccgagcggcacgagcacctcctgtatcttcggcttccccccccctttgctctttatatctgacttcttgttgttgttggtgttttttttttttttaccccccttttttatttattatttttttgcacattgatcggatccttgggaacgagagaaaaaagaaacccaaactcacgcgtgcagaagatctccccccccttcccctcccctcctccctcttttcccctccccaggagaaaaagacccccaagcagaaaaaagttcaccttggactcgtctttttcttgcaatattttttgggggggcaaaactttttgggggtgattttttttggcttttcttcctccttcatttttcttccaaaattgctgctggtgggtgaaaaaaaaatgccgcagctgaacggcggtggaggggatgacctaggcgccaacgacgaactgatttccttcaaagacgagggcgaacaggaggagaagagctccgaaaactcctcggcagagagggatttagctgatgtcaaatcgtctctagtcaatgaatcagaaacgaatcaaaacagctcctccgattccgaggcggaaagacggcctccgcctcgctccgaaagtttccgagacaaatcccgggaaagtttggaagaagcggccaagaggcaagatggagggctctttaaggggccaccgtatcccggctaccccttcatcatgatccccgacctgacgagcccctacctccccaacggatcgctctcgcccaccgcccgaaccctccattttcagtccggcagcacacattactctgcgtacaaaacgattgaacaccagattgcagttcagtatctccagatgaaatggccactgcttgatgtccaggcagggagcctccagagtagacaagccctcaaggatgcccggtccccatcaccggcacacattgtctctaacaaagtgccagtggtgcagcaccctcaccatgtccaccccctcacgcctcttatcacgtacagcaatgaacacttcacgccgggaaacccacctccacacttaccagccgacgtagaccccaaaacaggaatcccacggcctccgcaccctccagatatatccccgtattacccactatcgcctggcaccgtaggacaaatcccccatccgctaggatggttagtaccacagcaaggtcaaccagtgtacccaatcacgacaggaggattcagacacccctaccccacagctctgaccgtcaatgcttccatgtccaggttccctccccatatggtcccaccacatcatacgctacacacgacgggcattccgcatccggccatagtcacaccaacagtcaaacaggaatcgtcccagagtgatgtcggctcactccatagttcaaagcatcaggactccaaaaaggaagaagaaaagaagaagccccacataaagaaacctcttaatgcattcatgttgtatatgaaggaaatgagagcaaaggtcgtagctgagtgcacgttgaaagaaagcgcggccatcaaccagatccttgggcggaggtggcatgcactgtccagagaagagcaagcgaaatactacgagctggcccggaaggagcgacagcttcatatgcaactgtaccccggctggtccgcgcgggataactatggaaagaagaagaagaggaaaagggacaagcagccgggagagaccaatgaacacagcgaatgtttcctaaatccttgcctttcacttcctccgattacagacctgagcgctcctaagaaatgccgagcgcgctttggccttgatcaacagaataactggtgcggcccttgcaggagaaaaaaaaagtgcgttcgctacatacaaggtgaaggcagctgcctcagcccaccctcttcagatggaagcttactagattcgcctcccccctccccgaacctgctaggctcccctccccgagacgccaagtcacagactgagcagacccagcctctgtcgctgtccctgaagcccgaccccctggcccacctgtccatgatgcctccgccacccgccctcctgctcgctgaggccacccacaaggcctccgccctctgtcccaacggggccctggacctgcccccagccgctttgcagcctgccgccccctcctcatcaattgcacagccgtcgacttcttccttacattcccacagctccctggccgggacccagccccagccgctgtcgctcgtcaccaagtctttagaatagctttagcgtcgtgaaccccgctgctttgtttatggttttgtttcacttttcttaatttgccccccacccccaccttgaaaggttttgttttgtactctcttaattttgtgccatgtggctacattagttgatgtttatcgagttcattggtcaatatttgacccattcttatttcaatttctccttttaaatatgtagatgagagaagaacctcatgattctaccaaaatttttatcaacagctgtttaaagtctttgtagcgtttaaaaaatatatatatatacataactgttatgtagttcggatagcttagttttaaaagactgattaaaaaacaaaaagaaaaaaaaagcaattttgaagcagccctccagaaggagttggttctgtattatttgtattaaatacgagcttgcgaaccaatcattttacatctggtttttaaaccgtaagggcaccatgaatgcagtgccgttactttttttttttttttctgtgtgaaacaactcttattgtgatgttacttgttattgtttaaatgtacagaaacaaagggtaaaaatgtgttaatataccttgttccatggtgttgttcttttggggggaggggacgctactcaacacttaatagaatcacaacgctgttgggccagtagtatttattgctttagagattgcttgtcgtacctgtatgtcgtccctttttaaatatgttttcctttttcttgaaactgtataaagtttttttcccccttagcataagcatcttatatataacaactcatttgtacaaggtttttaagtttatatataaaatgtgtatatatatttttgtttcccctttttgacttttttttttctgtatgaaacccagatgtcaccaaatggacattaatagttgcattaaggatcagtagcattaacaaaagttgctttaaaagccattatgtaaaacaagacttgaaaatgagtgagggaattttagcgacactgtctgagcagcagtgggaaccatcttcgtttcccctttgaactcccagtgggatgccctaccctgcgcccttaggacccggactgaccgtgtacaaaactttacgtgccaaaattctcagtgaatttagctttctccctctttttgatgctgtaatttttgttcatcatgttttgctgtgatgttacataggtagatttgtatgtagttttaatgtcacctataacaaaatgtgtttggtagcagattgtccagaaagcattttaaatgaagaggtataaacccttaagggccaaaattctgtatattagattactcttaaacgaaaaaccagctgccgcttttatgtacacatattacatacgagtaggcagcagactttaaaaataaaaaaaacctaggcatgttgatgttgcaaaatgctgtataaagctgaaacctgttcattcagtgccattgtagttgacatgaagcgattgtaaaactgtctccgatttttctctggtttattaaaatgctaactataacattttttgtgaatactttgaatgtttcctaacagttgtgatgttactgttccgttttatgctcttattccaagttcatttttaatggtttggaagccatttttgtaatgaataaatgttcatgctgtacagtatctgtagcatgccgttctggattaataaaagcaacttagtatgtgcagataaa

SEQ ID NO: 283169 - DNA, 1992 bp, Artificial Sequence
  derived and/or modified sequence
aataatctccgctcccagactactccgttcctccggatttcgatccccctttttctatctgtcaatcagcgccgcctttgaactgaaaagctctcagtctaacttcaactcactcaaatccgagcggcacgagcacctcctgtatcttcggcttccccccccctttgctctttatatctgacttcttgttgttgttggtgttttttttttttttaccccccttttttatttattatttttttgcacattgatcggatccttgggaacgagagaaaaaagaaacccaaactcacgcgtgcagaagatctccccccccttcccctcccctcctccctcttttcccctccccaggagaaaaagacccccaagcagaaaaaagttcaccttggactcgtctttttcttgcaatattttttgggggggcaaaactttttgggggtgattttttttggcttttcttcctccttcatttttcttccaaaattgctgctggtgggtgaaaaaaaaatgccgcagctgaacggcggtggaggggatgacctaggcgccaacgacgaactgatttccttcaaagacgagggcgaacaggaggagaagagctccgaaaactcctcggcagagagggatttagctgatgtcaaatcgtctctagtcaatgaatcagaaacgaatcaaaacagctcctccgattccgaggcggaaagacggcctccgcctcgctccgaaagtttccgagacaaatcccgggaaagtttggaagaagcggccaagaggcaagatggagggctctttaaggggccaccgtatcccggctaccccttcatcatgatccccgacctgacgagcccctacctccccaacggatcgctctcgcccaccgcccgaaccctccattttcagtccggcagcacacattactctgcgtacaaaacgattgaacaccagattgcagttcagtatctccagatgaaatggccactgcttgatgtccaggcagggagcctccagagtagacaagccctcaaggatgcccggtccccatcaccggcacacattgtctctaacaaagtgccagtggtgcagcaccctcaccatgtccaccccctcacgcctcttatcacgtacagcaatgaacacttcacgccgggaaacccacctccacacttaccagccgacgtagaccccaaaacaggaatcccacggcctccgcaccctccagatatatccccgtattacccactatcgcctggcaccgtaggacaaatcccccatccgctaggatggttagtaccacagcaaggtcaaccagtgtacccaatcacgacaggaggattcagacacccctaccccacagctctgaccgtcaatgcttccatgtccaggttccctccccatatggtcccaccacatcatacgctacacacgacgggcattccgcatccggccatagtcacaccaacagtcaaacaggaatcgtcccagagtgatgtcggctcactccatagttcaaagcatcaggactccaaaaaggaagaagaaaagaagaagccccacataaagaaacctcttaatgcattcatgttgtatatgaaggaaatgagagcaaaggtcgtagctgagtgcacgttgaaagaaagcgcggccatcaaccagatccttgggcggaggtggcatgcactgtccagagaagagcaagcgaaatactacgagctggcccggaaggagcgacagcttcatatgcaactgtaccccggctggtccgcgcgggataactatggaaagaagaagaagaggaaaagggacaagcagccgggagagaccaatgaacacagcgaatgtttcctaaatccttgcctttcacttcctccgattacagacctgagcgctcctaagaaatgccgagcgcgctttggccttgatcaacagaataactggtgcggcccttgcagatgcaaatactccaaagaagtgtcgggcactgttcgggcttga

SEQ ID NO: 283170 - DNA, 4022 bp, Artificial Sequence
  derived and/or modified sequence
aataatctccgctcccagactactccgttcctccggatttcgatccccctttttctatctgtcaatcagcgccgcctttgaactgaaaagctctcagtctaacttcaactcactcaaatccgagcggcacgagcacctcctgtatcttcggcttccccccccctttgctctttatatctgacttcttgttgttgttggtgttttttttttttttaccccccttttttatttattatttttttgcacattgatcggatccttgggaacgagagaaaaaagaaacccaaactcacgcgtgcagaagatctccccccccttcccctcccctcctccctcttttcccctccccaggagaaaaagacccccaagcagaaaaaagttcaccttggactcgtctttttcttgcaatattttttgggggggcaaaactttttgggggtgattttttttggcttttcttcctccttcatttttcttccaaaattgctgctggtgggtgaaaaaaaaatgccgcagctgaacggcggtggaggggatgacctaggcgccaacgacgaactgatttccttcaaagacgagggcgaacaggaggagaagagctccgaaaactcctcggcagagagggatttagctgatgtcaaatcgtctctagtcaatgaatcagaaacgaatcaaaacagctcctccgattccgaggcggaaagacggcctccgcctcgctccgaaagtttccgagacaaatcccgggaaagtttggaagaagcggccaagaggcaagatggagggctctttaaggggccaccgtatcccggctaccccttcatcatgatccccgacctgacgagcccctacctccccaacggatcgctctcgcccaccgcccgaaccctccattttcagtccggcagcacacattactctgcgtacaaaacgattgaacaccagattgcagttcagtatctccagatgaaatggccactgcttgatgtccaggcagggagcctccagagtagacaagccctcaaggatgcccggtccccatcaccggcacacattgtctctaacaaagtgccagtggtgcagcaccctcaccatgtccaccccctcacgcctcttatcacgtacagcaatgaacacttcacgccgggaaacccacctccacacttaccagccgacgtagaccccaaaacaggaatcccacggcctccgcaccctccagatatatccccgtattacccactatcgcctggcaccgtaggacaaatcccccatccgctaggatggttagtaccacagcaaggtcaaccagtgtacccaatcacgacaggaggattcagacacccctaccccacagctctgaccgtcaatgcttccatgtccaggttccctccccatatggtcccaccacatcatacgctacacacgacgggcattccgcatccggccatagtcacaccaacagtcaaacaggaatcgtcccagagtgatgtcggctcactccatagttcaaagcatcaggactccaaaaaggaagaagaaaagaagaagccccacataaagaaacctcttaatgcattcatgttgtatatgaaggaaatgagagcaaaggtcgtagctgagtgcacgttgaaagaaagcgcggccatcaaccagatccttgggcggaggtggcatgcactgtccagagaagagcaagcgaaatactacgagctggcccggaaggagcgacagcttcatatgcaactgtaccccggctggtccgcgcgggataactatggaaagaagaagaagaggaaaagggacaagcagccgggagagaccaatgacctgagcgctcctaagaaatgccgagcgcgctttggccttgatcaacagaataactggtgcggcccttgcaggagaaaaaaaaagtgcgttcgctacatacaaggtgaaggcagctgcctcagcccaccctcttcagatggaagcttactagattcgcctcccccctccccgaacctgctaggctcccctccccgagacgccaagtcacagactgagcagacccagcctctgtcgctgtccctgaagcccgaccccctggcccacctgtccatgatgcctccgccacccgccctcctgctcgctgaggccacccacaaggcctccgccctctgtcccaacggggccctggacctgcccccagccgctttgcagcctgccgccccctcctcatcaattgcacagccgtcgacttcttccttacattcccacagctccctggccgggacccagccccagccgctgtcgctcgtcaccaagtctttagaatagctttagcgtcgtgaaccccgctgctttgtttatggttttgtttcacttttcttaatttgccccccacccccaccttgaaaggttttgttttgtactctcttaattttgtgccatgtggctacattagttgatgtttatcgagttcattggtcaatatttgacccattcttatttcaatttctccttttaaatatgtagatgagagaagaacctcatgattctaccaaaatttttatcaacagctgtttaaagtctttgtagcgtttaaaaaatatatatatatacataactgttatgtagttcggatagcttagttttaaaagactgattaaaaaacaaaaagaaaaaaaaagcaattttgaagcagccctccagaaggagttggttctgtattatttgtattaaatacgagcttgcgaaccaatcattttacatctggtttttaaaccgtaagggcaccatgaatgcagtgccgttactttttttttttttttctgtgtgaaacaactcttattgtgatgttacttgttattgtttaaatgtacagaaacaaagggtaaaaatgtgttaatataccttgttccatggtgttgttcttttggggggaggggacgctactcaacacttaatagaatcacaacgctgttgggccagtagtatttattgctttagagattgcttgtcgtacctgtatgtcgtccctttttaaatatgttttcctttttcttgaaactgtataaagtttttttcccccttagcataagcatcttatatataacaactcatttgtacaaggtttttaagtttatatataaaatgtgtatatatatttttgtttcccctttttgacttttttttttctgtatgaaacccagatgtcaccaaatggacattaatagttgcattaaggatcagtagcattaacaaaagttgctttaaaagccattatgtaaaacaagacttgaaaatgagtgagggaattttagcgacactgtctgagcagcagtgggaaccatcttcgtttcccctttgaactcccagtgggatgccctaccctgcgcccttaggacccggactgaccgtgtacaaaactttacgtgccaaaattctcagtgaatttagctttctccctctttttgatgctgtaatttttgttcatcatgttttgctgtgatgttacataggtagatttgtatgtagttttaatgtcacctataacaaaatgtgtttggtagcagattgtccagaaagcattttaaatgaagaggtataaacccttaagggccaaaattctgtatattagattactcttaaacgaaaaaccagctgccgcttttatgtacacatattacatacgagtaggcagcagactttaaaaataaaaaaaacctaggcatgttgatgttgcaaaatgctgtataaagctgaaacctgttcattcagtgccattgtagttgacatgaagcgattgtaaaactgtctccgatttttctctggtttattaaaatgctaactataacattttttgtgaatactttgaatgtttcctaacagttgtgatgttactgttccgttttatgctcttattccaagttcatttttaatggtttggaagccatttttgtaatgaataaatgttcatgctgtacagtatctgtagcatgccgttctggattaataaaagcaacttagtatgtgcagataaa

SEQ ID NO: 283171 - DNA, 4073 bp, Artificial Sequence
  derived and/or modified sequence
aataatctccgctcccagactactccgttcctccggatttcgatccccctttttctatctgtcaatcagcgccgcctttgaactgaaaagctctcagtctaacttcaactcactcaaatccgagcggcacgagcacctcctgtatcttcggcttccccccccctttgctctttatatctgacttcttgttgttgttggtgttttttttttttttaccccccttttttatttattatttttttgcacattgatcggatccttgggaacgagagaaaaaagaaacccaaactcacgcgtgcagaagatctccccccccttcccctcccctcctccctcttttcccctccccaggagaaaaagacccccaagcagaaaaaagttcaccttggactcgtctttttcttgcaatattttttgggggggcaaaactttttgggggtgattttttttggcttttcttcctccttcatttttcttccaaaattgctgctggtgggtgaaaaaaaaatgccgcagctgaacggcggtggaggggatgacctaggcgccaacgacgaactgatttccttcaaagacgagggcgaacaggaggagaagagctccgaaaactcctcggcagagagggatttagctgatgtcaaatcgtctctagtcaatgaatcagaaacgaatcaaaacagctcctccgattccgaggcggaaagacggcctccgcctcgctccgaaagtttccgagacaaatcccgggaaagtttggaagaagcggccaagaggcaagatggagggctctttaaggggccaccgtatcccggctaccccttcatcatgatccccgacctgacgagcccctacctccccaacggatcgctctcgcccaccgcccgaaccctccattttcagtccggcagcacacattactctgcgtacaaaacgattgaacaccagattgcagttcagtatctccagatgaaatggccactgcttgatgtccaggcagggagcctccagagtagacaagccctcaaggatgcccggtccccatcaccggcacacattgtctctaacaaagtgccagtggtgcagcaccctcaccatgtccaccccctcacgcctcttatcacgtacagcaatgaacacttcacgccgggaaacccacctccacacttaccagccgacgtagaccccaaaacaggaatcccacggcctccgcaccctccagatatatccccgtattacccactatcgcctggcaccgtaggacaaatcccccatccgctaggatggttagtaccacagcaaggtcaaccagtgtacccaatcacgacaggaggattcagacacccctaccccacagctctgaccgtcaatgcttccatgtccaggttccctccccatatggtcccaccacatcatacgctacacacgacgggcattccgcatccggccatagtcacaccaacagtcaaacaggaatcgtcccagagtgatgtcggctcactccatagttcaaagcatcaggactccaaaaaggaagaagaaaagaagaagccccacataaagaaacctcttaatgcattcatgttgtatatgaaggaaatgagagcaaaggtcgtagctgagtgcacgttgaaagaaagcgcggccatcaaccagatccttgggcggaggtggcatgcactgtccagagaagagcaagcgaaatactacgagctggcccggaaggagcgacagcttcatatgcaactgtaccccggctggtccgcgcgggataactatggaaagaagaagaagaggaaaagggacaagcagccgggagagaccaatgaacacagcgaatgtttcctaaatccttgcctttcacttcctccgattacagatgcaaatactccaaagaagtgtcgggcactgttcgggcttgaccgacagactttatggtgcaaaccgtgcaggagaaaaaaaaagtgcgttcgctacatacaaggtgaaggcagctgcctcagcccaccctcttcagatggaagcttactagattcgcctcccccctccccgaacctgctaggctcccctccccgagacgccaagtcacagactgagcagacccagcctctgtcgctgtccctgaagcccgaccccctggcccacctgtccatgatgcctccgccacccgccctcctgctcgctgaggccacccacaaggcctccgccctctgtcccaacggggccctggacctgcccccagccgctttgcagcctgccgccccctcctcatcaattgcacagccgtcgacttcttccttacattcccacagctccctggccgggacccagccccagccgctgtcgctcgtcaccaagtctttagaatagctttagcgtcgtgaaccccgctgctttgtttatggttttgtttcacttttcttaatttgccccccacccccaccttgaaaggttttgttttgtactctcttaattttgtgccatgtggctacattagttgatgtttatcgagttcattggtcaatatttgacccattcttatttcaatttctccttttaaatatgtagatgagagaagaacctcatgattctaccaaaatttttatcaacagctgtttaaagtctttgtagcgtttaaaaaatatatatatatacataactgttatgtagttcggatagcttagttttaaaagactgattaaaaaacaaaaagaaaaaaaaagcaattttgaagcagccctccagaaggagttggttctgtattatttgtattaaatacgagcttgcgaaccaatcattttacatctggtttttaaaccgtaagggcaccatgaatgcagtgccgttactttttttttttttttctgtgtgaaacaactcttattgtgatgttacttgttattgtttaaatgtacagaaacaaagggtaaaaatgtgttaatataccttgttccatggtgttgttcttttggggggaggggacgctactcaacacttaatagaatcacaacgctgttgggccagtagtatttattgctttagagattgcttgtcgtacctgtatgtcgtccctttttaaatatgttttcctttttcttgaaactgtataaagtttttttcccccttagcataagcatcttatatataacaactcatttgtacaaggtttttaagtttatatataaaatgtgtatatatatttttgtttcccctttttgacttttttttttctgtatgaaacccagatgtcaccaaatggacattaatagttgcattaaggatcagtagcattaacaaaagttgctttaaaagccattatgtaaaacaagacttgaaaatgagtgagggaattttagcgacactgtctgagcagcagtgggaaccatcttcgtttcccctttgaactcccagtgggatgccctaccctgcgcccttaggacccggactgaccgtgtacaaaactttacgtgccaaaattctcagtgaatttagctttctccctctttttgatgctgtaatttttgttcatcatgttttgctgtgatgttacataggtagatttgtatgtagttttaatgtcacctataacaaaatgtgtttggtagcagattgtccagaaagcattttaaatgaagaggtataaacccttaagggccaaaattctgtatattagattactcttaaacgaaaaaccagctgccgcttttatgtacacatattacatacgagtaggcagcagactttaaaaataaaaaaaacctaggcatgttgatgttgcaaaatgctgtataaagctgaaacctgttcattcagtgccattgtagttgacatgaagcgattgtaaaactgtctccgatttttctctggtttattaaaatgctaactataacattttttgtgaatactttgaatgtttcctaacagttgtgatgttactgttccgttttatgctcttattccaagttcatttttaatggtttggaagccatttttgtaatgaataaatgttcatgctgtacagtatctgtagcatgccgttctggattaataaaagcaacttagtatgtgcagataaa

SEQ ID NO: 283172 - protein, 335 aa, Artificial Sequence
  derived and/or modified sequence
MSSFLSSRFPPHMVPPHHTLHTTGIPHPAIVTPTVKQESSQSDVGSLHSSKHQDSKKEEEKKKPHIKKPLNAFMLYMKEMRAKVVAECTLKESAAINQILGRRWHALSREEQAKYYELARKERQLHMQLYPGWSARDNYGKKKKRKRDKQPGETNEHSECFLNPCLSLPPITDLSAPKKCRARFGLDQQNNWCGPCRRKKKCVRYIQGEGSCLSPPSSDGSLLDSPPPSPNLLGSPPRDAKSQTEQTQPLSLSLKPDPLAHLSMMPPPPALLLAEATHKASALCPNGALDLPPAALQPAAPSSSIAQPSTSSLHSHSSLAGTQPQPLSLVTKSLE

SEQ ID NO: 283173 - DNA, 1920 bp, Artificial Sequence
  derived and/or modified sequence
atgccgcagctgaacggcggtggaggggatgacctaggcgccaacgacgaactgatttccttcaaagacgagggcgaacaggaggagaagagctccgaaaactcctcggcagagagggatttagctgatgtcaaatcgtctctagtcaatgaatcagaaacgaatcaaaacagctcctccgattccgaggcggaaagacggcctccgcctcgctccgaaagtttccgagacaaatcccgggaaagtttggaagaagcggccaagaggcaagatggagggctctttaaggggccaccgtatcccggctaccccttcatcatgatccccgacctgacgagcccctacctccccaacggatcgctctcgcccaccgcccgaacctatctccagatgaaatggccactgcttgatgtccaggcagggagcctccagagtagacaagccctcaaggatgcccggtccccatcaccggcacacattgtcgcagtgctgtagctatcgatagaagtcttgtccagggaaacaatccaccattagctgggagcaaggccttagacagaaaggagcaacattcaactaaggaagaccccggccacgtctaacaaagtgccagtggtgcagcaccctcaccatgtccaccccctcacgcctcttatcacgtacagcaatgaacacttcacgccgggaaacccacctccacacttaccagccgacgtagaccccaaaacaggaatcccacggcctccgcaccctccagatatatccccgtattacccactatcgcctggcaccgtaggacaaatcccccatccgctaggatggttagtaccacagcaaggtcaaccagtgtacccaatcacgacaggaggattcagacacccctaccccacagctctgaccgtcaatgcttccatgtccagctttctgtcttctaggttccctccccatatggtcccaccacatcatacgctacacacgacgggcattccgcatccggccatagtcacaccaacagtcaaacaggaatcgtcccagagtgatgtcggctcactccatagttcaaagcatcaggactccaaaaaggaagaagaaaagaagaagccccacataaagaaacctcttaatgcattcatgttgtatatgaaggaaatgagagcaaaggtcgtagctgagtgcacgttgaaagaaagcgcggccatcaaccagatccttgggcggaggtggcatgcactgtccagagaagagcaagcgaaatactacgagctggcccggaaggagcgacagcttcatatgcaactgtaccccggctggtccgcgcgggataactatggaaagaagaagaagaggaaaagggacaagcagccgggagagaccaatgaacacagcgaatgtttcctaaatccttgcctttcacttcctccgattacagacctgagcgctcctaagaaatgccgagcgcgctttggccttgatcaacagaataactggtgcggcccttgcaggagaaaaaaaaagtgcgttcgctacatacaaggtgaaggcagctgcctcagcccaccctcttcagatggaagcttactagattcgcctcccccctccccgaacctgctaggctcccctccccgagacgccaagtcacagactgagcagacccagcctctgtcgctgtccctgaagcccgaccccctggcccacctgtccatgatgcctccgccacccgccctcctgctcgctgaggccacccacaaggcctccgccctctgtcccaacggggccctggacctgcccccagccgctttgcagcctgccgccccctcctcatcaattgcacagccgtcgacttcttccttacattcccacagctccctggccgggacccagccccagccgctgtcgctcgtcaccaagtctttagaatag

SEQ ID NO: 283174 - protein, 222 aa, Artificial Sequence
  derived and/or modified sequence
TNQNSSSDSEAERRPPPRSESFRDKSRESLEEAAKRQDGGLFKGPPYPGYPFIMIPDLTSPYLPNGSLSPTARTLHFQSGSTHYSAYKTIEHQIAVQYLQMKWPLLDVQAGSLQSRQALKDARSPSPAHIVSPLPCCTQGHDCQHFYPPSDFTVSTQVFRDMKRSHSLQKVGEPWCIESNKVPVVQHPHHVHPLTPLITYSNEHFTPGNPPPHLPADVDPKT

SEQ ID NO: 283175 - DNA, 669 bp, Artificial Sequence
  derived and/or modified sequence
accaaccagaacagcagcagcgacagcgaggccgagagaagacccccccccagaagcgagagcttcagagacaagagcagagagagcctggaggaggccgccaagagacaggacggcggcctgttcaagggccccccctaccccggctaccccttcatcatgatccccgacctgaccagcccctacctgcccaacggcagcctgagccccaccgccagaaccctgcacttccagagcggcagcacccactacagcgcctacaagaccatcgagcaccagatcgccgtgcagtacctgcagatgaagtggcccctgctggacgtgcaggccggcagcctgcagagcagacaggccctgaaggacgccagaagccccagccccgcccacatcgtgagccccctgccctgctgcacccagggccacgactgccagcacttctacccccccagcgacttcaccgtgagcacccaggtgttcagagacatgaagagaagccacagcctgcagaaggtgggcgagccctggtgcatcgagagcaacaaggtgcccgtggtgcagcacccccaccacgtgcaccccctgacccccctgatcacctacagcaacgagcacttcacccccggcaacccccccccccacctgcccgccgacgtggaccccaagacctag

SEQ ID NO: 283176 - DNA, 669 bp, Artificial Sequence
  derived and/or modified sequence
accaatcagaacagcagcagcgacagcgaagccgagcgtcggcctccaccacggagtgagtcgtttcgcgataaatctcgtgaaagtctcgaggaggccgctaaacggcaggatggaggcctgttcaagggccccccttatcctgggtatccatttatcatgattcctgatctcacctctccctatctgcctaacggatcgctgtcccccaccgcacgcaccctgcacttccagtccggaagcacccactattctgcctacaaaactatagaacaccagatcgccgtgcagtatctccagatgaaatggccgctgttggatgtacaagctggttctctgcaatcccgacaggcactgaaggatgctagatccccaagcccagcccatatagtatcccccttgccatgctgtacccagggacacgattgccagcatttctatcctccgtctgatttcactgtcagcacccaagtgttcagggatatgaaaaggtcccacagcttacaaaaggtaggagaaccatggtgtatagaatcaaataaggtgcccgtcgtgcagcatccccatcatgtgcaccccttaacgccactcattacttactcaaatgagcatttcacccctgggaaccccccaccccacctcccggccgacgtggacccaaagacatag

SEQ ID NO: 283177 - DNA, 669 bp, Artificial Sequence
  derived and/or modified sequence
accaaccagaacagcagcagtgacagcgaggccgagcggcggcccccacccaggtctgagagcttccgggacaagagccgggagagcctggaggaggccgccaagaggcaggacggcggcctcttcaagggccccccctacccaggctaccccttcatcatgatcccagacctgaccagcccctacctgcccaacggcagcctgagccccacagcccggaccctgcacttccagagcggcagcacccactacagcgcctacaagaccatcgagcaccagattgctgtgcagtacctgcagatgaagtggcccctgctggatgtgcaggccggcagcctgcagagccggcaggccctgaaggatgcccggagccccagccctgcccacatcgtgagccccctgccctgctgcacccagggccatgactgccagcacttctacccacccagcgacttcaccgtgtccacccaggtgttccgggacatgaagaggagccacagcctgcagaaggtgggggagccctggtgcatcgagagcaacaaggtgcctgtggtgcagcacccccaccacgtgcaccccctgacccccctcatcacctacagcaatgagcacttcaccccaggcaaccccccaccccacctgcctgcagatgtggaccccaagacctag

SEQ ID NO: 283178 - DNA, 669 bp, Artificial Sequence
  derived and/or modified sequence
accaaccagaacagcagcagcgacagcgaggccgagcggcggcccccaccaagatccgagagctttagagacaagagcagggagtccctggaagaagctgctaaacgccaggatggcgggctgtttaaaggaccaccataccctggatatccctttattatgatcccagatctcaccagtccctacctccccaacggatcattgagccccactgcccgtactctgcactttcagtccggatcaacacactattccgcatacaaaactatcgaacatcagatcgctgtgcagtatctgcaaatgaaatggcctctgcttgatgttcaggcagggtctctgcagtcccgccaagctctgaaagatgctaggagcccaagccccgcccacattgtaagtcctcttccctgttgcacccaaggtcacgactgccagcatttttatccaccttcagactttacggtgtccactcaggtattcagagatatgaaacggtcccactcacttcagaaagtgggcgagccttggtgcatcgaatccaacaaagtccccgtggtgcagcaccctcatcatgtacaccctctgaccccactcataacttacagcaacgaacacttcactcctggcaatcctcccccccacttgcctgccgacgtcgatcccaagacctag

SEQ ID NO: 283179 - DNA, 669 bp, Artificial Sequence
  derived and/or modified sequence
accaatcagaatagcagttccgactccgaagcggagcgcagaccccctcctagatctgaaagtttccgcgataagtccagagagagtcttgaggaggctgcgaagagacaggatggcggtctgttcaaggggccaccataccccggatatcccttcattatgatcccagacctgacctctccttatcttccgaatggctctctgagtcctacggccaggaccctgcacttccagtccggatcaacacactatagtgcctacaagactatcgagcatcagatagctgtccaatacttgcagatgaagtggcctctgttggatgtccaagcaggatctctgcagagccggcaggccctcaaggatgcaagaagcccttcaccggctcacatcgtaagccctcttccatgctgcacacagggacacgactgtcagcacttctatcctccttcggacttcacagtttctacccaggtgttcagggacatgaaacgttcacatagcctccagaaggtgggtgagccttggtgtattgagagcaataaggttcctgtggtccaacacccacatcatgtccatcccctcacgccactgatcacatacagcaatgagcattttactccaggaaacccgccaccgcaccttcctgcggatgttgaccctaagacgtag

SEQ ID NO: 283180 - DNA, 667 bp, Artificial Sequence
  derived and/or modified sequence
acgaatcaaaacagctcctccgattccgaggcggaaagacggcctccgcctcgctccgaaagtttccgagacaaatcccgggaaagtttggaagaagcggccaagaggcaagatggagggctctttaaggggccaccgtatcccggctaccccttcatcatgatccccgacctgacgagcccctacctccccaacggatcgctctcgcccaccgcccgaaccctccattttcagtccggcagcacacattactctgcgtacaaaacgattgaacaccagattgcagttcagtatctccagatgaaatggccactgcttgatgtccaggcagggagcctccagagtagacaagccctcaaggatgcccggtccccatcaccggcacacattgtcagccccctcccttgctgcactcagggacatgactgtcagcacttctaccccccctcagacttcactgtcagcactcaagtcttcagggacatgaaaaggagccactccttacaaaaagttggggagccctggtgtattgagtctaacaaagtgccagtggtgcagcaccctcaccatgtccaccccctcacgcctcttatcacgtacagcaatgaacacttcacgccgggaaacccacctccacacttaccagccgacgtagaccccaaaacag

SEQ ID NO: 283181 - protein, 482 aa, Artificial Sequence
  derived and/or modified sequence
MPQLNGGGGDDLGANDELISFKDEGEQEEKSSENSSAERDLADVKSSLVNESETNQNSSSDSEAERRPPPRSESFRDKSRESLEEAAKRQDGGLFKGPPYPGYPFIMIPDLTSPYLPNGSLSPTARTLHFQSGSTHYSAYKTIEHQIAVQYLQMKWPLLDVQAGSLQSRQALKDARSPSPAHIVSNKVPVVQHPHHVHPLTPLITYSNEHFTPGNPPPHLPADVDPKTGIPRPPHPPDISPYYPLSPGTVGQIPHPLGWLVPQQGQPVYPITTGGFRHPYPTALTVNASMSRFPPHMVPPHHTLHTTGIPHPAIVTPTVKQESSQSDVGSLHSSKHQDSKKEEEKKKPHIKKPLNAFMLYMKEMRAKVVAECTLKESAAINQILGRRWHALSREEQAKYYELARKERQLHMQLYPGWSARDNYGKKKKRKRDKQPGETNEHSECFLNPCLSLPPITGEKKSAFATYKVKAAASAHPLQMEAY

SEQ ID NO: 283182 - DNA, 1449 bp, Artificial Sequence
  derived and/or modified sequence
atgccccagctgaacggcggcggcggcgacgacctgggcgccaacgacgagctgatcagcttcaaggacgagggcgagcaggaggagaagagcagcgagaacagcagcgccgagagagacctggccgacgtgaagagcagcctggtgaacgagagcgagaccaaccagaacagcagcagcgacagcgaggccgagagaagacccccccccagaagcgagagcttcagagacaagagcagagagagcctggaggaggccgccaagagacaggacggcggcctgttcaagggccccccctaccccggctaccccttcatcatgatccccgacctgaccagcccctacctgcccaacggcagcctgagccccaccgccagaaccctgcacttccagagcggcagcacccactacagcgcctacaagaccatcgagcaccagatcgccgtgcagtacctgcagatgaagtggcccctgctggacgtgcaggccggcagcctgcagagcagacaggccctgaaggacgccagaagccccagccccgcccacatcgtgagcaacaaggtgcccgtggtgcagcacccccaccacgtgcaccccctgacccccctgatcacctacagcaacgagcacttcacccccggcaacccccccccccacctgcccgccgacgtggaccccaagaccggcatccccagacccccccacccccccgacatcagcccctactaccccctgagccccggcaccgtgggccagatcccccaccccctgggctggctggtgccccagcagggccagcccgtgtaccccatcaccaccggcggcttcagacacccctaccccaccgccctgaccgtgaacgccagcatgagcagattccccccccacatggtgcccccccaccacaccctgcacaccaccggcatcccccaccccgccatcgtgacccccaccgtgaagcaggagagcagccagagcgacgtgggcagcctgcacagcagcaagcaccaggacagcaagaaggaggaggagaagaagaagccccacatcaagaagcccctgaacgccttcatgctgtacatgaaggagatgagagccaaggtggtggccgagtgcaccctgaaggagagcgccgccatcaaccagatcctgggcagaagatggcacgccctgagcagagaggagcaggccaagtactacgagctggccagaaaggagagacagctgcacatgcagctgtaccccggctggagcgccagagacaactacggcaagaagaagaagagaaagagagacaagcagcccggcgagaccaacgagcacagcgagtgcttcctgaacccctgcctgagcctgccccccatcaccggcgagaagaagagcgccttcgccacctacaaggtgaaggccgccgccagcgcccaccccctgcagatggaggcctactag

SEQ ID NO: 283183 - DNA, 1449 bp, Artificial Sequence
  derived and/or modified sequence
atgccacagctaaatggtggggggggagatgacctgggagccaacgatgaacttattagcttcaaggacgagggcgaacaagaggagaagtcttctgaaaattcatcggcagagcgcgaccttgccgacgtgaagtcaagcctcgtgaacgagtctgagacaaaccaaaactccagctctgattcagaagcagagagaaggcccccccccaggtctgagtccttccgcgacaaatccagggaatcgcttgaagaagccgccaaacggcaggatggagggctcttcaagggcccaccatatcccggttatccgtttatcatgatacctgacctgacatcaccctacttacccaatggtagcctctcaccaaccgcgcgcactctgcactttcagagtgggtcgacacactacagtgcttacaagacaatagaacaccagatcgccgtgcagtacctccagatgaaatggccactcctcgatgtccaagcaggctccctgcagagcagacaagccttaaaagatgctcggtctccgtctcctgcccatattgtgagcaacaaggttcctgtggtgcagcatcctcaccacgtgcaccccctgaccccacttatcacatactcaaatgagcattttactcctggaaacccacctccgcacctgcctgctgacgttgatcctaaaactggcattccaaggccaccgcatccccccgacatcagcccctactatcccctttctccgggaaccgtcggccagataccccatcccctgggttggctggtgccccagcagggccagccagtttaccccatcactacagggggctttagacacccttatccgacagcactaaccgtgaatgcctctatgtcccgttttcctccccatatggtgcctccgcaccacacgcttcacactacgggaattccacaccccgcaattgttacgcctactgtgaagcaggagtcatctcaatcagatgtaggaagtctgcattcctccaaacaccaggactccaagaaagaggaggaaaaaaagaagcctcacatcaaaaaacccctcaatgccttcatgctatatatgaaagaaatgcgtgcaaaggtcgtggctgagtgcacattgaaagagtcagccgcgatcaatcagatcctgggtcgaaggtggcatgcgctgtctcgcgaggaacaggcgaagtactacgagttggctcgaaaggagcgccagctgcatatgcagctatatcccggttggtctgccagggacaattacgggaagaaaaagaagaggaaaagggataaacaacccggagaaaccaacgaacactccgagtgctttctaaatccttgcctgtcattgcctcctataacaggcgaaaaaaagtcagccttcgctacctacaaggtgaaggccgctgcctctgctcatcccctgcagatggaggcatattag

SEQ ID NO: 283184 - DNA, 1449 bp, Artificial Sequence
  derived and/or modified sequence
atgccccagctgaatggaggcggcggagatgacctgggcgccaatgatgagctgatctccttcaaggatgaaggagagcaggaggagaagagcagcgagaacagcagcgctgagcgggacctggctgatgtgaagagcagcctggtgaatgaaagtgagaccaaccagaacagcagcagtgacagcgaggccgagcggcggcccccacccaggtctgagagcttccgggacaagagccgggagagcctggaggaggccgccaagaggcaggacggcggcctcttcaagggccccccctacccaggctaccccttcatcatgatcccagacctgaccagcccctacctgcccaacggcagcctgagccccacagcccggaccctgcacttccagagcggcagcacccactacagcgcctacaagaccatcgagcaccagattgctgtgcagtacctgcagatgaagtggcccctgctggatgtgcaggccggcagcctgcagagccggcaggccctgaaggatgcccggagccccagccctgcccacatcgtgagcaacaaggtgcctgtggtgcagcacccccaccacgtgcaccccctgacccccctcatcacctacagcaatgagcacttcaccccaggcaaccccccaccccacctgcctgcagatgtggaccccaagacaggcatccccaggcctccccaccccccagacatcagcccctactaccccctgagccctggcaccgtgggccagatcccccaccccctgggctggctggtgccccagcagggccagcctgtgtaccccatcaccactggaggcttccgccacccctaccccacagccctgactgtgaatgcctccatgagccgcttccccccccacatggtgcccccccaccacaccctgcacaccaccggcatcccccacccagccatcgtgacccccaccgtgaagcaggagagcagccagagtgatgtgggcagcctgcacagcagcaagcaccaggacagcaagaaggaggaggagaagaagaagccccacatcaagaagcccctgaatgccttcatgctgtacatgaaggagatgagggccaaggtggtggctgaatgtaccctgaaggagagcgctgccatcaaccagatcctgggccgccgctggcacgccctgagccgggaggagcaggccaagtactatgagctggccaggaaggagcggcagctgcacatgcagctgtacccaggctggagcgcccgggacaactacggcaagaagaagaagaggaagagggacaagcagcctggagagaccaatgagcacagcgagtgcttcctgaacccctgcctgagcctgccccccatcaccggggagaagaagagcgcctttgccacctacaaggtgaaggctgctgccagcgcccaccccctgcagatggaggcctactag

SEQ ID NO: 283185 - DNA, 1449 bp, Artificial Sequence
  derived and/or modified sequence
atgccccagctgaacggcggcggcggcgacgacctgggcgccaacgatgaactgatcagctttaaagacgagggcgagcaggaagagaaatccagcgaaaactcctccgctgagagggatctagccgatgtcaagtctagcttagttaacgagagtgagacaaaccagaactcctctagcgattcggaagcagaaagacgccctcctcctcggtctgagtccttcagggacaaaagccgagagagcctagaggaagccgccaagcggcaggacggagggttatttaagggacccccttacccaggctacccctttattatgatccctgatctcaccagtccttacctgcctaatggttcactttccccaacagctcgaacattacacttccaatccggcagtacacactactcggcatacaagactatcgaacaccaaattgccgttcagtacctgcaaatgaaatggccccttctcgacgtccaggccgggtcacttcagtctagacaggccttgaaggatgctcgcagtcccagtccggcacacatagtgtcaaataaggtgccagtggtccagcacccccaccacgttcaccctctgacacctctgataacctactctaacgaacacttcacacccgggaacccccctccgcacttgcccgcagatgtggaccctaagacaggaataccaaggccgcctcatccaccagatatctctccctactacccactctcacccggaacagtcggtcagatcccgcacccgctcggttggcttgttccacagcagggccagcctgtgtatccaattacgacaggtgggttcagacacccataccctacagcacttaccgtgaatgcttccatgagcagattcccccctcacatggtaccaccacaccatacactgcacaccaccggcattccccacccagcaatcgtaacgcctaccgtcaagcaggagtccagtcaatccgacgtgggctcattgcacagctctaagcaccaggatagtaagaaagaggaagagaagaagaagccacacattaagaagcccctgaacgccttcatgctttatatgaaggaaatgcgcgccaaggtagtagccgaatgtaccttgaaggagtcagccgcaatcaatcagatcctgggcaggcgctggcacgccctgtcaagggaggagcaagccaagtattacgaattagccaggaaagagaggcaactgcatatgcagttgtacccaggatggtcggccagagataactacggaaagaaaaaaaaaaggaagagagataaacagcccggagaaaccaacgaacattccgagtgtttccttaacccatgtctgagcctacctccgatcaccggtgagaaaaagtccgcattcgcgacatataaggtaaaggctgctgcaagtgcgcaccccctgcagatggaagcatactag

SEQ ID NO: 283186 - DNA, 1449 bp, Artificial Sequence
  derived and/or modified sequence
atgcctcagctgaacggcggagggggagacgacctgggcgctaatgatgagcttatttctttcaaagatgaaggcgagcaggaggagaaatcgtcagagaacagctccgccgagagggatctggcagacgtaaaatctagcctcgttaacgagtccgagaccaaccagaactcgagtagcgacagcgaagcagagcgtcggcctccccctcggagtgaatcattccgagataagagcagggagtcactagaggaggccgctaaacgccaagatgggggactgtttaagggacctccctaccctgggtaccctttcatcatgatcccggatctgactagtccttatctgcctaatggcagtttaagccctaccgctcggacactgcattttcagtcaggatccacacattattcagcctacaagacaattgagcaccagatcgcagttcagtacttgcaaatgaagtggcccctcctagacgttcaagcaggctcccttcagtcaaggcaggccctcaaagacgctcggtcccccagccctgcacacattgtatcaaataaagtccctgtggtgcaacacccacaccacgtccatcctctgacgcctctgattacctattcaaacgaacattttacgcccggaaatcccccacctcaccttcccgctgatgttgaccccaagacgggaatccctcggccacctcacccgccagacatctcgccatattaccctctcagtccaggcactgtaggccagatcccccacccattgggatggctcgttccgcagcagggtcagccggtttatcccatcacaacaggtggcttccgccacccctaccctaccgccctgaccgtgaacgccagtatgtccaggttcccgcctcatatggtacccccacaccacacacttcacacaacagggatacctcaccccgctattgtcactcccaccgttaaacaggagtcttcccagtcagacgtgggctctctccacagcagcaagcaccaggactcaaagaaagaggaggagaaaaagaaacctcatattaagaagcccctgaacgcatttatgctgtatatgaaggaaatgcgagctaaggtggtggcggagtgcacactgaaagaatcagccgcaatcaatcagattcttgggagacgatggcacgcattatcacgggaagagcaggccaaatactacgaactcgccagaaaggaacggcaacttcatatgcagctgtatcccggttggagtgccagagataattatgggaagaaaaagaagcgtaagcgagataaacagcctggagaaacaaacgagcacagcgagtgtttccttaacccttgcctgagccttcccccaataacaggggagaagaagtctgccttcgccacgtacaaggtcaaagccgcagctagtgctcaccccctgcagatggaggcttactag

SEQ ID NO: 283187 - DNA, 4000 bp, Artificial Sequence
  derived and/or modified sequence
aataatctccgctcccagactactccgttcctccggatttcgatccccctttttctatctgtcaatcagcgccgcctttgaactgaaaagctctcagtctaacttcaactcactcaaatccgagcggcacgagcacctcctgtatcttcggcttccccccccctttgctctttatatctgacttcttgttgttgttggtgttttttttttttttaccccccttttttatttattatttttttgcacattgatcggatccttgggaacgagagaaaaaagaaacccaaactcacgcgtgcagaagatctccccccccttcccctcccctcctccctcttttcccctccccaggagaaaaagacccccaagcagaaaaaagttcaccttggactcgtctttttcttgcaatattttttgggggggcaaaactttttgggggtgattttttttggcttttcttcctccttcatttttcttccaaaattgctgctggtgggtgaaaaaaaaatgccgcagctgaacggcggtggaggggatgacctaggcgccaacgacgaactgatttccttcaaagacgagggcgaacaggaggagaagagctccgaaaactcctcggcagagagggatttagctgatgtcaaatcgtctctagtcaatgaatcagaaacgaatcaaaacagctcctccgattccgaggcggaaagacggcctccgcctcgctccgaaagtttccgagacaaatcccgggaaagtttggaagaagcggccaagaggcaagatggagggctctttaaggggccaccgtatcccggctaccccttcatcatgatccccgacctgacgagcccctacctccccaacggatcgctctcgcccaccgcccgaaccctccattttcagtccggcagcacacattactctgcgtacaaaacgattgaacaccagattgcagttcagtatctccagatgaaatggccactgcttgatgtccaggcagggagcctccagagtagacaagccctcaaggatgcccggtccccatcaccggcacacattgtctctaacaaagtgccagtggtgcagcaccctcaccatgtccaccccctcacgcctcttatcacgtacagcaatgaacacttcacgccgggaaacccacctccacacttaccagccgacgtagaccccaaaacaggaatcccacggcctccgcaccctccagatatatccccgtattacccactatcgcctggcaccgtaggacaaatcccccatccgctaggatggttagtaccacagcaaggtcaaccagtgtacccaatcacgacaggaggattcagacacccctaccccacagctctgaccgtcaatgcttccatgtccaggttccctccccatatggtcccaccacatcatacgctacacacgacgggcattccgcatccggccatagtcacaccaacagtcaaacaggaatcgtcccagagtgatgtcggctcactccatagttcaaagcatcaggactccaaaaaggaagaagaaaagaagaagccccacataaagaaacctcttaatgcattcatgttgtatatgaaggaaatgagagcaaaggtcgtagctgagtgcacgttgaaagaaagcgcggccatcaaccagatccttgggcggaggtggcatgcactgtccagagaagagcaagcgaaatactacgagctggcccggaaggagcgacagcttcatatgcaactgtaccccggctggtccgcgcgggataactatggaaagaagaagaagaggaaaagggacaagcagccgggagagaccaatgaacacagcgaatgtttcctaaatccttgcctttcacttcctccgattacaggagaaaaaaaaagtgcgttcgctacatacaaggtgaaggcagctgcctcagcccaccctcttcagatggaagcttactagattcgcctcccccctccccgaacctgctaggctcccctccccgagacgccaagtcacagactgagcagacccagcctctgtcgctgtccctgaagcccgaccccctggcccacctgtccatgatgcctccgccacccgccctcctgctcgctgaggccacccacaaggcctccgccctctgtcccaacggggccctggacctgcccccagccgctttgcagcctgccgccccctcctcatcaattgcacagccgtcgacttcttccttacattcccacagctccctggccgggacccagccccagccgctgtcgctcgtcaccaagtctttagaatagctttagcgtcgtgaaccccgctgctttgtttatggttttgtttcacttttcttaatttgccccccacccccaccttgaaaggttttgttttgtactctcttaattttgtgccatgtggctacattagttgatgtttatcgagttcattggtcaatatttgacccattcttatttcaatttctccttttaaatatgtagatgagagaagaacctcatgattctaccaaaatttttatcaacagctgtttaaagtctttgtagcgtttaaaaaatatatatatatacataactgttatgtagttcggatagcttagttttaaaagactgattaaaaaacaaaaagaaaaaaaaagcaattttgaagcagccctccagaaggagttggttctgtattatttgtattaaatacgagcttgcgaaccaatcattttacatctggtttttaaaccgtaagggcaccatgaatgcagtgccgttactttttttttttttttctgtgtgaaacaactcttattgtgatgttacttgttattgtttaaatgtacagaaacaaagggtaaaaatgtgttaatataccttgttccatggtgttgttcttttggggggaggggacgctactcaacacttaatagaatcacaacgctgttgggccagtagtatttattgctttagagattgcttgtcgtacctgtatgtcgtccctttttaaatatgttttcctttttcttgaaactgtataaagtttttttcccccttagcataagcatcttatatataacaactcatttgtacaaggtttttaagtttatatataaaatgtgtatatatatttttgtttcccctttttgacttttttttttctgtatgaaacccagatgtcaccaaatggacattaatagttgcattaaggatcagtagcattaacaaaagttgctttaaaagccattatgtaaaacaagacttgaaaatgagtgagggaattttagcgacactgtctgagcagcagtgggaaccatcttcgtttcccctttgaactcccagtgggatgccctaccctgcgcccttaggacccggactgaccgtgtacaaaactttacgtgccaaaattctcagtgaatttagctttctccctctttttgatgctgtaatttttgttcatcatgttttgctgtgatgttacataggtagatttgtatgtagttttaatgtcacctataacaaaatgtgtttggtagcagattgtccagaaagcattttaaatgaagaggtataaacccttaagggccaaaattctgtatattagattactcttaaacgaaaaaccagctgccgcttttatgtacacatattacatacgagtaggcagcagactttaaaaataaaaaaaacctaggcatgttgatgttgcaaaatgctgtataaagctgaaacctgttcattcagtgccattgtagttgacatgaagcgattgtaaaactgtctccgatttttctctggtttattaaaatgctaactataacattttttgtgaatactttgaatgtttcctaacagttgtgatgttactgttccgttttatgctcttattccaagttcatttttaatggtttggaagccatttttgtaatgaataaatgttcatgctgtacagtatctgtagcatgccgttctggattaataaaagcaacttagtatgtgcagataaa

SEQ ID NO: 283188 - protein, 288 aa, Artificial Sequence
  derived and/or modified sequence
MPQLNGGGGDDLGANDELISFKDEGEQEEKSSENSSAERDLADVKSSLVNESETNQNSSSDSEAERRPPPRSESFRDKSRESLEEAAKRQDGGLFKGPPYPGYPFIMIPDLTSPYLPNGSLSPTARTLHFQSGSTHYSAYKTIEHQIAVQYLQMKWPLLDVQAGSLQSRQALKDARSPSPAHIVSNKVPVVQHPHHVHPLTPLITYSNEHFTPGNPPPHLPADVDPKTGIPRPPHPPDISPYYPLSPGTVGQIPHPLGWQGQPVYPITTGGFRHPYPTALTVNASMSR

SEQ ID NO: 283189 - DNA, 867 bp, Artificial Sequence
  derived and/or modified sequence
atgccccagctgaacggcggcggcggcgacgacctgggcgccaacgacgagctgatcagcttcaaggacgagggcgagcaggaggagaagagcagcgagaacagcagcgccgagagagacctggccgacgtgaagagcagcctggtgaacgagagcgagaccaaccagaacagcagcagcgacagcgaggccgagagaagacccccccccagaagcgagagcttcagagacaagagcagagagagcctggaggaggccgccaagagacaggacggcggcctgttcaagggccccccctaccccggctaccccttcatcatgatccccgacctgaccagcccctacctgcccaacggcagcctgagccccaccgccagaaccctgcacttccagagcggcagcacccactacagcgcctacaagaccatcgagcaccagatcgccgtgcagtacctgcagatgaagtggcccctgctggacgtgcaggccggcagcctgcagagcagacaggccctgaaggacgccagaagccccagccccgcccacatcgtgagcaacaaggtgcccgtggtgcagcacccccaccacgtgcaccccctgacccccctgatcacctacagcaacgagcacttcacccccggcaacccccccccccacctgcccgccgacgtggaccccaagaccggcatccccagacccccccacccccccgacatcagcccctactaccccctgagccccggcaccgtgggccagatcccccaccccctgggctggcagggccagcccgtgtaccccatcaccaccggcggcttcagacacccctaccccaccgccctgaccgtgaacgccagcatgagcagatag

SEQ ID NO: 283190 - DNA, 867 bp, Artificial Sequence
  derived and/or modified sequence
atgccacaactaaacggaggcggaggcgacgacctgggggccaacgatgagctgatatctttcaaggatgagggcgagcaagaggaaaagtcatctgaaaacagctctgctgaaagggatctggctgacgtgaaaagtagtttagtcaatgagtcagaaaccaaccagaattcttcatctgattctgaggccgaacgaagacctccacccaggagtgagtctttccgcgacaagtccagggagagccttgaagaagccgctaaacggcaggatggagggcttttcaaagggccaccttatcctggctaccctttcattatgatcccagatcttaccagtccttatctacctaacgggagtttgtccccaactgctcgcaccctgcattttcaatctgggagtacccactattccgcatacaagacaatcgaacaccagattgccgtgcaatatctgcaaatgaaatggcctttgctggatgtgcaggccggttccctgcagagccgacaagctctgaaggacgctcgcagtcccagtccggctcacattgtctctaataaggttccagtggtacagcacccccaccacgtgcaccctctgaccccgttaatcacgtactccaatgagcactttacccctggaaatccgccacctcacttgccggccgatgttgatcctaaaaccgggattcctcggcccccacacccgccagatattagcccatattatcctctgtcgccaggtactgtgggacagatcccccatcccctcggctggcaggggcaacccgtatacccaatcacgactggaggctttagacatccatatcccacagcgctgactgtgaatgcgagcatgagccgctag

SEQ ID NO: 283191 - DNA, 867 bp, Artificial Sequence
  derived and/or modified sequence
atgccccagctgaatggaggcggcggagatgacctgggcgccaatgatgagctgatctccttcaaggatgaaggagagcaggaggagaagagcagcgagaacagcagcgctgagcgggacctggctgatgtgaagagcagcctggtgaatgaaagtgagaccaaccagaacagcagcagtgacagcgaggccgagcggcggcccccacccaggtctgagagcttccgggacaagagccgggagagcctggaggaggccgccaagaggcaggacggcggcctcttcaagggccccccctacccaggctaccccttcatcatgatcccagacctgaccagcccctacctgcccaacggcagcctgagccccacagcccggaccctgcacttccagagcggcagcacccactacagcgcctacaagaccatcgagcaccagattgctgtgcagtacctgcagatgaagtggcccctgctggatgtgcaggccggcagcctgcagagccggcaggccctgaaggatgcccggagccccagccctgcccacatcgtgagcaacaaggtgcctgtggtgcagcacccccaccacgtgcaccccctgacccccctcatcacctacagcaatgagcacttcaccccaggcaaccccccaccccacctgcctgcagatgtggaccccaagacaggcatccccaggcctccccaccccccagacatcagcccctactaccccctgagccctggcaccgtgggccagatcccccaccccctgggctggcagggccagcctgtgtaccccatcaccactggaggcttccgccacccctaccccacagccctgactgtgaatgcctccatgagcaggtag

SEQ ID NO: 283192 - DNA, 867 bp, Artificial Sequence
  derived and/or modified sequence
atgccccagctgaacggcggcggcggcgacgacctgggcgccaacgatgaactcatatctttcaaagacgagggcgaacaggaagaaaaatcgtcggagaattcaagcgccgagcgggacctggcagacgtcaagtcttcgttagttaatgagagtgagacaaaccagaatagctccagcgattcagaagcagaacggagacctcccccacgaagcgagagttttcgggataaatctcgagagtccctggaagaggccgcgaagcgccaggatggcggattatttaaggggcctccatacccagggtacccattcataatgattcctgatctcacttcaccctacctgcccaacggtagcttgagcccaacagcccggactctgcatttccagagcgggtctactcactacagtgcctataagacgattgaacaccagattgctgtgcagtacctgcagatgaagtggcccctgctggatgtacaggccggatctctgcagtctaggcaggcgctcaaagacgctagatcaccctcccctgctcatatcgtatctaataaggttcccgtggtgcagcatccacatcatgtgcatcctctcactccccttattacatactcaaacgagcacttcacgcccggcaatcctccacctcacctgcccgccgacgttgatcctaagacagggatccccaggccgcctcaccccccggacatttccccatactatcctttgagtcctgggaccgtgggacagatacctcacccactggggtggcagggacagcctgtatatcctatcaccaccggcggtttcagacacccgtaccctacagctctgacagtgaacgcttctatgagtcgatag

SEQ ID NO: 283193 - DNA, 867 bp, Artificial Sequence
  derived and/or modified sequence
atgccccagctcaacgggggaggaggagacgatctgggggctaacgatgagctgatttccttcaaggacgagggcgagcaggaagagaaatcctctgagaatagcagtgcagagcgcgacttggccgacgttaaatctagtcttgtgaatgagagcgagactaaccaaaacagctcaagtgacagtgaggctgaacgacgaccgccaccaagatctgaaagttttagggacaagagccgcgagtctctcgaggaggctgccaagaggcaggatggcggactttttaagggccctccctatcccggatacccgttcatcatgatacccgaccttacaagtccatacctgcccaacggaagcctctccccgaccgccaggactttgcacttccagtccggatccactcactacagtgcctataagaccatcgagcaccagatcgctgtccagtacttgcaaatgaaatggccactgctggatgtccaagccggttcgctgcaaagccggcaggcgcttaaggacgctaggtctcctagcccagcccatatcgttagtaataaagtaccagtggttcagcacccccaccatgtgcatcctttaacaccactaatcacctattctaatgaacacttcacacccggtaatcctccaccccatctgcccgctgacgtggaccccaagaccggaattcccagacctccacaccctcccgacatttccccctattatccgctgtcccctggaacagtgggtcagatacctcatccactcggatggcaagggcagccagtctacccgattacgactggagggtttcgacatccttatccaacagccctgactgtgaacgctagcatgtcgaggtag

SEQ ID NO: 283194 - DNA, 1174 bp, Artificial Sequence
  derived and/or modified sequence
ttttttttttttaccccccttttttatttattatttttttgcacattgatcggatccttgggaacgagagaaaaaagaaacccaaactcacgcgtgcagaagatctccccccccttcccctcccctcctccctcttttcccctccccaggagaaaaagacccccaagcagaaaaaagttcaccttggactcgtctttttcttgcaatattttttgggggggcaaaactttttgggggtgattttttttggcttttcttcctccttcatttttcttccaaaattgctgctggtgggtgaaaaaaaaatgccgcagctgaacggcggtggaggggatgacctaggcgccaacgacgaactgatttccttcaaagacgagggcgaacaggaggagaagagctccgaaaactcctcggcagagagggatttagctgatgtcaaatcgtctctagtcaatgaatcagaaacgaatcaaaacagctcctccgattccgaggcggaaagacggcctccgcctcgctccgaaagtttccgagacaaatcccgggaaagtttggaagaagcggccaagaggcaagatggagggctctttaaggggccaccgtatcccggctaccccttcatcatgatccccgacctgacgagcccctacctccccaacggatcgctctcgcccaccgcccgaaccctccattttcagtccggcagcacacattactctgcgtacaaaacgattgaacaccagattgcagttcagtatctccagatgaaatggccactgcttgatgtccaggcagggagcctccagagtagacaagccctcaaggatgcccggtccccatcaccggcacacattgtctctaacaaagtgccagtggtgcagcaccctcaccatgtccaccccctcacgcctcttatcacgtacagcaatgaacacttcacgccgggaaacccacctccacacttaccagccgacgtagaccccaaaacaggaatcccacggcctccgcaccctccagatatatccccgtattacccactatcgcctggcaccgtaggacaaatcccccatccgctaggatggcaaggtcaaccagtgtacccaatcacgacaggaggattcagacacccctaccccacagctctgaccgtcaatgcttccatgtccaggtgagt

SEQ ID NO: 283195 - protein, 252 aa, Artificial Sequence
  derived and/or modified sequence
MDARVVKDMATGKSKGYGFVSFYNKLDAENAIVHMGGQWLGGRQIRTNWATRKPPAPKSTQENNTKQLRFEDVVNQSSPKNCTVYCGGIASGLTDQLMRQTFSPFGQIMEIRVFPEKGYSFVRFSTHESAAHAIVSVNGTTIEGHVVKCYWGKESPDMTKNFQQVDYSQWGQWSQVYGNPQQYGQYMANGWQVPPYGVYGQPWNQQGFGVDQSPSAAWMGGFGAQPPQGQAPPPVIPPPNQAGYGMASYQTQ

SEQ ID NO: 283196 - DNA, 2317 bp, Artificial Sequence
  derived and/or modified sequence
tcttcacgtcccagcgcgggtgggcgccggcggctcctcttaaccacaggttccagaagtcctctgcagaagtgcttccctctctcatttccaggaccacaattcccagagacttcggcttcacgacgtttctctttttgcccgatctctcccggagctggctgggcttcggccggccagaggcccacagcgacgacgtgatccgtcgtgagcgggtcccagggtttcctcggcggcccttttttctctcccctcggtcgtcccccttgcaggctgtcgcggctggcctgagcggtgacctggcgggtcgcgcctgcgctctgccctgtttcctgcctggctggtggcggcggccattttgttcatcctcctcctcctcctgctcctcctggttggagcgcagtgtccggagcgggctggggggagagagcccgagagcagggttcggtgccttttcctctgtccccagccggtgcccagagcccccctccccttcctccccaccccctcccctccccaaccctgccctcccccttgtcccgggatcgctccgtcgcacccaccatgatggaagacgacgggcagccccggactctatacgtaggtaacctttccagagatgtgacagaagtccttatacttcagttgttcagtcagattggaccctgtaaaagctgtaaaatgataacagagcatacaagcaatgacccatattgctttgtggaattttatgaacacagagatgcagctgctgcattagctgctatgaatgggagaaaaattttgggaaaggaggtcaaagtaaactgggcaaccacaccaagtagccagaaaaaagatacttccaatcacttccatgtgtttgttggggatttgagtccagaaattacaacagaagatatcaaatcagcatttgccccctttggtaaaatatcaattgctcataagaatggacaggatcttgaaggctaactgcaaggaactgtgcacactggaactcagttgtagattttttttctcatttctatttattcttattatacattatttatatatacatattttagtatttacattttaacattctatattcagtggagttctatatttccaatcatttaacttactcactaaaatttctgtgtaaatttgttgttttcgtactggtgtgcttagcattgttgttagttttttattctcctttcttaaatttctgaaaatgtcaatttttcaaaatttacagctgcccaaactccaaaatgatggtagagaattgaccaagaaaaataaagaaatctgttaacaggccatggatgcccgggtagttaaagacatggcaactggaaaatccaaaggctatggttttgtatctttttataacaaactggatgcagaaaatgcgattgtgcatatgggcggtcagtggttgggtggtcgtcaaatccgaaccaattgggccactcgtaaaccacctgcacctaaaagtacacaagaaaacaacactaagcagttgagatttgaagatgtagtaaaccagtcaagtccaaaaaattgtactgtgtactgtggaggaattgcgtctgggttaacagatcagcttatgagacagacattctcaccatttggacaaattatggaaataagagttttcccagaaaagggctattcatttgtcagattttcaacccatgaaagtgcagcccatgccattgtttcggtgaacggtactacgattgaaggacatgtggttaaatgctattggggtaaagaatctcctgatatgactaaaaacttccaacaggttgactatagtcaatggggccaatggagccaagtgtatggaaacccacaacagtatggacagtatatggcaaatgggtggcaagtaccgccttatggagtatacgggcaaccatggaatcaacaaggatttggagtagatcaatcaccttctgctgcttggatgggtggatttggtgctcagcctccccaaggacaagctcctccccctgtaatacctcctcctaaccaagccggatatggtatggcaagttaccaaacacagtgagccgggactctaaaaaaaaattgtaattcatgataggcttcgatttcctgtgacactctgaagacatgaaagtagacatcggaaaatgaaaatatttattttaaaaattgaaatgtttggaacctttagcacagatttgctttggtgaaggacacgtgtcttctagttctgcctttttaagtttttgttcatgatggatatgaacatgatttttctttatgtacaaaaactaaaataaagtcaataaag

SEQ ID NO: 283197 - DNA, 759 bp, Artificial Sequence
  derived and/or modified sequence
atggacgccagagtggtgaaggacatggccaccggcaagagcaagggctacggcttcgtgagcttctacaacaagctggacgccgagaacgccatcgtgcacatgggcggccagtggctgggcggcagacagatcagaaccaactgggccaccagaaagccccccgcccccaagagcacccaggagaacaacaccaagcagctgagattcgaggacgtggtgaaccagagcagccccaagaactgcaccgtgtactgcggcggcatcgccagcggcctgaccgaccagctgatgagacagaccttcagccccttcggccagatcatggagatcagagtgttccccgagaagggctacagcttcgtgagattcagcacccacgagagcgccgcccacgccatcgtgagcgtgaacggcaccaccatcgagggccacgtggtgaagtgctactggggcaaggagagccccgacatgaccaagaacttccagcaggtggactacagccagtggggccagtggagccaggtgtacggcaacccccagcagtacggccagtacatggccaacggctggcaggtgcccccctacggcgtgtacggccagccctggaaccagcagggcttcggcgtggaccagagccccagcgccgcctggatgggcggcttcggcgcccagcccccccagggccaggcccccccccccgtgatccccccccccaaccaggccggctacggcatggccagctaccagacccagtag

SEQ ID NO: 283198 - DNA, 759 bp, Artificial Sequence
  derived and/or modified sequence
atggatgctcgcgtcgtgaaggacatggccaccggcaagagtaagggctacggcttcgtgtctttctataataagctcgacgccgaaaacgccattgtccacatgggagggcagtggctgggggggcgacagattagaacgaactgggccacgcgcaaacctcccgcccccaagagtacacaggagaataacacgaagcagctgcggtttgaagacgtggttaaccaaagtagcccaaagaactgtactgtgtactgtggaggtatcgcgagcggactgacggatcaactcatgcgccagacattttctccattcggacagatcatggagattcgcgttttccctgagaaaggatatagttttgtaaggttcagtacacacgagtccgccgcccatgctatcgtgtccgtgaatggcaccaccatcgaaggccatgtcgtcaagtgttactggggcaaagagagtcccgacatgacgaagaactttcaacaagtggattactcccagtggggacagtggtctcaagtgtatggcaatcctcaacagtatggacagtacatggccaatggctggcaggttcctccttatggagtctatggacaaccctggaaccagcaaggctttggtgttgatcagagccccagcgcagcctggatgggtggctttggcgcccagcccccccagggacaggcgcctcctcccgttattcctcctccaaatcaagctggttatggcatggccagctaccagacgcaatag

SEQ ID NO: 283199 - DNA, 759 bp, Artificial Sequence
  derived and/or modified sequence
atggatgcccgggtggtgaaggacatggccaccgggaagagcaagggctacggctttgtgtccttctacaacaagctggatgctgaaaatgccatcgtgcacatgggcggccagtggctgggcggccggcagatccgcaccaactgggccaccaggaagcccccagcccccaagagcacccaggagaacaacaccaagcagctgcgctttgaagatgtggtgaaccagagcagccccaagaactgcaccgtgtactgcggcggcatcgccagcggcctgacagaccagctgatgaggcagaccttcagccccttcggccagatcatggagatccgggtcttccctgagaagggctacagctttgtgcgcttcagcacccatgaatctgctgcccacgccatcgtgtctgtgaatggcaccaccatcgagggccacgtggtgaagtgctactggggcaaggagagcccagacatgaccaagaacttccagcaggtggactacagccagtggggccagtggagccaggtgtatggcaacccccagcagtatggccagtacatggccaacggctggcaggtgcccccctacggcgtgtatggccagccctggaaccagcagggcttcggcgtggaccagagccccagcgctgcctggatgggcggctttggagcccagcccccccagggccaggcccctcctcctgtgattcctccacccaaccaggccggctacggcatggccagctaccagacccagtag

SEQ ID NO: 283200 - DNA, 759 bp, Artificial Sequence
  derived and/or modified sequence
atggacgcccgggtggtgaaggacatggccaccggcaagagcaagggctatggttttgtctccttctacaataaactggatgcagagaatgcgatagtgcatatgggaggccagtggctgggaggccgacaaattcgcaccaattgggcaaccaggaagccccccgcacctaagtcaacgcaggagaataataccaagcaactgcgattcgaagatgtagtaaaccagagtagccctaagaattgcaccgtgtattgcggagggatcgcctcaggactgactgaccagttgatgagacagacttttagtccatttggccagataatggagattagagtgtttccggagaagggatacagcttcgtgagattcagtacgcatgagtctgcagcccacgccattgtctccgttaatggaaccacaattgagggacatgttgtgaaatgttactggggaaaggaatcacctgacatgacaaagaacttccagcaggtggactactctcagtgggggcaatggtctcaggtctacgggaaccctcagcagtatgggcaatatatggccaacggatggcaggtaccgccttacggagtctacgggcagccttggaaccagcaggggttcggggtggatcagtcgccctctgctgcctggatgggcggatttggcgcacagccaccccagggtcaggcaccccctccagtcattccacctccaaaccaggccggatacggcatggcttcatatcagacccagtag

SEQ ID NO: 283201 - DNA, 759 bp, Artificial Sequence
  derived and/or modified sequence
atggatgctagagttgtaaaggatatggccacaggtaaaagtaaggggtacgggttcgtgtcattctacaacaaactggacgccgagaatgccatcgtgcacatgggcggtcagtggttagggggacgccagattcgaacaaactgggctacgcgaaaacctcctgccccaaagagcacgcaggagaataacacaaaacagctgcgattcgaggatgtagtgaaccagtctagtccaaagaattgcacagtgtactgtggaggtattgcttcgggccttacagatcagttgatgagacaaacgttttcgccattcggccaaattatggagatacgcgtctttcccgagaaagggtactcatttgtgaggttctccacccacgaatctgctgcccatgccatcgtgtctgttaatggtacaaccattgagggacatgtcgtaaagtgttactggggcaaggaatcacccgacatgacaaagaatttccagcaggttgactattctcagtggggacaatggtcacaggtctatggaaaccctcaacagtacggccagtacatggctaatggctggcaggtgcctccttacggagtgtacggacaaccctggaaccagcaaggctttggagtggatcagagtccctcagcagcttggatgggaggttttggagctcagcccccacagggacaagctcctccgccagtgatcccgcctccaaatcaggccggatatggtatggcgtcctatcagacccagtag

SEQ ID NO: 283202 - protein, 248 aa, Artificial Sequence
  derived and/or modified sequence
MWLCPLALTLILMAASGAACEVKDVCVGSPGIPGTPGSHGLPGRDGRDGVKGDPGPPGPMGPPGETPCPPGNNGLPGAPGVPGERGEKGEAGERGPPGLPAHLDEELQATLHDFRHQILQTRGALSLQGSIMTVGEKVFSSNGQSITFDAIQEACARAGGRIAVPRNPEENEAIASFVKKYNTYAYVGLTEGPSPGDFRYSDGTPVNYTNWYRGEPAGRGKEQCVEMYTDGQWNDRNCLYSRLTICEF

SEQ ID NO: 283203 - protein, 158 aa, Artificial Sequence
  derived and/or modified sequence
MWLCPLALTLILMAASGAACEVKDVCVGSPGIPGTPGSHGLPGRDGRDGVKGDPGPPGPMGPPGETPCPPGNNGLPGAPGVPGERGEKGEAGERGPPGLPAHLDEELQATLHDFRHQILQTRGALSLQGSIMTVGEKVFSSNGQSITFDAIQEACARA

SEQ ID NO: 283204 - DNA, 2212 bp, Artificial Sequence
  derived and/or modified sequence
gacttggaggcagagacccaagcagctggaggctctgtgtgtgggtcgctgatttcttggagcctgaaaagaaagtaacacagcagggatgaggacagatggtgtgagtcagtgagagcagcgactggacccagagccatgtggctgtgccctctggccctcaacctcatcttgatggcagcctctggtgctgtgtgcgaagtgaaggacgtttgtgttggaagccctggtatccccggcactcctggatcccacggcctgccaggcagggacgggagagatggtctcaaaggagaccctggccctccaggccccatgggtccacctggagaaatgccatgtcctcctggaaatgatgggctgcctggagcccctggtatccctggagagtgtggagagaagggggagcctggcgagaggggccctccagggcttccagctcatctagatgaggagctccaagccacactccacgactttagacatcaaatcctgcagacaaggggagccctcagtctgcagggctccataatgacagtaggagagaaggtcttctccagcaatgggcagtccatcacttttgatgccattcaggaggcatgtgccagagcaggcggccgcattgctgtcccaaggaatccagaggaaaatgaggccattgcaagcttcgtgaagaagtacaacacatatgcctatgtaggcctgactgagggtcccagccctggagacttccgctactcagacgggacccctgtaaactacaccaactggtaccgaggggagcccgcaggtcggggaaaagagcagtgtgtggagatgtacacagatgggcagtggaatgacaggaactgcctgtactcccgactgaccatctgtgagttctgagaggcatttaggccatgggacagggaggacgctctctggccttcggcctccatcctgaggctccacttggtctgtgagatgctagaactccctttcaacagaattcacttgtggctattgggactggaggcacccttagccacttcattcctctgatgggccctgactcttccccataatcactgaccagccttgacactccccttgcaaactctcccagcactgcaccccaggcagccactcttagccttggccttcgacatgagatggagccctccttattccccatctggtccagttccttcacttacagatggcagcagtgaggtcttggggtagaaggaccctccaaagtcacacaaagtgcctgcctcctggtcccctcagctctctctctgcaacccagtgccatcaggatgagcaatcctggccaagcataatgacagagagaggcagacttcggggaagccctgactgtgcagagctaaggacacagtggagattctctggcactctgaggtctctgtggcaggcctggtcaggctctccatgaggttagaaggccaggtagtgttccagcagggtggtggccaagccaaccccatgattgatgtgtacgattcactcctttgagtctttgaatggcaactcagccccctgacctgaagacagccagcctaggcctctagggtgacctagagccgccttcagatgtgacccgagtaactttcaactgatgaacaaatctgcaccctacttcagatttcagtgggcattcacaccaccccccacaccactggctctgctttctcctttcattaatccattcacccagatatttcattaaaattatcacgtgccaggtcttaggatatgtcgtggggtgggcaaggtaatcagtgacagttgaagatttttttttcccagagcttatgtcttcatctgtgaaatgggaataagatacttgttgctgtcacagttattaccatccccccagctaccaaaattactaccagaactgttactatacacagaggctattgactgagcacctatcatttgccaagaaccttgacaagcacttctaatacagcatattatgtactattcaatctttacacaatgtcacgggaccagtattgtttcctcattttttataaggacactgaagcttggaggagttaaatgttttgagtattattccagagagcaagtggcagaggctggatccaaacccatcttcctggacctgaagcttatgcttccagccaccccactcctgagctgaataaagatgatttaagcttaataaatcgtgaatgtgttc

SEQ ID NO: 283205 - DNA, 596 bp, Artificial Sequence
  derived and/or modified sequence
cccaagcagctggaggctctgtgtgtgggtcgctgatttcttggagcctgaaaagaaagtaacacagcagggatgaggacagatggtgtgagtcagtgagagcagcgactggacccagagccatgtggctgtgccctctggccctcaacctcatcttgatggcagcctctggtgctgtgtgcgaagtgaaggacgtttgtgttggaagccctggtatccccggcactcctggatcccacggcctgccaggcagggacgggagagatggtctcaaaggagaccctggccctccaggccccatgggtccacctggagaaatgccatgtcctcctggaaatgatgggctgcctggagcccctggtatccctggagagtgtggagagaagggggagcctggcgagaggggccctccagggcttccagctcatctagatgaggagctccaagccacactccacgactttagacatcaaatcctgcagacaaggggagccctcagtctgcagggctccataatgacagtaggagagaaggtcttctccagcaatgggcagtccatcacttttgatgccattcaggaggcatgtgccagagca

SEQ ID NO: 283206 - DNA, 2189 bp, Artificial Sequence
  derived and/or modified sequence
gagacccaagcagctggaggctctgtgtgtgggtcgctgatttcttggagcctgaaaagaaggagcagcgactggacccagagccatgtggctgtgccctctggccctcaccctcatcttgatggcagcctctggtgctgcgtgcgaagtgaaggacgtttgtgttggaagccctggtatccccggcactcctggatcccacggcctgccaggcagggacgggagagatggtgtcaaaggagaccctggccctccaggccccatgggtccgcctggagaaacaccatgtcctcctgggaataatgggctgcctggagcccctggtgtccctggagagcgtggagagaagggggaggctggcgagagaggccctccagggcttccagctcatctagatgaggagctccaagccacactccacgacttcagacatcaaatcctgcagacaaggggagccctcagtctgcagggctccataatgacagtaggagagaaggtcttctccagcaatgggcagtccatcacttttgatgccattcaggaggcatgtgccagagcaggcggccgcattgctgtcccaaggaatccagaggaaaatgaggccattgcaagcttcgtgaagaagtacaacacatatgcctatgtaggcctgactgagggtcccagccctggagacttccgctactcagatgggacccctgtaaactacaccaactggtaccgaggggagcctgcaggtcggggaaaagagcagtgtgtggagatgtacacagatgggcagtggaatgacaggaactgcctgtactcccgactgaccatctgtgagttctgagaggcatttaggccatgggacagggaggatcctgtctggccttcagtttccatccccaggatccacttggtctgtgagatgctagaactccctttcaacagaattcacttgtggctattagagctggaggcacccttagccacttcattcccctgatgggccctgactcttccccataatcactgaccagccttgacactccccttgcaaaccatcccagcactgcaccccaggcagccactcctagccttggcctttggcatgagatggaggcctccttattccccatctggtccagttccttcacttacagatggcagcagtgaggccttggggtagaaggatcctccaaagtcacacagagtgcctgcctcctggtcccctcagctctgcctctgcagcccactgcctgcccagtgccatcaggatgagcagtaccggccaagcataatgacagagagaggcagatttcagggaagccctgactgtgtggagctaaggacacagtggagattctctggcactctgaggtctctgtggcaggcctggtcaggctctccaggtggtcagagggcccagtggtgccccagcacggtggtgcccaagccaaccctgtgactgacatgtacgattcactcctttgagtctttggatgccaactcagccccctgacctggaggcagccggccaaggcctctagggaagagccccccactgcagacatgacccgagtaactttctgctgatgaacaaatctgcaccccacttcagacctcggtgggcattcacaccaccccccatgccaccggctccactttccccttttattaatacattcacccagataatcattaaaattaacatgtgccaggtcttaggatgtgtcttggggtgggcacagtacccggtgactcttggggatatttatttattttccctgagcctatatcttcatctgtgaaatggggataaaaatacttgttgctgtcacaattattaccatctctccagctagcaaaattactaccagagccgttactacacacaaaggctattgaccgagcacataccatgtgccacacaccttgacaaaatcttttaatacagtttattatgtactattcaatctttacacaatgtcacgggaccagtattgtttacccaattttttataaggacactgaagcttagaggagtgaaatgttttgagtgttatttcagagagcaaatggcaaagactggatccaaacccatcttcctggacctgaagttcatgctcccagccaccccacccctgagctgaataaagatgatttaagcataataaatcgttagtgtgttcacatgagtttccata

SEQ ID NO: 283207 - DNA, 1425 bp, Artificial Sequence
  derived and/or modified sequence
cagagacccaagcagctggaggctctgtgtgtgggagcagcgactggacccagagccatgtggctgtgccctctggccctcaccctcatcttgatggcagcctctggtgctgcgtgcgaagtgaaggacgtttgtgttggaagccctggtatccccggcactcctggatcccacggcctgccaggcagggacgggagagatggtgtcaaaggagaccctggccctccaggccccatgggtccgcctggagaaacaccatgtcctcctgggaataatgggctgcctggagcccctggtgtccctggagagcgtggagagaagggggaggctggcgagagaggccctccagggcttccagctcatctagatgaggagctccaagccacactccacgacttcagacatcaaatcctgcagacaaggggagccctcagtctgcagggctccataatgacagtaggagagaaggtcttctccagcaatgggcagtccatcacttttgatgccattcaggaggcatgtgccagagcaggcggccgcattgctgtcccaaggaatccagaggaaaatgaggccattgcaagcttcgtgaagaagtacaacacatatgcctatgtaggcctgactgagggtcccagccctggagacttccgctactcagatgggacccctgtaaactacaccaactggtaccgaggggagcctgcaggtcggggaaaagagcagtgtgtggagatgtacacagatgggcagtggaatgacaggaactgcctgtactcccgactgaccatctgtgagttctgagaggcatttaggccatgggacagggaggatcctgtctggccttcagtttccatccccaggatccacttggtctgtgagatgctagaactccctttcaacagaattcacttgtggctattagagctggaggcacccttagccacttcattcccctgatgggccctgactcttccccataatcactgaccagccttgacactccccttgcaaaccatcccagcactgcaccccaggcagccactcctagccttggcctttggcatgagatggaggcctccttattccccatctggtccagttccttcacttacagatggcagcagtgaggccttggggtagaaggatcctccaaagtcacacagagtgcctgcctcctggtcccctcagctctgcctctgcagcccactgcctgcccagtgccatcaggatgagcagtaccggccaagcataatgacagagagaggcagatttcagggaagccctgactgtgtggagctaaggacacagtggagattctctggcactctgaggtctctgtggcaggcctggtcaggctctccaggtggtcagagggcccagtggtgccccagcacggtggtgcccaagccaaccctgtgactg

SEQ ID NO: 283208 - DNA, 726 bp, Artificial Sequence
  derived and/or modified sequence
cagagacccaagcagctggaggctctgtgtgtggatccatccctaccagggactcagcagggcctaagcagggggagtgggagaacagaccccaagaggaaggaagacctcatcactgactgtgagagggtcatcaccccccgatgatcaccttgaagggtccaggctgtgggccctattcatctcttttcattctcaggtcgctgatttcttggagcctgaaaagaaggagcagcgactggacccagagccatgtggctgtgccctctggccctcaccctcatcttgatggcagcctctggtgctgcgtgcgaagtgaaggacgtttgtgttggaagccctggtatccccggcactcctggatcccacggcctgccaggcagggacgggagagatggtgtcaaaggagaccctggccctccaggccccatgggtccgcctggagaaacaccatgtcctcctgggaataatgggctgcctggagcccctggtgtccctggagagcgtggagagaagggggaggctggcgagagaggccctccagggcttccagctcatctagatgaggagctccaagccacactccacgacttcagacatcaaatcctgcagacaaggggagccctcagtctgcagggctccataatgacagtaggagagaaggtcttctccagcaatgggcagtccatcacttttgatgccattcaggaggcatgtgccagagca

SEQ ID NO: 283209 - DNA, 747 bp, Artificial Sequence
  derived and/or modified sequence
atgtggctgtgccccctggccctgaccctgatcctgatggccgccagcggcgccgcctgcgaggtgaaggacgtgtgcgtgggcagccccggcatccccggcacccccggcagccacggcctgcccggcagagacggcagagacggcgtgaagggcgaccccggcccccccggccccatgggcccccccggcgagaccccctgcccccccggcaacaacggcctgcccggcgcccccggcgtgcccggcgagagaggcgagaagggcgaggccggcgagagaggcccccccggcctgcccgcccacctggacgaggagctgcaggccaccctgcacgacttcagacaccagatcctgcagaccagaggcgccctgagcctgcagggcagcatcatgaccgtgggcgagaaggtgttcagcagcaacggccagagcatcaccttcgacgccatccaggaggcctgcgccagagccggcggcagaatcgccgtgcccagaaaccccgaggagaacgaggccatcgccagcttcgtgaagaagtacaacacctacgcctacgtgggcctgaccgagggccccagccccggcgacttcagatacagcgacggcacccccgtgaactacaccaactggtacagaggcgagcccgccggcagaggcaaggagcagtgcgtggagatgtacaccgacggccagtggaacgacagaaactgcctgtacagcagactgaccatctgcgagttctag

SEQ ID NO: 283210 - DNA, 477 bp, Artificial Sequence
  derived and/or modified sequence
atgtggctgtgccccctggccctgaccctgatcctgatggccgccagcggcgccgcctgcgaggtgaaggacgtgtgcgtgggcagccccggcatccccggcacccccggcagccacggcctgcccggcagagacggcagagacggcgtgaagggcgaccccggcccccccggccccatgggcccccccggcgagaccccctgcccccccggcaacaacggcctgcccggcgcccccggcgtgcccggcgagagaggcgagaagggcgaggccggcgagagaggcccccccggcctgcccgcccacctggacgaggagctgcaggccaccctgcacgacttcagacaccagatcctgcagaccagaggcgccctgagcctgcagggcagcatcatgaccgtgggcgagaaggtgttcagcagcaacggccagagcatcaccttcgacgccatccaggaggcctgcgccagagcctag

SEQ ID NO: 283211 - DNA, 747 bp, Artificial Sequence
  derived and/or modified sequence
atgtggctgtgtccacttgccctaaccctgatcttaatggccgcatccggtgcagcatgtgaagtgaaggatgtgtgtgtaggcagtcccggcatcccggggacaccaggatcacatggccttcctgggcgtgacggccgagacggggtcaaaggcgaccccggccctccaggccccatgggaccacccggcgaaacgccgtgcccgcctggcaacaatgggttgcctggagctccgggtgtgccaggcgaacggggtgagaagggcgaggccggggaacggggccccccgggattgcccgcccatcttgatgaagaactgcaggccacactgcatgacttcaggcaccagatcctacagactagaggtgccctgtcccttcagggtagcatcatgacagtgggagaaaaggtgtttagttcaaatggacaaagcattaccttcgatgcaatccaggaagcctgcgcaagggctggaggaagaatagccgtcccccgtaaccccgaagagaatgaggcaatagccagcttcgtgaagaagtataatacctatgcctacgttggcctgacagaagggcctagccctggcgactttaggtattcggacggcaccccggtcaactacactaactggtatcgcggggagcctgccggcagagggaaagagcaatgtgtggaaatgtatactgatggccagtggaacgatcgcaattgtctttacagtcgcctgactatatgcgaattttag

SEQ ID NO: 283212 - DNA, 747 bp, Artificial Sequence
  derived and/or modified sequence
atgtggctgtgtcccctcgctctgaccctcatcctcatggcggctagtggtgccgcctgtgaagtaaaggatgtgtgcgttggtagcccaggaattcccggcactcctggaagccatggcctgcccggcagagacgggagggacggtgtcaaaggggatcctggacctcccggccctatggggccaccaggggaaacgccttgccccccaggtaataatggtttgcctggcgcccccggcgtgcccggagaacggggcgaaaaaggagaggcgggggagaggggacctcctgggcttcctgcccaccttgatgaggagttgcaggcaaccctgcatgattttagacatcagattcttcagacacgaggggccttgtctctccagggatccattatgactgtgggcgaaaaggtcttctccagtaacgggcaatccattacgtttgacgccatccaggaagcctgtgctcgggcagggggccgcatcgcagtgccccgaaatccagaggagaacgaagcgattgcaagctttgtcaagaagtataacacctacgcatacgtcggtctgaccgaggggccctcccccggggacttcaggtatagcgatgggacccctgttaactacaccaactggtataggggggagccagccggccgtggcaaggagcagtgcgtcgagatgtatacagacggccaatggaacgatcggaattgtctctattcaagactaactatctgcgagttttag

SEQ ID NO: 283213 - DNA, 477 bp, Artificial Sequence
  derived and/or modified sequence
atgtggctgtgtccattggcactaaccctgattcttatggccgcctctggggccgcctgcgaggtgaaggatgtgtgcgtcggatcacccggtattccaggaacaccaggctcccatgggttgccgggccgggatgggcgagatggcgtaaagggagatcccggaccccctggacctatggggccgccaggcgagactccttgccccccaggcaacaatggcttgccgggggcaccaggcgtgccaggggaaagaggggagaagggggaagctggcgagaggggccctcccggtttaccagctcatctcgatgaagaactgcaggcaacgctgcacgactttcgccaccagatcctgcagacacgcggcgccctttcgctccaaggctctattatgacagttggagagaaggtttttagcagcaacggccagtctatcacctttgatgccatccaggaggcttgtgcaagggcttag

SEQ ID NO: 283214 - DNA, 747 bp, Artificial Sequence
  derived and/or modified sequence
atgtggctgtgccccctggccctgaccctcatcctgatggccgccagcggggccgcctgtgaggtgaaggatgtgtgtgtgggcagccctggcatccctggcaccccaggcagccacggcctgcccggcagagatggaagagatggagtgaagggggaccccggccccccaggccccatgggccccccaggagagaccccctgccccccaggcaacaacggcctgcccggggcccctggggtgcctggagagcggggggagaagggggaggccggggagcggggccccccaggcctgcctgcccacctggatgaggagctgcaggccaccctgcatgacttccgccaccagatcctgcagaccaggggggccctgagcctgcagggcagcatcatgacagtgggggagaaggtgttcagcagcaatggccagagcatcacctttgatgccatccaggaggcctgtgcccgggccggcggcagaattgctgtgcccaggaaccctgaggagaatgaggccatcgccagctttgtgaagaagtacaacacctacgcctacgtgggcctgacagagggccccagccctggggacttccgctacagtgatggcacccctgtgaactacaccaactggtacagaggagagcctgctggccggggcaaggagcagtgtgtggagatgtacacagatggccagtggaatgacaggaactgcctgtacagccggctgaccatctgtgagttctag

SEQ ID NO: 283215 - DNA, 477 bp, Artificial Sequence
  derived and/or modified sequence
atgtggctgtgccccctggccctgaccctcatcctgatggccgccagcggggccgcctgtgaggtgaaggatgtgtgtgtgggcagccctggcatccctggcaccccaggcagccacggcctgcccggcagagatggaagagatggagtgaagggggaccccggccccccaggccccatgggccccccaggagagaccccctgccccccaggcaacaacggcctgcccggggcccctggggtgcctggagagcggggggagaagggggaggccggggagcggggccccccaggcctgcctgcccacctggatgaggagctgcaggccaccctgcatgacttccgccaccagatcctgcagaccaggggggccctgagcctgcagggcagcatcatgacagtgggggagaaggtgttcagcagcaatggccagagcatcacctttgatgccatccaggaggcctgtgcccgggcctag

SEQ ID NO: 283216 - DNA, 747 bp, Artificial Sequence
  derived and/or modified sequence
atgtggctgtgccccctggccctgaccctgatcctgatggccgcctccggggccgcatgtgaggtgaaggatgtgtgcgtgggaagtcccggcataccaggcactcctggatcacatggccttcccgggcgggacgggcgagacggtgtcaagggagaccctggccccccaggtcctatgggcccgcccggagagactccctgcccccctggtaacaacggactaccaggtgctcctggcgtgccgggggagcggggtgaaaagggggaggctggtgagcggggcccccccggcctgccagcccatctcgacgaggagctgcaggctaccttacatgactttcggcaccaaatattgcagacccgtggggccctgtccctgcaaggctctataatgaccgttggcgagaaagtgtttagttctaacggtcagagcatcaccttcgacgctattcaggaggcctgcgcccgcgcaggtggacggatagccgttccaaggaacccagaggaaaatgaagctatcgccagctttgtaaagaagtataacacctatgcctatgtggggttaacagagggcccaagccccggggatttcaggtactcagacggcactcccgtgaattatacaaattggtaccgcggagagccggccggcagaggaaaggagcagtgtgtggaaatgtatacagacggccagtggaatgatagaaactgtctgtacagccggctgaccatctgcgagttttag

SEQ ID NO: 283217 - DNA, 747 bp, Artificial Sequence
  derived and/or modified sequence
atgtggctgtgccccctggccctgaccctgatcctgatggccgcctctggcgctgcttgcgaggttaaggatgtgtgtgtgggcagcccagggatcccaggaacaccaggatctcatggcctgcccggaagagatggacgagatggagtcaaaggggaccctggcccacctggacccatggggcccccaggcgaaactccttgcccacctggcaacaacggcctgccgggggctcccggggtgcccggggaaaggggggagaagggagaggctggcgagcggggtcccccaggactaccagcccatctcgacgaagagctgcaggccactctccacgactttcggcatcagatcctccagacaagaggtgctctgtcactacagggcagcatcatgacagtgggagagaaagtattctcatccaatggccagtccattacattcgacgctattcaagaagcttgtgcgagggccggaggaaggatcgctgtgccccggaaccctgaagagaatgaagcgattgccagttttgtgaagaagtacaacacctatgcttatgttgggctgaccgagggtccctcacccggtgattttcgatatagtgacggcaccccagtcaattacacgaactggtataggggagagccggccgggagaggcaaagaacagtgcgtggagatgtacactgatggccagtggaacgataggaattgtctgtacagccgcctgaccatatgtgagttctag

SEQ ID NO: 283218 - DNA, 477 bp, Artificial Sequence
  derived and/or modified sequence
atgtggctgtgccccctggccctgaccctgatcctgatggccgccagcggcgctgcatgcgaggtgaaggatgtttgtgtgggcagccctgggataccaggcacccctgggtcgcacggactacccggtagagacggtagagatggtgtaaagggcgaccccggaccccctggccccatgggcccaccaggggagaccccttgtccacccggtaataatggactgccaggcgctccaggcgtcccgggagaaagaggcgagaagggagaagccggggaaagggggcccccggggctgccagcccatctggatgaagaactgcaggccacactgcacgactttaggcaccagatccttcagactcgcggcgcactgtctctgcagggaagcatcatgaccgtgggggagaaagtattctccagcaacgggcaatcaattactttcgacgcaattcaagaggcctgcgcccgagcatag

SEQ ID NO: 283219 - DNA, 747 bp, Artificial Sequence
  derived and/or modified sequence
atgtggctttgtcctctggccctcaccctgattctcatggccgcaagcggcgctgcctgcgaagtaaaggacgtatgtgtgggctctccaggcatacccggaacccccggaagccatggactgcccggtcgagacggcagagacggggttaaaggcgacccgggaccccctggacctatgggaccccctggcgaaacgccctgtccccctggtaacaatggtctcccaggcgctcctggagtccctggcgagcgcggagagaaaggggaggccggagagcgcggtcctccgggacttcctgctcatctggatgaggagctgcaggcaactctacacgattttagacatcagatcttacaaacacgaggtgccttatcactgcagggcagcattatgactgttggggagaaagtttttagcagcaacggacaatccataaccttcgacgctatccaggaggcttgcgcacgcgctggcggacgcatcgctgtgccccgaaaccccgaagaaaatgaagctatcgccagcttcgtgaagaagtataacacctacgcatatgttggtcttactgaaggaccttctccgggagacttccggtacagtgacggtacacccgtgaattacacaaattggtacagaggcgaacccgctggcaggggcaaggagcaatgtgtggagatgtacacagacggacaatggaacgatcgaaactgtctgtattctaggctcaccatttgtgaattctag

SEQ ID NO: 283220 - DNA, 747 bp, Artificial Sequence
  derived and/or modified sequence
atgtggttgtgcccactggccctaacacttatcctgatggctgcttccggcgcagcctgtgaggttaaggacgtgtgtgtgggaagcccagggattccaggaacacctggaagccacggtctgccaggacgcgatggaagagatggggtaaaaggtgaccccggtcctccgggacccatgggaccacccggagagacaccatgtcccccagggaacaatgggttgcccggagcccctggcgtgccaggcgaacgcggtgaaaagggcgaggcgggagagagagggcctcctggcttaccggctcatctggacgaggaactacaagcaactcttcacgatttcaggcaccagatcctgcagacacgaggagctcttagcctgcagggaagcatcatgacagtcggggagaaagtgtttagtagcaatgggcagagtattacatttgatgccatacaagaggcctgtgcccgagcaggcggacgcatcgccgtgcctcgaaaccccgaggaaaacgaggcaattgcatctttcgtgaaaaagtacaacacctacgcctatgtgggactgacggaaggaccctccccaggcgactttagatacagtgatgggaccccggtcaattacacaaactggtacaggggagagcccgcaggccgtggtaaagaacagtgcgtcgaaatgtacacagacggacaatggaacgatcggaactgcctatacagtagactgacaatatgtgagttctag

SEQ ID NO: 283221 - DNA, 477 bp, Artificial Sequence
  derived and/or modified sequence
atgtggctctgcccacttgccctgaccctgattttgatggctgcctccggggcagcatgcgaggtaaaagacgtatgtgtcggcagtcccggaattcccggtacacccggatcacacggtcttcctgggagagacggccgtgatggcgtgaagggggatcctggtcctccaggcccaatgggcccacctggggaaacaccttgtccacctggcaacaatgggctgcctggcgcaccgggagttcctggagagaggggtgagaaaggcgaggccggagagcggggaccacctggcctgcctgcccaccttgatgaggagctgcaggccaccttacacgatttcagacatcaaatcctccagacccgtggggcactgtctctccagggtagtatcatgacagtgggcgagaaagtattttcatccaatggacagtcaatcaccttcgacgccattcaggaagcctgtgcaagggcttag

SEQ ID NO: 283222 - protein, 621 aa, Artificial Sequence
  derived and/or modified sequence
MAAQVVGGTQACEGGWSQGLPLPPPPPPAAQLPPIVSQGNAGPWPQGAHGESSLASSQAKAPPDDSCNPRSVYENFRLWQHYKPLARRHLPQSPDTEALSCFLIPVLRSLARRKPTMTLEEGLWRAMREWQHTSNFDRMIFYEMAEKFLEFEAEEEMQIQKSQWMKGPQCLPPPATPRLEPRGPPAPEVVKQPVYLPSKAGPKAPTACLPPPRPQRPVTKARRPPPRPHRRAETKARLPPPRPQRPAETKVPEEIPPEVVQEYVDIMEELLGPSLGATGEPEKQREEGKVKQPQEEDWTPPDPGLLSYIDKLCSQKDFVTKVEAVIHPQFLEELLSPDPQMDFLALSQDLEQEEGLTLAQLVEKRLPPLKEKQHARAAPSRGTARLDSSSSKFAAGQGAERDVPDPQQGVGMETCPPQMTARDSQGRGRAHTGMARSEDSVVLLGCQDSPGLRAAWPTSPPQDHRPTCPGVGTKDALDLPGGSPVRESHGLAQGSSEEEELPSLAFLLGSQHKLLPWWLPQSPVPASGLLSPEKWGPQGTHQSPSAERRGLNLAPSPANKAKKRPLFGSLSPAEKTPYPGPGLRVSGEQSLTWGLGGPSQSQKRKGDPLVSRKEKKQHCSQ

SEQ ID NO: 283223 - protein, 878 aa, Artificial Sequence
  derived and/or modified sequence
MEVKGPSGRSFCCESEGQFKSCLKRHTPSLLLPSSWKGNSGSCLMAEALHRTSPTPNSCPLPLPLCRMSGVLCSRNLFTFKFSLFQLDSGASGEPGHSLGLTLGFSYCGNCQTAVVSAQPEGMASNGAYPVLGPGVTANPGTSLSVFTALPFTTPAPGPAHGPLLVTAGAPPGGPLVLSTFPSTPLVTEQDGCGPSGAGASNVFVQMRTEVGPVKAAQAQTLVLTQAPLVWQAPGALCGGVVCPPPLLLAAAPVVPVMAAQVVGGTQACEGGWSQGLPLPPPPPPAAQLPPIVSQGNAGPWPQGAHGESSLASSQAKAPPDDSCNPRSVYENFRLWQHYKPLARRHLPQSPDTEALSCFLIPVLRSLARRKPTMTLEEGLWRAMREWQHTSNFDRMIFYEMAEKFLEFEAEEEMQIQKSQWMKGPQCLPPPATPRLEPRGPPAPEVVKQPVYLPSKAGPKAPTACLPPPRPQRPVTKARRPPPRPHRRAETKARLPPPRPQRPAETKVPEEIPPEVVQEYVDIMEELLGPSLGATGEPEKQREEGKVKQPQEEDWTPPDPGLLSYIDKLCSQKDFVTKVEAVIHPQFLEELLSPDPQMDFLALSQDLEQEEGLTLAQLVEKRLPPLKEKQHARAAPSRGTARLDSSSSKFAAGQGAERDVPDPQQGVGMETCPPQMTARDSQGRGRAHTGMARSEDSVVLLGCQDSPGLRAAWPTSPPQDHRPTCPGVGTKDALDLPGGSPVRESHGLAQGSSEEEELPSLAFLLGSQHKLLPWWLPQSPVPASGLLSPEKWGPQGTHQSPSAERRGLNLAPSPANKAKKRPLFGSLSPAEKTPYPGPGLRVSGEQSLTWGLGGPSQSQKRKGDPLVSRKEKKQHCSQ

SEQ ID NO: 283224 - protein, 878 aa, Artificial Sequence
  derived and/or modified sequence
MEVKGPSGRSFCCESEGQFKSCLKRHTPSLLLPSSWKGNSGSCLMAEALHRTSPTPNSCPLPLPLCRMSGVLCSRNLFTFKFSLFQLDSGASGEPGHSLGLTLGFSYCGNCQTAVVSAQPEGMASNGAYPVLGPGVTANPGTSLSVFTALPFTTPAPGPAHGPLLVTAGAPPGGPLVLSTFPSTPLVTEQDGCSPSGAGASNVFVQMRTEVGPVKAAQAQTLVLTQAPLVWQAPGALCGGVVCPPPLLLAAAPVVPVMAAQVVGGTQACEGGWSQGLPLPPPPPPAAQLPPIVSQGNAGPWPQGAHGESSLASSQAKAPPDDSCNPRSVYENFRLWQHYKPLARRHLPQSPDTEALSCFLIPVLRSLARRKPTMTLEEGLWRAMREWQHTSNFDRMIFYEMAEKFLEFEAEEEMQIQKSQWMKGPQCLPPPATPRLEPRGPPAPEVVKQPVYLPSKAGPKAQTACLPPPRPQRPVTKARRPPPQPHRRAETKARLPPPRPQRPAETKVPEEIPPEVVQEYVDIMEELLGPSLGATGEPEKQREEGKVKQPQEEDWTPPDPGLLSYIDKLCSQKDFVTKVEAVIHPQFLEELLSPDPQMDFLALSQDLEQEEGLTLAQLVEKRLPPLKEKQHSRAAPSRGTARLDSSSSKFAAGQGAERDVPDPQEGVGMETCPPQTTARDSQGRGRAHTGMARSEDSVVLLGCQDSPGLRAARPTSPPQDHRPTCPGVGTKDALDLPGGSPVRESHGLAQGSSEEEELPSLAFLLGSQHKLLPWWLPQSPVPASGLLSPEKWGPQGTHQSPSAERRGLNLAPSPANKAKKQPLFGSLSPAEKTPHRGPGLRVSGEQSLTWGLGGPSQSQKRKGDPLVSRKEKKQHCSQ

SEQ ID NO: 283225 - DNA, 1866 bp, Artificial Sequence
  derived and/or modified sequence
atggccgcccaggtggtgggcggcacccaggcctgcgagggcggctggagccagggcctgcccctgccccccccccccccccccgccgcccagctgccccccatcgtgagccagggcaacgccggcccctggccccagggcgcccacggcgagagcagcctggccagcagccaggccaaggccccccccgacgacagctgcaaccccagaagcgtgtacgagaacttcagactgtggcagcactacaagcccctggccagaagacacctgccccagagccccgacaccgaggccctgagctgcttcctgatccccgtgctgagaagcctggccagaagaaagcccaccatgaccctggaggagggcctgtggagagccatgagagagtggcagcacaccagcaacttcgacagaatgatcttctacgagatggccgagaagttcctggagttcgaggccgaggaggagatgcagatccagaagagccagtggatgaagggcccccagtgcctgcccccccccgccacccccagactggagcccagaggcccccccgcccccgaggtggtgaagcagcccgtgtacctgcccagcaaggccggccccaaggcccccaccgcctgcctgcccccccccagaccccagagacccgtgaccaaggccagaagacccccccccagaccccacagaagagccgagaccaaggccagactgcccccccccagaccccagagacccgccgagaccaaggtgcccgaggagatcccccccgaggtggtgcaggagtacgtggacatcatggaggagctgctgggccccagcctgggcgccaccggcgagcccgagaagcagagagaggagggcaaggtgaagcagccccaggaggaggactggaccccccccgaccccggcctgctgagctacatcgacaagctgtgcagccagaaggacttcgtgaccaaggtggaggccgtgatccacccccagttcctggaggagctgctgagccccgacccccagatggacttcctggccctgagccaggacctggagcaggaggagggcctgaccctggcccagctggtggagaagagactgccccccctgaaggagaagcagcacgccagagccgcccccagcagaggcaccgccagactggacagcagcagcagcaagttcgccgccggccagggcgccgagagagacgtgcccgacccccagcagggcgtgggcatggagacctgccccccccagatgaccgccagagacagccagggcagaggcagagcccacaccggcatggccagaagcgaggacagcgtggtgctgctgggctgccaggacagccccggcctgagagccgcctggcccaccagccccccccaggaccacagacccacctgccccggcgtgggcaccaaggacgccctggacctgcccggcggcagccccgtgagagagagccacggcctggcccagggcagcagcgaggaggaggagctgcccagcctggccttcctgctgggcagccagcacaagctgctgccctggtggctgccccagagccccgtgcccgccagcggcctgctgagccccgagaagtggggcccccagggcacccaccagagccccagcgccgagagaagaggcctgaacctggcccccagccccgccaacaaggccaagaagagacccctgttcggcagcctgagccccgccgagaagaccccctaccccggccccggcctgagagtgagcggcgagcagagcctgacctggggcctgggcggccccagccagagccagaagagaaagggcgaccccctggtgagcagaaaggagaagaagcagcactgcagccagtag

SEQ ID NO: 283226 - DNA, 2637 bp, Artificial Sequence
  derived and/or modified sequence
atggaggtgaagggccccagcggcagaagcttctgctgcgagagcgagggccagttcaagagctgcctgaagagacacacccccagcctgctgctgcccagcagctggaagggcaacagcggcagctgcctgatggccgaggccctgcacagaaccagccccacccccaacagctgccccctgcccctgcccctgtgcagaatgagcggcgtgctgtgcagcagaaacctgttcaccttcaagttcagcctgttccagctggacagcggcgccagcggcgagcccggccacagcctgggcctgaccctgggcttcagctactgcggcaactgccagaccgccgtggtgagcgcccagcccgagggcatggccagcaacggcgcctaccccgtgctgggccccggcgtgaccgccaaccccggcaccagcctgagcgtgttcaccgccctgcccttcaccacccccgcccccggccccgcccacggccccctgctggtgaccgccggcgccccccccggcggccccctggtgctgagcaccttccccagcacccccctggtgaccgagcaggacggctgcggccccagcggcgccggcgccagcaacgtgttcgtgcagatgagaaccgaggtgggccccgtgaaggccgcccaggcccagaccctggtgctgacccaggcccccctggtgtggcaggcccccggcgccctgtgcggcggcgtggtgtgccccccccccctgctgctggccgccgcccccgtggtgcccgtgatggccgcccaggtggtgggcggcacccaggcctgcgagggcggctggagccagggcctgcccctgccccccccccccccccccgccgcccagctgccccccatcgtgagccagggcaacgccggcccctggccccagggcgcccacggcgagagcagcctggccagcagccaggccaaggccccccccgacgacagctgcaaccccagaagcgtgtacgagaacttcagactgtggcagcactacaagcccctggccagaagacacctgccccagagccccgacaccgaggccctgagctgcttcctgatccccgtgctgagaagcctggccagaagaaagcccaccatgaccctggaggagggcctgtggagagccatgagagagtggcagcacaccagcaacttcgacagaatgatcttctacgagatggccgagaagttcctggagttcgaggccgaggaggagatgcagatccagaagagccagtggatgaagggcccccagtgcctgcccccccccgccacccccagactggagcccagaggcccccccgcccccgaggtggtgaagcagcccgtgtacctgcccagcaaggccggccccaaggcccccaccgcctgcctgcccccccccagaccccagagacccgtgaccaaggccagaagacccccccccagaccccacagaagagccgagaccaaggccagactgcccccccccagaccccagagacccgccgagaccaaggtgcccgaggagatcccccccgaggtggtgcaggagtacgtggacatcatggaggagctgctgggccccagcctgggcgccaccggcgagcccgagaagcagagagaggagggcaaggtgaagcagccccaggaggaggactggaccccccccgaccccggcctgctgagctacatcgacaagctgtgcagccagaaggacttcgtgaccaaggtggaggccgtgatccacccccagttcctggaggagctgctgagccccgacccccagatggacttcctggccctgagccaggacctggagcaggaggagggcctgaccctggcccagctggtggagaagagactgccccccctgaaggagaagcagcacgccagagccgcccccagcagaggcaccgccagactggacagcagcagcagcaagttcgccgccggccagggcgccgagagagacgtgcccgacccccagcagggcgtgggcatggagacctgccccccccagatgaccgccagagacagccagggcagaggcagagcccacaccggcatggccagaagcgaggacagcgtggtgctgctgggctgccaggacagccccggcctgagagccgcctggcccaccagccccccccaggaccacagacccacctgccccggcgtgggcaccaaggacgccctggacctgcccggcggcagccccgtgagagagagccacggcctggcccagggcagcagcgaggaggaggagctgcccagcctggccttcctgctgggcagccagcacaagctgctgccctggtggctgccccagagccccgtgcccgccagcggcctgctgagccccgagaagtggggcccccagggcacccaccagagccccagcgccgagagaagaggcctgaacctggcccccagccccgccaacaaggccaagaagagacccctgttcggcagcctgagccccgccgagaagaccccctaccccggccccggcctgagagtgagcggcgagcagagcctgacctggggcctgggcggccccagccagagccagaagagaaagggcgaccccctggtgagcagaaaggagaagaagcagcactgcagccagtag

SEQ ID NO: 283227 - DNA, 2637 bp, Artificial Sequence
  derived and/or modified sequence
atggaggtgaagggccccagcggcagaagcttctgctgcgagagcgagggccagttcaagagctgcctgaagagacacacccccagcctgctgctgcccagcagctggaagggcaacagcggcagctgcctgatggccgaggccctgcacagaaccagccccacccccaacagctgccccctgcccctgcccctgtgcagaatgagcggcgtgctgtgcagcagaaacctgttcaccttcaagttcagcctgttccagctggacagcggcgccagcggcgagcccggccacagcctgggcctgaccctgggcttcagctactgcggcaactgccagaccgccgtggtgagcgcccagcccgagggcatggccagcaacggcgcctaccccgtgctgggccccggcgtgaccgccaaccccggcaccagcctgagcgtgttcaccgccctgcccttcaccacccccgcccccggccccgcccacggccccctgctggtgaccgccggcgccccccccggcggccccctggtgctgagcaccttccccagcacccccctggtgaccgagcaggacggctgcagccccagcggcgccggcgccagcaacgtgttcgtgcagatgagaaccgaggtgggccccgtgaaggccgcccaggcccagaccctggtgctgacccaggcccccctggtgtggcaggcccccggcgccctgtgcggcggcgtggtgtgccccccccccctgctgctggccgccgcccccgtggtgcccgtgatggccgcccaggtggtgggcggcacccaggcctgcgagggcggctggagccagggcctgcccctgccccccccccccccccccgccgcccagctgccccccatcgtgagccagggcaacgccggcccctggccccagggcgcccacggcgagagcagcctggccagcagccaggccaaggccccccccgacgacagctgcaaccccagaagcgtgtacgagaacttcagactgtggcagcactacaagcccctggccagaagacacctgccccagagccccgacaccgaggccctgagctgcttcctgatccccgtgctgagaagcctggccagaagaaagcccaccatgaccctggaggagggcctgtggagagccatgagagagtggcagcacaccagcaacttcgacagaatgatcttctacgagatggccgagaagttcctggagttcgaggccgaggaggagatgcagatccagaagagccagtggatgaagggcccccagtgcctgcccccccccgccacccccagactggagcccagaggcccccccgcccccgaggtggtgaagcagcccgtgtacctgcccagcaaggccggccccaaggcccagaccgcctgcctgcccccccccagaccccagagacccgtgaccaaggccagaagaccccccccccagccccacagaagagccgagaccaaggccagactgcccccccccagaccccagagacccgccgagaccaaggtgcccgaggagatcccccccgaggtggtgcaggagtacgtggacatcatggaggagctgctgggccccagcctgggcgccaccggcgagcccgagaagcagagagaggagggcaaggtgaagcagccccaggaggaggactggaccccccccgaccccggcctgctgagctacatcgacaagctgtgcagccagaaggacttcgtgaccaaggtggaggccgtgatccacccccagttcctggaggagctgctgagccccgacccccagatggacttcctggccctgagccaggacctggagcaggaggagggcctgaccctggcccagctggtggagaagagactgccccccctgaaggagaagcagcacagcagagccgcccccagcagaggcaccgccagactggacagcagcagcagcaagttcgccgccggccagggcgccgagagagacgtgcccgacccccaggagggcgtgggcatggagacctgccccccccagaccaccgccagagacagccagggcagaggcagagcccacaccggcatggccagaagcgaggacagcgtggtgctgctgggctgccaggacagccccggcctgagagccgccagacccaccagccccccccaggaccacagacccacctgccccggcgtgggcaccaaggacgccctggacctgcccggcggcagccccgtgagagagagccacggcctggcccagggcagcagcgaggaggaggagctgcccagcctggccttcctgctgggcagccagcacaagctgctgccctggtggctgccccagagccccgtgcccgccagcggcctgctgagccccgagaagtggggcccccagggcacccaccagagccccagcgccgagagaagaggcctgaacctggcccccagccccgccaacaaggccaagaagcagcccctgttcggcagcctgagccccgccgagaagaccccccacagaggccccggcctgagagtgagcggcgagcagagcctgacctggggcctgggcggccccagccagagccagaagagaaagggcgaccccctggtgagcagaaaggagaagaagcagcactgcagccagtag

SEQ ID NO: 283228 - DNA, 1866 bp, Artificial Sequence
  derived and/or modified sequence
atggcggctcaggtggttgggggcacccaggcgtgcgaagggggttggtcacagggccttcccctgccccctccgcctccccccgccgcccaactacctcctatcgtgtcccaggggaacgctgggccatggccgcagggagcccacggtgagagctcactggcatccagccaagccaaagcgcctccagatgatagctgtaatccacgcagtgtgtacgagaattttagattgtggcaacattacaaaccccttgcacgcaggcatttgccacagtcaccagataccgaagccctgtcatgttttctgattccggtccttcggtccctcgccaggcggaagccaacgatgactctcgaagaaggactgtggagggctatgagggagtggcagcacacatctaactttgatcgtatgattttttacgagatggcagaaaaatttcttgaattcgaggccgaagaggagatgcaaatccagaagtcccagtggatgaagggcccacagtgtctgcctccccccgccacccctagactggaaccaagaggtcccccagcgcctgaggtggtgaagcaaccagtgtacttaccttcgaaagctggccctaaggcccctaccgcatgcttgccaccccccagacctcagcgaccagtgactaaagccagaagacccccccctagaccccatagacgagctgagacaaaggcacgccttcccccgcctagaccccagaggcctgccgaaacaaaggtgccggaggaaatcccacccgaagtggtgcaggaatatgttgatatcatggaggaactgctggggccctccttgggcgctactggcgaacctgaaaagcagagggaagaaggcaaggtgaagcagccccaggaggaagactggacaccacccgaccctgggctgctatcctacattgacaaactgtgcagccagaaggactttgttactaaggtggaggccgtgatccacccgcagttcctggaagagttgctctctcctgatccacaaatggactttctcgctctttcacaggatctggagcaggaggaaggcctaacattggcccagttagtagagaaacggctgccccccttaaaggagaagcagcacgcccgtgcagccccgtcacgcggaaccgctcggctagattctagtagttcgaaattcgctgcgggccagggcgccgaaagggacgtcccagatccccaacagggtgtcgggatggagacgtgtcccccccagatgaccgcacgcgatagtcagggacgcggcagggcacacactggcatggcgagatctgaagattcagtggtgctgttgggttgccaggattctcctggtcttagagccgcatggccaacctcccccccccaggaccacagacctacatgtcctggcgtaggtactaaagatgcattggacctgcccggagggagcccagttagagaatcacacgggctcgctcagggctcctccgaagaggaagagctcccttccctggcattccttctggggtctcaacacaagctgctgccatggtggctgccacaatctcctgtccccgcgagtggtctcctcagccccgagaaatggggtcctcagggcactcaccagtccccctccgctgaaagacgcggactgaatctggcacctagcccagccaataaagctaaaaagagaccactgttcggcagcttgtcaccggcggaaaaaaccccctatccaggcccaggcctgcgagtctcaggcgagcagtccctgacatggggcctgggaggtccgtcgcagagccagaagaggaagggggatcccctggtcagcagaaaagagaagaaacaacattgcagccagtag

SEQ ID NO: 283229 - DNA, 2637 bp, Artificial Sequence
  derived and/or modified sequence
atggaagtgaagggcccatcaggccggagtttttgttgtgagtctgaggggcagtttaaatcatgtttgaaaagacatactccttccttactcttaccctcctcatggaaaggaaattcagggagttgcctgatggccgaggcactgcataggactagccccaccccaaattcgtgtcccctccccctgccgctctgccgaatgtccggcgtgctttgcagtcggaacctctttacattcaaattctctctgttccagctggactcaggcgcgtcaggcgaacccggacattcccttgggttgaccctgggcttctcctactgtggtaactgccaaaccgctgtggtgtccgctcagcctgagggaatggcaagtaatggcgcctatccggtgctgggccctggtgtgaccgcgaatcctggcaccagtctgagcgtctttacggctctccccttcaccaccccagccccaggacccgcacatgggccccttctggtaacagccggtgcaccccctggtggaccattggtactctctaccttccctagcactcccctggtaacagagcaggacggctgcggacccagtggcgccggagctagtaacgtctttgtgcaaatgcgaactgaagtggggcctgtgaaggctgcccaagcgcaaacgctcgtactcacacaggcgccactcgtttggcaggccccgggagccctgtgcggcggcgttgtgtgcccgccacctctgctacttgccgcagctccagtggtgcctgtgatggcagcgcaggtggtcggggggacacaggcttgtgagggaggctggtctcagggcctcccactccctcccccgcctccacccgccgcgcagcttcccccgatcgtatcgcaggggaatgcagggccctggccacagggagctcacggtgaaagcagcctcgcctcatcacaggccaaggccccaccggacgattcctgcaatccgcggtctgtgtatgagaactttcggttgtggcagcattacaagcctttggcccggagacacttaccccagagtccagacacggaagcgcttagctgttttttaattccagtcctcagaagccttgcgcgccgtaagcccacaatgacacttgaagaaggattgtggagagctatgagagaatggcagcataccagcaacttcgacaggatgatattctacgagatggccgagaaatttctggaattcgaagcagaagaagaaatgcaaatccagaagtcacaatggatgaagggtcctcagtgtcttccacctcctgccacacctaggctcgagccccgcggaccaccggccccagaggtggtaaagcagcccgtctaccttcccagtaaggctggccccaaggcaccaacagcatgcttacccccccctagacctcaaaggccggtgacaaaggcaaggaggccgccacctcgcccacaccggcgggcagagactaaagcgaggcttccccccccaaggccgcagagaccggcagagacgaaagtgcccgaggagattccccccgaggtcgtccaagagtatgttgatatcatggaggagctactgggaccaagtttaggagctaccggtgagcctgaaaaacaaagagaggaaggaaaagtgaagcagccccaagaggaagactggactcctcccgaccctgggttgctatcctatattgacaagctgtgctcacagaaggatttcgtcacaaaggtagaggcggtgattcacccccagtttcttgaagagttgctgtctccggatccccagatggacttcttagcactgagccaggaccttgaacaagaggagggactgactcttgcgcagcttgtggagaaaaggcttcctcctctcaaggagaagcagcacgcaagagccgcacccagcagaggcacagcaaggctagattcatcatccagcaagttcgcagcagggcagggcgcagagagagatgtgcccgacccacagcaaggagtgggcatggagacctgcccaccccagatgacagcacgggattctcagggccggggccgggcccatactggcatggcgcggagcgaagattccgtcgttctccttggatgccaggacagtcctggtttgcgggccgcctggccaactagcccaccccaggaccatagaccaacctgccctggcgtcggaactaaggatgcgctggatttgccaggaggctcgccagtgagggaatctcacgggcttgcccaggggtccagtgaggaggaggagctgcccagtttagcctttctcctgggttcccaacacaagttactgccttggtggctcccgcaaagcccggtgccagcctctggcctgctatcaccagagaaatggggtcctcagggaacgcaccagtcacccagcgcagaacgcagaggcctaaatctggccccatcaccagctaataaagccaagaaaaggccactgtttgggagtctcagccctgccgaaaaaaccccctatcctggacccggcctgcgcgtctctggcgagcagagcttaacgtggggcctgggcgggcccagccaaagtcagaaaaggaagggggacccacttgtcagtcgcaaggaaaaaaaacagcactgcagtcagtag

SEQ ID NO: 283230 - DNA, 2637 bp, Artificial Sequence
  derived and/or modified sequence
atggaagtcaaaggacccagcggccggtcattttgttgcgaaagcgaaggccagtttaaatcatgcctgaaaagacacactccgtccctactcttgccctcaagttggaagggaaattcagggtcctgcctcatggcagaggcactgcaccgcacaagccccactccgaatagctgcccactgcccctccccctgtgtagaatgtcaggggttctgtgctccaggaacctcttcaccttcaaatttagcttattccagttagactctggcgcgagcggcgaacctggacactctttaggcctaaccctcggattctcttattgtggcaattgtcagacagccgttgtctcagcacagccagagggaatggcctccaatggagcgtacccagtacttgggcctggcgtgacagctaacccgggtacctccctttcggtcttcaccgccctaccctttactacacctgcccccgggcccgcccacggccctcttctggtgacagctggggcacctcccggcggacctctagtgctgagtacctttccatccaccccactggtcaccgagcaggacggatgctccccgagcggggctggcgccagcaacgtgtttgttcaaatgcgaaccgaggtgggaccggtgaaggccgctcaggcccagacactggtcctaactcaggcccccctcgtgtggcaggcccctggagccctttgtggcggggtagtgtgtcccccaccgctgttattggcagccgcaccagtagtaccagtcatggcggcacaagtcgtgggaggaacgcaggcttgtgaaggagggtggtcccaggggctcccactcccacctccaccaccacccgcggcacagctgcctcccatcgttagccagggcaatgccggaccatggccccagggagcacacggggagagtagcctggccagtagtcaggctaaggctccccccgacgactcctgcaaccctcgaagcgtgtacgagaattttaggttgtggcagcactataagccccttgcgcgcagacacttgccccagagtccggatacagaggctctgtcttgttttctgattcccgtgctccggtccttggctcgacgaaagccaacgatgaccctagaggaaggactatggcgtgcgatgcgggaatggcagcatacatctaatttcgaccggatgattttttacgagatggctgagaagttcctggaattcgaagccgaggaagaaatgcagattcagaagtcccagtggatgaaaggcccacagtgtcttccaccgccagctacccctaggctggaaccgcgaggcccccccgcccccgaagtggtaaaacaacctgtgtatctgccctcgaaagccggcccaaaagctcagacggcttgtctgcctcccccacggccccagaggcctgtcaccaaagcccgccgaccccccccccagccgcacaggagggccgagactaaggccaggctacccccacctaggccacagcggcctgcggagaccaaggttcctgaagaaatccctccagaggttgtccaggagtatgtagatatcatggaagagctcttaggaccttccctcggagcgaccggcgaacccgagaagcagcgggaagaagggaaggttaagcagccacaagaagaagattggacccccccagatccaggattattaagctacattgacaaactgtgcagccagaaggattttgtcaccaaggtcgaagctgttattcacccacagtttctcgaggagctgctctcccctgacccgcagatggacttcttagccctgtcgcaagacttggagcaagaagagggtctcacgctggctcagctggtggaaaaacggctgcctccgctgaaagagaaacagcatagtagggcagctcctagccgaggcacagcccgtttggactcttctagtagcaagtttgccgcgggacagggagccgagcgggacgttcctgatccccaggagggtgttggtatggagacctgccccccccagacaaccgctcgggactcccaagggcggggccgcgcccataccggcatggctcgatctgaggactccgtcgtcctgcttgggtgtcaggactcccccgggctccgcgccgcacggcccacatctcctccccaggatcaccggccaacctgccccggtgtgggaacaaaagacgccttggacctccccggcggctctcccgttagggaatcacatggtttggcccaggggtcctccgaggaggaagagttaccatcacttgcctttcttttgggttcccaacacaaattacttccctggtggctgccacaatcacccgtgcctgcgtcaggcctcctgagcccagaaaagtgggggccccagggcactcatcagagccctagtgcggaacgccggggactgaatctggcaccttccccagccaataaggcaaaaaaacagcctctctttggctccttaagtccagccgaaaaaactccccatcggggccctggtttacgagtgtcaggcgagcagagtttgacgtggggactgggcgggccttcccaaagtcagaagcgaaaaggagatcccctcgtgagcaggaaggagaagaagcaacattgctcgcagtag

SEQ ID NO: 283231 - DNA, 2239 bp, Artificial Sequence
  derived and/or modified sequence
cctaactcaggcccccctcgtctggcaggctccaggcgccctctgcggaggtgttgtgtgtccacctcccctactcctggcagctgctcctgtggtgcctgttatggctgcccaggtggttgggggcacccaggcctgtgagggaggctggtcccagggccttcctcttccaccaccaccaccaccggctgcccagctgccccccattgtgtcccaagggaatgctgggccatggccacaaggggctcatggagagagcagcctggcttcctcccaggccaaggccccgccagatgactcctgtaaccccaggagtgtctatgagaacttccgactctggcagcactacaagcccctggcccggaggcaccttccccagagtcctgacaccgaagcgctttcgtgcttcctcatcccagttctccgatcgctggcccggcggaagcccaccatgaccctggaggagggactgtggcgggccatgcgggaatggcagcacacgagcaactttgaccggatgatcttctacgagatggcggaaaagttcctggagtttgaggctgaggaggagatgcagattcagaaatcgcaatggatgaaggggccccagtgcctgcctcctccagccacaccgaggcttgaacctcgaggacccccggcccctgaggtggtcaagcagccagtgtaccttcccagcaaggccggccccaaggccccgactgcctgcctgccaccacccaggccccagaggccagtgaccaaggcccgccggccaccaccccggccccaccggcgagcagagaccaaggcccgcctgccaccacccaggccccagagaccagcagagaccaaggtccctgaggagatccccccagaagtggtgcaggagtatgtggacatcatggaggagctgctggggccttccctcggggccacgggggagcccgagaaacaacgggaagagggcaaagtgaagcagccacaggaagaggactggacgcccccagacccgggcctcctgagctacattgacaagctgtgttcccagaaagacttcgtcaccaaggtggaggccgtcattcatccccaattcctggaagaattgctttccccagatccacagatggatttcttggccctaagccaggacctggagcaggaggaaggactcacccttgcccagctagtggagaagcgcctcccacccttgaaggagaaacagcatgcgagggcagcccctagtcgtggcacagcccggttggactcaagttcttctaagtttgcagctggccaaggagcagagagagacgtccctgacccccaacaaggggttggcatggaaacctgcccaccccagatgactgcccgggactctcagggacgaggcagagcacacactggcatggccaggtccgaagactctgttgtgcttttgggatgtcaggattcccctgggctgagggctgcctggccaacctctcctccccaggaccacagacccacctgccctggcgtgggtaccaaggatgccttggatctccctggagggtctcctgtcagggagtcacatgggctggctcaggggtcaagtgaggaggaggaactccccagcctggccttcctcttgggttcccagcacaagcttctgccctggtggctaccccagagccctgtccctgcctcgggccttctcagcccagaaaagtggggaccccagggaactcatcagtccccatctgctgagagaagaggcctcaacctagcaccttctcctgccaacaaggccaagaagcgacctctctttggaagcctgtcccctgctgaaaagacaccctacccagggcctgggctcagggtctctggggagcaatccctgacttgggggctgggtggcccctcacagtctcaaaagagaaagggtgaccccttggtctccaggaaggagaagaagcagcattgtagccagtaggggcttctgagcaggctctctggggccaatccccaaggatggggctctggcatccgatgccccaaagcggtcaaaagcttcttctcccccagtgctgatcttgctgggccttagctttggagggtaggggagggaggggagggagagggtggctgaatggggagggcaggaagggagggtctggggggaaggggctggggagtgggggtgggaagcagtgcgttgggggcctcgtgtgtaagtgtgaataaatgtagttgtcttggaaaa

SEQ ID NO: 283232 - DNA, 3286 bp, Artificial Sequence
  derived and/or modified sequence
ggatttctggtctcggtgctgtaggtcacatagccactctttcctggattgaggctttccagcaaaggggctgggacgtaaggctggcctgctggtgtggacagagattccagcaacatgcatgacctgggggtacaaggattgcttcctaaacaatgataagcacacagccacctaatagtctggatcggctgagaccatcctgatttcaaacacccagtccccttgccttcctaagaacccctgtgtttctcagactgaaaatgtgttttgaactttgttcacgaagtgaggccgctgttgaaattcgtcaagactgggaaagagccaaagtgggaaggagcatgggttgattggcacaaaagtaggtctgctgataaagaatggaagtaaaggggccatcaggtagaagcttttgctgtgagtcagaaggacaatttaaaagttgcctaaagaggcacacgccatctctgctgctgccttccagttggaagggaaactcaggttcttgcctaatggccgaagcccttcacagaacgtcccccacccctaacagctgcccactgcccctccccctctgcagaatgtctggggtcctatgttccaggaacctgtttactttcaaattttccctgtttcagttggactcaggagcatctggtgagccaggtcactctctgggtcttacccttggcttttcttattgcggaaactgccagacggcggtggtcagtgcccagcctgaggggatggcttcgaatggagcatacccagtgctgggaccgggcgtgaccgcgaaccctggcacctccctgtctgtgttcacggctctgcccttcaccacacccgctcccggcccagcacacgggccgctccttgtgactgcaggggctcctccaggcggccctctggtgctgtctaccttccccagcacacctctggtgacagaacaggatggctgcggcccgagtggggccggggcttccaacgtctttgtccagatgaggacagaggtggggcctgtgaaggccgctcaggcgcagaccttggtcctaactcaggcccccctcgtctggcaggctccaggcgccctctgcggaggtgttgtgtgtccacctcccctactcctggcagctgctcctgtggtgcctgttatggctgcccaggtggttgggggcacccaggcctgtgagggaggctggtcccagggccttcctcttccaccaccaccaccaccggctgcccagctgccccccattgtgtcccaagggaatgctgggccatggccacaaggggctcatggagagagcagcctggcttcctcccaggccaaggccccgccagatgactcctgtaaccccaggagtgtctatgagaacttccgactctggcagcactacaagcccctggcccggaggcaccttccccagagtcctgacaccgaagcgctttcgtgcttcctcatcccagttctccgatcgctggcccggcggaagcccaccatgaccctggaggagggactgtggcgggccatgcgggaatggcagcacacgagcaactttgaccggatgatcttctacgagatggcggaaaagttcctggagtttgaggctgaggaggagatgcagattcagaaatcgcaatggatgaaggggccccagtgcctgcctcctccagccacaccgaggcttgaacctcgaggacccccggcccctgaggtggtcaagcagccagtgtaccttcccagcaaggccggccccaaggccccgactgcctgcctgccaccacccaggccccagaggccagtgaccaaggcccgccggccaccaccccggccccaccggcgagcagagaccaaggcccgcctgccaccacccaggccccagagaccagcagagaccaaggtccctgaggagatccccccagaagtggtgcaggagtatgtggacatcatggaggagctgctggggccttccctcggggccacgggggagcccgagaaacaacgggaagagggcaaagtgaagcagccacaggaagaggactggacgcccccagacccgggcctcctgagctacattgacaagctgtgttcccagaaagacttcgtcaccaaggtggaggccgtcattcatccccaattcctggaagaattgctttccccagatccacagatggatttcttggccctaagccaggacctggagcaggaggaaggactcacccttgcccagctagtggagaagcgcctcccacccttgaaggagaaacagcatgcgagggcagcccctagtcgtggcacagcccggttggactcaagttcttctaagtttgcagctggccaaggagcagagagagacgtccctgacccccaacaaggggttggcatggaaacctgcccaccccagatgactgcccgggactctcagggacgaggcagagcacacactggcatggccaggtccgaagactctgttgtgcttttgggatgtcaggattcccctgggctgagggctgcctggccaacctctcctccccaggaccacagacccacctgccctggcgtgggtaccaaggatgccttggatctccctggagggtctcctgtcagggagtcacatgggctggctcaggggtcaagtgaggaggaggaactccccagcctggccttcctcttgggttcccagcacaagcttctgccctggtggctaccccagagccctgtccctgcctcgggccttctcagcccagaaaagtggggaccccagggaactcatcagtccccatctgctgagagaagaggcctcaacctagcaccttctcctgccaacaaggccaagaagcgacctctctttggaagcctgtcccctgctgaaaagacaccctacccagggcctgggctcagggtctctggggagcaatccctgacttgggggctgggtggcccctcacagtctcaaaagagaaagggtgaccccttggtctccaggaaggagaagaagcagcattgtagccagtaggggcttctgagcaggctctctggggccaatccccaaggatggggctctggcatccgatgccccaaagcggtcaaaagcttcttctcccccagtgctgatcttgctgggccttagctttggagggtaggggagggaggggagggagagggtggctgaatggggagggcaggaagggagggtctggggggaaggggctggggagtgggggtgggaagcagtgcgttgggggcctcgtgtgtaagtgtgaataaatgtagttgtcttgg

SEQ ID NO: 283233 - DNA, 3290 bp, Artificial Sequence
  derived and/or modified sequence
ggatttctggtctcggtgctgtaggtcacatagccactctttcctggattgaggctttccagcaaaggggctgggacgtaaggctggcctgctggtgtggacagagattccagcaacatgcatgacctgggggtacaaggattgcttcctaaacaatgataagcacacagccacctaatagtctggatcggctgagaccatcctgatttcaaacacccagtccccttgccttcctaagaacccctgtgtttctcagactgaaaatgtgttttgaactttgttcacgaagtgaggccgctgttgaaattcgtcaagactgggaaagagccaaagtgggaaggagcatgggttgattggcacaaaagtaggtctgctgataaagaatggaagtaaaggggccatcaggtagaagcttttgctgtgagtcagaaggacaatttaaaagttgcctaaagaggcacacgccatctctgctgctgccttccagttggaagggaaactcaggttcttgcctaatggccgaagcccttcacagaacgtcccccacccctaacagctgcccactgcccctccccctctgcagaatgtctggggtcctatgttccaggaacctgtttactttcaaattttccctgtttcagttggactcaggagcatctggtgagccaggtcactctctgggtcttacccttggcttttcttattgcggaaactgccagacggcggtggtcagtgcccagcctgaggggatggcttcgaatggagcatacccagtgctgggaccgggcgtgaccgcgaaccctggcacctccctgtctgtgttcacggctctgcccttcaccacacccgctcccggcccagcacacgggccgctccttgtgactgcaggggctcctccaggcggccctctggtgctgtctaccttccccagcacacctctggtgacagaacaggatggctgcagcccgagtggggccggggcttccaacgtctttgtccagatgaggacagaggtggggcctgtgaaggccgctcaggcgcagaccttggtcctaactcaggcccccctcgtctggcaggctccaggcgccctctgcggaggtgttgtgtgtccacctcccctactcctggcagctgctcctgtggtgcctgttatggctgcccaggtggttgggggcacccaggcctgtgagggaggctggtcccagggccttcctcttccaccaccaccaccaccggctgcccagctgccccccattgtgtcccaagggaatgctgggccatggccacaaggggctcatggagagagcagcctggcttcctcccaggccaaggccccgccagatgactcctgtaaccccaggagtgtctatgagaacttccgactctggcagcactacaagcccctggcccggaggcaccttccccagagtcctgacaccgaagcgctttcgtgcttcctcatcccagttctccgatcgctggcccggcggaagcccaccatgaccctggaggagggactgtggcgggccatgcgggaatggcagcacacgagcaactttgaccggatgatcttctacgagatggcggaaaagttcctggagtttgaggctgaggaggagatgcagattcagaaatcgcaatggatgaaggggccccagtgcctgcctcctccagccacaccgaggcttgaacctcgaggacccccggcccctgaggtggtcaagcagccagtgtaccttcccagcaaggccggccccaaggcccagactgcctgcctgccaccacccagaccccagaggccagtgaccaaggcccgccggccaccaccccagccccaccggcgagcagagaccaaggcccgcctgccaccacccaggccccagagaccagcagagaccaaggtccctgaggagatccccccagaagtggtgcaggagtatgtggacatcatggaggagctgctggggccttccctcggggccacgggggagcccgagaaacaacgggaagagggcaaagtgaagcagccacaggaagaggactggacgcccccagacccgggcctcctgagctacattgacaagctgtgttcccagaaagacttcgtcaccaaggtggaggccgtcattcatccccaattcctggaagaattgctttccccagatccacagatggatttcttggccctaagccaggacctggagcaggaggaaggactcacccttgcccagctagtggagaagcgcctcccacccttgaaggagaaacagcattcgagggcagcccctagtcgtggcacagcccggttggactcaagttcttctaagtttgcagctggccaaggagcagagagagacgtccctgacccccaagaaggggttggcatggaaacctgcccaccccagacgactgcccgggactctcagggacgaggcagagcacacactggcatggccaggtccgaagactctgttgtgcttttgggatgtcaggattcccctgggctgagggctgcccggccaacctctcctccccaggaccacagacccacctgccctggcgtgggtaccaaggatgccttggatctccctggagggtctcctgtcagggagtcacatgggctggctcaggggtcaagtgaggaggaggaactccccagcctggccttcctcttgggttcccagcacaagcttctgccctggtggctaccccagagccctgtccctgcctcgggccttctcagcccagaaaagtggggaccccagggaactcatcagtccccatctgctgagagaagaggcctcaacctagcaccttctcctgccaacaaggccaagaagcaacctctctttggaagcctgtcccctgctgaaaagacaccccaccgagggcctgggctcagggtctctggggagcaatccctgacttgggggctgggtggcccctcacagtctcaaaagagaaagggtgaccccttggtctccaggaaggagaagaagcagcattgtagccagtaggggcttctgagcaggctctctggggccaatccccaaggatggggctctggcatccgatgccccaaagcggtcaaaagcttcttctcccccagtgctgatcttgctgggccttagctttggagggtaggggagggaggggagggagagggtggctgaatggggagggcaggaagggagggtctggggggaaggggctggggagtgggggtgggaagcagtgtgttgggggcctcgtgtgtaagtgtgaataaatgtagttgtcttggaaaa

SEQ ID NO: 283234 - DNA, 1866 bp, Artificial Sequence
  derived and/or modified sequence
atggccgcccaggtggtgggcggcacccaggcctgtgagggcggctggagccagggcctgcccctgcccccacctcctcctcctgctgcccagctgccccccatcgtgtcccagggcaatgccggcccctggccccagggcgcccatggagagagcagcctggccagcagccaggccaaggcccccccagatgacagctgcaaccccaggtctgtgtatgagaacttccggctgtggcagcactacaagcccctggcccggcggcacctgccccagagcccagacacagaggccctgagctgcttcctgatccctgtgctgcggagcctggcccggaggaagcccaccatgaccctggaggagggcctgtggagggccatgagggagtggcagcacaccagcaactttgacaggatgatcttctatgagatggccgagaagttcctggagtttgaagctgaggaggagatgcagatccagaagagccagtggatgaagggcccccagtgcctgcccccaccagccaccccccggctggagccccggggccccccagcccctgaggtggtgaagcagcctgtgtacctgcccagcaaggccggccccaaggcccccacagcctgcctgcccccaccccggccccagaggcctgtgaccaaggcccggcggcccccaccccggccccaccggcgggcagagaccaaggcccggctgcccccaccccggccccagaggcctgctgagaccaaggtgcctgaggagatccccccagaggtggtgcaggagtatgtggacatcatggaggagctgctgggccccagcctgggcgccaccggggagcctgagaagcagcgggaggagggcaaggtgaagcagccccaggaggaggactggaccccaccagaccccggcctgctgagctacatcgacaagctgtgcagccagaaggactttgtgaccaaggtggaggccgtcatccacccccagttcctggaggagctgctgagcccagacccccagatggacttcctggccctgagccaggacctggagcaggaggagggcctgaccctggcccagctggtggagaagaggctgccccccctgaaggagaagcagcacgcccgggccgcccccagccggggcacagcccggctggacagcagcagcagcaagtttgctgctggccagggcgctgagagagatgtgcctgacccccagcagggcgtgggcatggagacctgccccccccagatgacagcccgggacagccagggccggggccgggcccacacaggcatggcccggtctgaggacagcgtggtgctgctgggctgccaggacagccctggcctgcgggccgcctggcccaccagccccccccaggaccaccggcccacctgccctggggtgggcaccaaggatgccctggacctgcccggcggcagccctgtgcgggagagccacggcctggcccagggcagcagcgaggaggaggagctgcccagcctggccttcctgctgggcagccagcacaagctgctgccctggtggctgccccagagccctgtgcctgccagcggcctgctgagccctgagaagtggggcccccagggcacccaccagagccccagcgctgagcggcggggcctgaacctggcccccagccctgccaacaaggccaagaagaggcccctgtttggcagcctgagccctgctgagaagaccccctacccaggccctggcctgcgggtgtctggagagcagagcctgacctggggcctgggcggccccagccagagccagaagaggaaaggagaccccctggtgtccaggaaggagaagaagcagcactgcagccagtag

SEQ ID NO: 283235 - DNA, 2637 bp, Artificial Sequence
  derived and/or modified sequence
atggaggtgaagggccccagcggccgctccttctgctgtgagagcgagggccagttcaagagctgcctgaagaggcacacccccagcctgctgctgcccagctcctggaagggcaacagcggcagctgcctgatggccgaggccctgcacaggaccagccccacccccaacagctgccccctgcccctgcccctgtgcaggatgtctggagtgctgtgcagcaggaacctcttcaccttcaagttcagcctcttccagctggacagcggggccagcggggagcccggccacagcctgggcctgaccctgggcttctcctactgcggcaactgccagacagctgtggtgtctgcccagcctgagggcatggccagcaatggagcctaccctgtgctgggccctggggtgacagccaaccctggcaccagcctgtctgtgttcaccgccctgcccttcaccaccccagcccctggccctgcccacggccccctgctggtgacagctggggcccctcctgggggccccctggtgctgagcaccttccccagcacccccctggtgacagagcaggacggctgcggccccagcggggccggggccagcaatgtgtttgtgcagatgaggacagaggtgggccctgtgaaggccgcccaggcccagaccctggtgctgacccaggcccccctggtgtggcaggcccctggggccctgtgtggcggcgtggtgtgccccccacccctgctgctggccgccgcccctgtggtgcctgtgatggccgcccaggtggtgggcggcacccaggcctgtgagggcggctggagccagggcctgcccctgcccccacctcctcctcctgctgcccagctgccccccatcgtgtcccagggcaatgccggcccctggccccagggcgcccacggggagagcagcctggccagcagccaggccaaggcccccccagatgacagctgcaaccccaggtctgtgtatgagaacttccggctgtggcagcactacaagcccctggcccggcggcacctgccccagagcccagacacagaggccctgagctgcttcctgatccctgtgctgcggagcctggcccggaggaagcccaccatgaccctggaggagggcctgtggagggccatgagggagtggcagcacaccagcaactttgacaggatgatcttctatgagatggccgagaagttcctggagtttgaggccgaggaggagatgcagatccagaagagccagtggatgaagggcccccagtgcctgcccccaccagccaccccccggctggagccccggggccccccagcccctgaggtggtgaagcagcctgtgtacctgcccagcaaggccggccccaaggcccccacagcctgcctgcccccaccccggccccagaggcctgtgaccaaggcccggcggcccccaccccggccccacagaagagctgagaccaaggcccggctgcccccaccccggccccagaggcctgctgagaccaaggtgcctgaggagatccccccagaggtggtgcaggagtatgtggacatcatggaggagctgctgggccccagcctgggcgccactggagagcctgagaagcagcgggaggagggcaaggtgaagcagccccaggaggaggactggaccccaccagaccccggcctgctgagctacatcgacaagctgtgcagccagaaggactttgtgaccaaggtggaggccgtcatccacccccagttcctggaggagctgctgagcccagacccccagatggacttcctggccctgagccaggacctggagcaggaggagggcctgaccctggcccagctggtggagaagaggctgccccccctgaaggagaagcagcacgcccgggccgcccccagccggggcacagcccggctggacagcagcagcagcaagtttgctgctggccagggcgctgagagagatgtgcctgacccccagcagggcgtgggcatggagacctgccccccccagatgacagcccgggacagccagggccggggccgggcccacacaggcatggcccggagtgaagattctgtggtgctgctgggctgccaggacagccctggcctgcgggccgcctggcccaccagccccccccaggaccaccggcccacctgccctggggtgggcaccaaggatgccctggacctgcccggcggcagccctgtgcgggagagccacggcctggcccagggcagcagcgaggaggaggagctgcccagcctggccttcctgctgggcagccagcacaagctgctgccctggtggctgccccagagccctgtgcctgccagcggcctgctgagccctgagaagtggggcccccagggcacccaccagagccccagcgctgagcggcggggcctgaacctggcccccagccctgccaacaaggccaagaagaggcccctgtttggcagcctgagccctgctgagaagaccccctacccaggccctggcctgcgggtgtctggagagcagagcctgacctggggcctgggcggccccagccagagccagaagaggaagggggaccccctggtgtccaggaaggagaagaagcagcactgcagccagtag

SEQ ID NO: 283236 - DNA, 2637 bp, Artificial Sequence
  derived and/or modified sequence
atggaggtgaagggccccagcggccgctccttctgctgtgagagcgagggccagttcaagagctgcctgaagaggcacacccccagcctgctgctgcccagctcctggaagggcaacagcggcagctgcctgatggccgaggccctgcacaggaccagccccacccccaacagctgccccctgcccctgcccctgtgcaggatgtctggagtgctgtgcagcaggaacctcttcaccttcaagttcagcctcttccagctggacagcggggccagcggggagcccggccacagcctgggcctgaccctgggcttctcctactgcggcaactgccagacagctgtggtgtctgcccagcctgagggcatggccagcaatggagcctaccctgtgctgggccctggggtgacagccaaccctggcaccagcctgtctgtgttcaccgccctgcccttcaccaccccagcccctggccctgcccacggccccctgctggtgacagctggggcccctcctgggggccccctggtgctgagcaccttccccagcacccccctggtgacagagcaggacggctgcagccccagcggggccggggccagcaatgtgtttgtgcagatgaggacagaggtgggccctgtgaaggccgcccaggcccagaccctggtgctgacccaggcccccctggtgtggcaggcccctggggccctgtgtggcggcgtggtgtgccccccacccctgctgctggccgccgcccctgtggtgcctgtgatggccgcccaggtggtgggcggcacccaggcctgtgagggcggctggagccagggcctgcccctgcccccacctcctcctcctgctgcccagctgccccccatcgtgtcccagggcaatgccggcccctggccccagggcgcccacggggagagcagcctggccagcagccaggccaaggcccccccagatgacagctgcaaccccaggtctgtgtatgagaacttccggctgtggcagcactacaagcccctggcccggcggcacctgccccagagcccagacacagaggccctgagctgcttcctgatccctgtgctgcggagcctggcccggaggaagcccaccatgaccctggaggagggcctgtggagggccatgagggagtggcagcacaccagcaactttgacaggatgatcttctatgagatggccgagaagttcctggagtttgaggccgaggaggagatgcagatccagaagagccagtggatgaagggcccccagtgcctgcccccaccagccaccccccggctggagccccggggccccccagcccctgaggtggtgaagcagcctgtgtacctgcccagcaaggccggccccaaggcccagacagcctgcctgcccccaccccggccccagaggcctgtgaccaaggcccggcggcccccaccccagccccacagaagagctgagaccaaggcccggctgcccccaccccggccccagaggcctgctgagaccaaggtgcctgaggagatccccccagaggtggtgcaggagtatgtggacatcatggaggagctgctgggccccagcctgggcgccactggagagcctgagaagcagcgggaggagggcaaggtgaagcagccccaggaggaggactggaccccaccagaccccggcctgctgagctacatcgacaagctgtgcagccagaaggactttgtgaccaaggtggaggccgtcatccacccccagttcctggaggagctgctgagcccagacccccagatggacttcctggccctgagccaggacctggagcaggaggagggcctgaccctggcccagctggtggagaagaggctgccccccctgaaggagaagcagcacagccgggccgcccccagccggggcacagcccggctggacagcagcagcagcaagtttgctgctggccagggcgctgagagagatgtgcctgacccccaggagggcgtgggcatggagacctgccccccccagaccacagcccgggacagccagggccggggccgggcccacacaggcatggcccggagtgaagattctgtggtgctgctgggctgccaggacagccctggcctgcgggccgcccggcccaccagccccccccaggaccaccggcccacctgccctggggtgggcaccaaggatgccctggacctgcccggcggcagccctgtgcgggagagccacggcctggcccagggcagcagcgaggaggaggagctgcccagcctggccttcctgctgggcagccagcacaagctgctgccctggtggctgccccagagccctgtgcctgccagcggcctgctgagccctgagaagtggggcccccagggcacccaccagagccccagcgctgagcggcggggcctgaacctggcccccagccctgccaacaaggccaagaagcagcccctgtttggcagcctgagccctgctgagaagaccccccaccggggccctggcctgcgggtgtctggagagcagagcctgacctggggcctgggcggccccagccagagccagaagaggaagggggaccccctggtgtccaggaaggagaagaagcagcactgcagccagtag

SEQ ID NO: 283237 - DNA, 1866 bp, Artificial Sequence
  derived and/or modified sequence
atggccgcccaggtggtgggcggcacccaggcctgcgagggcggctggtcccagggtctgccgctccctccacctcctccaccagctgcccaattgccgcccattgtttcacagggcaatgctggcccctggccccagggagctcatggcgagagcagtctcgcatccagtcaagccaaagcccccccagatgatagctgtaatccaagaagcgtctatgagaactttcggctgtggcagcactataaacctctggcccggagacacttgcctcagagcccagataccgaagcgctcagctgcttcctaattcccgtgttgagaagcctcgcaaggcggaaacccacaatgacgcttgaggaggggctatggagggctatgcgcgagtggcaacacacgagtaatttcgacagaatgatattctacgaaatggctgagaagtttcttgaattcgaggcggaggaggagatgcagatccagaagtcacagtggatgaaaggaccgcagtgcctgcctccacctgctacaccccgcctggaaccaaggggaccccccgccccagaggttgttaaacaacctgtgtatctgcccagtaaggccggccctaaggcacctacagcttgtctcccaccgccaagacctcagcgacctgttacgaaggccagacgcccaccccctcgtccccaccgcagagcagagacgaaggcaaggctgcccccccccaggccccagcgcccggcagaaacaaaggtgcctgaggaaattcctcctgaagtggttcaggaatacgtcgacataatggaggaattactagggccttcgttaggagccaccggagaaccagaaaagcaacgggaggaaggcaaggtcaaacagccacaagaggaagattggacccctcctgaccctggattgctgagctatattgacaagctgtgctcccagaaggattttgtgacaaaggtagaagccgtgattcacccccagttcctggaggagttgttatcccctgaccctcagatggattttctggcgctcagtcaggatctcgaacaggaggagggactgaccttggcacagctagtggagaagagattgccacccttaaaagagaagcagcatgccagggccgctccctcgcgcggaactgccagactggattcgtcaagctcaaaattcgctgcaggccagggcgcagagagggatgtccctgacccccagcagggggttggtatggagacctgtccaccacagatgacggccagagattctcaaggacgaggccgtgcacatacgggcatggcgcgttcagaagactctgtagtgcttttgggatgtcaggattccccaggcctccgtgccgcctggcctacaagtccaccacaggatcaccgtcctacctgtccaggtgtagggaccaaagacgctctagatctcccgggggggagtcccgttagagagagccacggccttgcacagggctcaagtgaggaagaggagctgccgagcttagccttcctactgggttctcagcacaagctgttgccctggtggctcccccagtctcccgtacctgccagcgggcttctctccccggaaaagtggggcccccaggggacccatcagtcaccttcagcggagagaagggggctaaacttggcgcccagccctgctaacaaagccaagaaaaggcccctcttcgggagtcttagtccagcggagaaaactccctatcctggtcctggcctgcgcgtcagcggtgagcagtcacttacttgggggctcggaggcccaagccaatcacagaagcgaaagggggaccccctggtgagccggaaggagaagaaacagcactgttcacagtag

SEQ ID NO: 283238 - DNA, 2637 bp, Artificial Sequence
  derived and/or modified sequence
atggaggtgaagggccccagcggccggagcttctgctgcgagagcgagggccagtttaagtcctgcctgaagaggcacacccccagtctgctcctacctagttcctggaaagggaattccggcagctgcttaatggcagaagccttacatcggactagcccaaccccgaattcgtgtcccctacctctccccctttgccggatgagcggagtcctgtgcagcaggaacctgttcacatttaagttttcactgttccagctcgatagtggtgcctcaggtgagcccgggcattccctgggcctgacactgggcttctcctactgcggaaactgccagacagctgttgtctccgctcagcctgagggcatggcttcaaatggggcttatcccgtcctcggcccaggagtgactgccaatccaggcacttcactgtcagtctttacagctctacctttcacaactcccgctcctggccccgctcatgggccattgctagtgacagccggcgcgcctccagggggacctctggtgctcagcacattccctagcacccccctggtaaccgaacaggatgggtgcggccctagtggagctggtgcaagtaatgtgttcgttcaaatgcgcactgaggtcggccccgtgaaggcagcccaggcccaaaccttagtactcacccaggccccattggtatggcaagccccaggagccctttgtggcggggtagtttgccccccaccgctactgctggcagcagctccggttgttcccgtgatggccgcacaggtagtgggcggcacacaagcctgtgagggcggatggtctcaaggcctcccactcccaccacccccaccacctgccgcacaactgccacctatcgtcagtcaaggtaacgcaggcccatggccccagggggcgcacggcgagtcctcgctggcatccagtcaagcaaaagcccccccagatgactcttgtaacccccgcagcgtctatgaaaactttcgcttatggcagcattataagccgctggctcgcagacacttgccccagagtccagacaccgaagcattatcatgtttcctgatccctgtattgcgatctctcgcgaggcgaaagcctacaatgacgctggaggagggcctttggcgggctatgcgcgagtggcagcatacgtcaaacttcgacaggatgattttttacgaaatggccgagaagttcttagagttcgaggccgaggaggagatgcagattcagaagtcacagtggatgaaaggcccccaatgtttgcctccacccgccacaccacggctggagccaaggggacctccggctccggaggtagtgaagcaacccgtttacctgccttccaaagccggacccaaggcacccacagcctgtcttcccccaccgcgaccgcagagacctgtgactaaggccaggcgccctccaccaagaccacacagacgcgctgaaactaaggcgaggcttccacccccacgcccccaaaggcctgccgagacaaaagttcccgaagagatacctcccgaagtggtgcaggagtatgtcgacataatggaagagttactgggcccctctctcggagcaactggagaacctgaaaaacagagggaggagggaaaagtcaagcaaccacaggaggaagactggactccccccgacccaggactgctctcctacatcgataagctatgtagccagaaagactttgtgactaaggtggaggctgtcatccacccccagtttctagaggaattgttgtctcctgatccacaaatggattttctcgccctgtcccaagacttggaacaagaagaggggctcactctggcgcagttagttgaaaagcggctgcctccactgaaggagaagcagcacgccagggcggcccctagtagaggcaccgccaggcttgattcctcctcctcgaaattcgctgccggtcagggagctgaacgagatgttccggatccacagcagggcgttggcatggagacctgcccccctcagatgaccgcccgcgactcacaaggacgggggcgcgcccacaccgggatggctcgatcagaggacagtgtagttcttttgggctgccaggactcacctggcctccgcgccgcttggcccactagccctccgcaggaccaccgcccgacatgtccgggcgtgggaaccaaggatgccctggacttgccaggtggcagccctgtgcgggaatcccacggactggcccaaggatcctctgaggaggaggagctgccaagcctggcttttttattagggagtcagcacaaattattaccttggtggttgccacagagtccagttcctgcatctggtctgttatccccggagaaatggggtcctcaggggacacaccagtctccatcagcagaaagacgggggctcaacttggctccttcccctgccaacaaagctaagaagcgaccattgtttgggtccctgagccctgccgagaaaaccccttatcccggccctggtctccgcgtttctggcgaacagtctcttacatggggtctgggcggaccctcccagtcacagaagagaaaaggagatccattggtttcccggaaagagaagaagcagcattgttctcaatag

SEQ ID NO: 283239 - DNA, 2637 bp, Artificial Sequence
  derived and/or modified sequence
atggaggtgaagggccccagcggccggagcttctgctgcgagagcgagggccagtttaagtcttgtctcaagcgccacaccccttccctgttgctcccttccagctggaaggggaattcaggcagctgtctgatggccgaggctttgcacaggacctcccccacccccaattcttgtcccttgcctctgcccctctgtaggatgtccggcgtgctgtgttcaaggaatctgtttactttcaaattcagcctctttcagcttgactcgggagcttctggcgaaccaggacattcccttggtctaacacttggcttcagctactgcgggaactgtcagaccgcggtggtctcagcccagcctgagggaatggcatctaatggcgcttatcctgtgcttggtcctggcgtgaccgccaacccaggcacgtcgctgtctgtgttcaccgccctgccatttaccactcctgctccgggcccggcacacggccccctgcttgtgaccgctggcgcaccaccagggggccccttagttctgtcaacctttccaagcacaccccttgtcaccgagcaagacggatgcagtccttctggcgcgggagcatccaacgtattcgtgcagatgcgaacagaggtggggcctgtgaaggccgcccaggcgcaaacattagtcctgacccaagctcctctagtttggcaggctccgggagctctgtgtggaggggtcgtttgtccacctccattactgttggctgctgctccggtggttcctgtgatggccgcccaagtcgtgggagggacacaggcctgcgaaggcggctggtcgcagggattgcccttaccaccccctccaccaccagcagcccagctgcctccgatcgtgagccaaggcaacgctggcccatggcctcagggcgctcacggcgagtctagcctggctagctcacaggccaaagccccccctgatgattcttgtaaccccagatcagtctacgaaaatttccgcctctggcaacactacaaacctctagcacgcaggcacctgccgcaaagtcccgataccgaagcattgtcctgctttctgattccagttctccggtcactggcccggcgaaaacctaccatgacattggaggagggtctgtggagggctatgcgcgaatggcagcatacatccaattttgataggatgatcttttacgagatggccgagaagttcttggagtttgaggcggaagaagagatgcagatccagaagtcacaatggatgaaagggccccaatgcttacctccacctgctacgcccagacttgagccacgcggacctccggcacctgaagtcgtgaagcagcccgtgtatctcccatctaaggcaggacccaaggctcagaccgcctgtctgccaccaccacgtccccagagaccagtgaccaaggcgcggagaccccccccccaaccacacagacgcgctgagaccaaggcaaggctcccacctcctaggccgcagaggccggccgaaaccaaggtgcccgaggagattccacccgaagttgtccaggaatatgttgacatcatggaagaattgctgggcccctccctaggcgccactggtgaaccggaaaaacaacgggaagagggcaaagtcaagcagccgcaagaggaagactggaccccccctgaccccggattgctcagctacatcgacaaactatgcagtcagaaggactttgtcactaaggtcgaagcagtcattcatcctcaatttctcgaagagctgttaagcccggatccccagatggattttctagcactgagccaggatctggagcaggaggaaggactgacgctcgcccaattagtcgagaagcggttacctcccttgaaggagaaacagcatagcagagcagctccctcaagaggcactgcacgcctggattcatcttcttctaaatttgctgctggccagggtgctgagagggacgtcccagaccctcaggaaggggtgggtatggagacatgccccccccagacaacagcccgggacagccagggaagaggcagggctcacacaggaatggcgagaagcgaagacagcgtggtacttctggggtgtcaggactcccctgggcttagggctgctaggccaacttcccctccccaggatcatcgacccacatgtcccggggttggtaccaaggatgctttggatctgcccggaggcagccccgtgagggaatcccatggtctggcccaaggttccagtgaggaagaagaactgcccagcctggctttcctactgggcagtcagcataagcttctcccgtggtggctgcctcagtcacccgtccccgcctcaggccttctctcacctgagaagtggggacctcagggtacacatcaatctccttcagccgagagacggggactgaatctggcaccaagcccagcgaataaggcgaaaaagcagccactgtttggctctctctctcctgcggagaaaactccacaccgcgggccgggtctgcgtgtttcaggcgaacaaagcctgacctgggggctgggcggtccctctcagtcccaaaagcgtaagggtgacccactggtttctcgcaaggagaagaagcagcattgttcacagtag

SEQ ID NO: 283240 - DNA, 1866 bp, Artificial Sequence
  derived and/or modified sequence
atggccgctcaggtggtcggagggacacaggcctgcgaaggcggttggtcacagggcctgcccctgccccctccgccacctcccgcagcacagcttccacctattgttagtcaaggaaacgctggtccttggccacaaggagcccacggggagagctcgctggcctcgagtcaggctaaggcaccaccagatgacagctgtaaccccagatccgtgtacgagaactttcgtttgtggcaacattataaaccactggctaggagacaccttcctcagtctccagacacggaagcgctctcatgcttccttatacctgtactaaggtctctagcacgcagaaagcccacaatgacgctggaagaaggcctgtggagggccatgcgggaatggcagcatacctccaactttgaccgtatgatcttttatgagatggcagaaaagtttctagagttcgaagccgaagaggaaatgcagatccagaagtcccagtggatgaaaggtccccaatgtctgcctcctcccgcaactccccgactggagcccagggggcctccagcccctgaggtcgtcaaacaacctgtttatctcccaagtaaggccggacctaaagccccaaccgcatgcttgcctccacctcggcctcaacgacctgtcacaaaagcaagaagaccacctccacgaccacaccgaagggctgagactaaggctcggctgccccctccccgaccgcagcgccctgccgagactaaagtgccagaagagatcccacctgaggtcgtccaagagtatgtagacattatggaggagttgctggggccttcactgggagctaccggggagccagagaaacagagagaggagggcaaggtaaagcaaccccaggaggaagattggacccccccagatccgggtctgctgtcatacatcgacaagctctgcagccagaaagactttgttactaaggtggaagccgtaattcacccccagttcctcgaggaattgctgtcaccagacccccagatggattttctggcattaagtcaggacctcgaacaagaagagggcctaacccttgcccaactggtggaaaagcgattacccccactgaaagaaaagcaacacgcgagggccgcacccagtcggggaaccgcaagacttgacagcagtagtagtaagttcgcagccggacagggagctgaaagagacgttccggacccccagcagggcgttggtatggagacctgcccacctcagatgactgccagagactctcaggggagagggagggcacatactgggatggcacgctcagaagactctgtcgtgcttctgggatgccaggattcccctggcctccgggctgcctggccaaccagccctccgcaggaccacaggccgacatgcccaggggtggggacaaaggatgctctagatctgcccggagggtcgccggtgcgggagagtcacgggctcgctcaaggttcctctgaggaggaagagttgccatctctggcatttctcttaggtagccagcacaaactgctaccatggtggctcccccagtctcccgtacctgctagcggcctgctgtctcccgagaagtgggggcctcagggaacccaccaaagcccttccgcagaacgtaggggtctgaatctggcccctagccccgcaaataaggccaagaaacggcctttattcggttccttaagcccggcagagaagacaccttacccagggcctgggctgcgggtttcaggagaacagtcacttacctggggcctcggaggtccttcccagtcccaaaagcgcaagggggaccctctcgttagtaggaaggaaaagaagcagcattgcagtcagtag

SEQ ID NO: 283241 - DNA, 2637 bp, Artificial Sequence
  derived and/or modified sequence
atggaagtcaagggcccttccggcaggtccttttgctgcgagtctgaaggacagtttaaatcatgcctgaaacgacataccccttcgttacttcttccttcaagctggaaaggcaactcaggaagctgtctgatggcggaggcacttcatcgaactagtccaacccctaactcatgtcctctgcctcttcccctatgcagaatgtccggcgtgctatgcagtcggaatttgtttacattcaaattcagcttgtttcagctggactctggagccagcggggagcccggtcactcactgggccttactctggggttctcctattgtggaaactgccagaccgcagtcgtgagtgcacagccagaggggatggcctctaatggcgcatatcccgtcctgggtcctggggttaccgcaaatcccggtacttctctcagcgtcttcactgccctgcccttcacgacaccggctccgggacctgcccacggacctcttttggtaacagccggagccccacccggaggaccgctggtgctgtccacctttccgtcgactccactggtcactgagcaggacggatgcggacccagtggggcaggagcttccaatgtctttgtgcagatgcggacggaagtcgggccagtgaaggctgctcaggctcaaactttggtgctgactcaggcgccattggtgtggcaggctccaggcgcattgtgcgggggagtggtttgtcccccacccctgctgctcgctgccgcacccgtggtgcctgttatggctgcacaagtggtgggtggaacccaggcctgcgaagggggatggtctcaggggctgccgcttcctccacccccaccaccagccgcacagctgccgcctattgtgagccaggggaacgcgggtccctggccgcaaggagcgcacggcgaatcttcgctagcatccagccaagcaaaggcaccgccagacgacagctgcaatccaagatcagtgtatgaaaatttcagattatggcagcattacaaaccactggctcggcgacatctgccgcagtcacccgataccgaagccctgtcatgttttctcatccccgtcctgcggagcctggccagaaggaaacctacaatgacactggaagaggggctctggagggcaatgagggaatggcagcatactagtaattttgaccgcatgatattttacgagatggccgaaaaattcctggagtttgaagccgaggaggagatgcaaatccaaaagtcacagtggatgaaaggccctcagtgcctgccaccacctgcaactccgaggcttgagcctcgcggacccccagcccctgaagtcgtcaagcagcccgtatatctccctagcaaagctggccctaaagcccctacagcttgtctgccaccccctcgccctcagcgcccagtcaccaaggctagacgaccgccaccacgtccgcataggcgggctgagaccaaagcccgactgccgccacctcgccctcaacgccctgccgaaaccaaagtgcccgaggaaatcccccctgaagttgtgcaggaatacgtcgatattatggaagaactcctggggccttcattaggcgcaactggggagcctgaaaagcagagagaggagggtaaggtgaagcaacctcaggaggaagattggacacctccagaccctgggctgctgtcgtatatagataagctgtgcagtcaaaaggatttcgtaactaaagtggaggcagtgatccacccccaatttctggaggaactactgtccccggaccctcagatggacttcctggccttaagccaggatttggagcaggaggaagggttgacacttgcacagttggtggaaaagagattacccccactgaaggaaaagcagcacgcaagagccgctccatcacggggtactgccagactagattcaagctccagcaaattcgctgcaggccagggcgcagagcgggacgtgcctgatccgcagcagggcgtcgggatggagacgtgtccgccacaaatgaccgcgagggactctcaaggtcggggacgggctcataccgggatggctagatctgaggacagcgtggtgctgctgggatgccaggactccccaggattgcgagctgcttggcccacttctcccccacaggaccacaggcctacttgccctggcgtggggacgaaagatgccctggatttgcccggtgggtctccagtacgggagtctcacggcctagcgcagggatcatctgaggaagaggagcttcctagtctagcattccttttgggtagtcagcataagctcctgccttggtggctgccacagagcccagtgccggcttctggcctgctaagcccagaaaaatgggggcctcagggtactcaccagtcaccttcagccgaacggagaggcctgaacctcgcgccatcacctgccaacaaggcaaagaaacgtccgctatttggctctctgtcaccagctgagaaaaccccgtaccctgggccaggcctcagagtgtctggcgagcaaagtctgacctggggccttggcggacccagccaatctcagaagcgaaagggagacccgctggtttctcgcaaggagaaaaaacagcattgcagccaatag

SEQ ID NO: 283242 - DNA, 2637 bp, Artificial Sequence
  derived and/or modified sequence
atggaagtcaaaggaccgtccggtagatcgttttgctgcgaatccgaaggccagttcaagagctgtctgaaacgccataccccaagtctactgctacccagcagttggaaggggaatagcgggtcatgcttgatggccgaagctttgcacagaacatcgccgacgcctaacagttgtcccctgccactgccactctgtagaatgtctggagttctgtgttctaggaatctcttcactttcaaatttagccttttccagctagatagtggtgcaagcggcgagcccggacactcactcggattgacgctggggttcagttactgtggaaattgccaaacagccgttgtcagcgctcaacctgagggaatggcttctaacggagcgtatccagttttagggccaggcgtaaccgcgaaccccggtacctccctgtccgtcttcaccgcactgccatttacaacacctgcacccggacctgctcacggtcccctcctcgtgaccgcaggagcgccacccggtgggcctctcgtgctctccacttttccatccactcctctggtaaccgaacaagacgggtgcagcccctcaggtgcaggggctagcaacgtctttgtacagatgcgaacggaagtggggccagtgaaggctgcacaggcccaaaccctggtacttacgcaagcgcctttggtctggcaggcgcctggcgcactatgtggtggcgtggtttgccctccccctctgctgttagccgctgcccctgtggtcccagttatggccgctcaggtagtgggcggtactcaagcctgtgaaggtgggtggtcccagggactgccccttcctccacccccacctcctgcggcacaactccccccaattgtgagccagggcaacgctgggccttggcctcagggagcgcacggcgagagctcacttgcaagcagccaagccaaggccccacccgatgacagctgtaatccacggagcgtgtacgagaattttcgactttggcagcactacaagccattggcacgacggcacttgccccagagccccgacactgaagccctttcctgttttcttattcctgttcttcgttccctggctcgcagaaagcctacaatgacactagaagaaggcctatggagagccatgcgcgaatggcaacatacctccaactttgatcgcatgattttttatgagatggccgagaaattccttgaatttgaagcagaggaggagatgcagatccagaaatcccagtggatgaaaggcccacagtgccttcctccaccagctactccacgcctggagccacggggaccgccagcgcctgaggtcgtcaagcaaccggtgtatctcccaagtaaagctgggccaaaggctcagactgcttgcttgcctccccctaggcctcaaagaccagtaacaaaggctcgacgccctcccccacagccccaccggcgagcagagactaaggctcgactgcctccgcctaggcctcagaggcccgctgaaacgaaggtccctgaggagattccccctgaagttgtacaagaatacgttgatattatggaggaactcttgggcccatccctgggagccacgggggagccagaaaagcagagggaagaaggcaaagtgaaacagccccaggaggaagattggacccccccagaccctggcctattgtcttatatagataagctatgctcccagaaagatttcgtcacaaaggttgaggcagtgatccatcctcagtttctagaggagctgctctcccccgatccccagatggacttcctggctctctctcaggatttagaacaggaggagggcctgaccttggcccaattagtcgaaaagcggctgccccctttaaaggaaaagcagcactcacgcgcagcgccaagtcgcggtactgcacggctggactcttctagcagcaagttcgccgctggacaaggcgctgagcgcgatgtccctgacccgcaggagggggtaggcatggagacctgtccaccacaaaccactgccagggactcccaggggcgtggtcgagcacatactgggatggctaggagtgaagattctgttgtgctgctagggtgccaagattcacctgggctcagagccgctcgccctaccagcccaccgcaagatcacagacctacatgccctggagtggggacaaaagacgccttggacttacccggtgggagtcccgtgcgggagtcacacgggttagcacaggggtcgtcagaagaggaggaactgccgagcttggcctttctgctggggagccagcacaaactgctaccttggtggctgccacagtcgcctgtgcccgcaagcggattactgagtcccgagaaatggggtccccaaggaacacaccagtcccctagtgccgagaggcggggtctgaacttggcgccttctcctgccaataaggcaaaaaagcagcctttgttcggctcactttccccagcggagaagacaccccaccggggacccggtttacgagtttcaggcgaacaaagtttgacatggggcctgggagggccttctcaatcacagaaacggaaaggagatcctttggtatctcgaaaggagaaaaaacagcactgttcccagtag

SEQ ID NO: 283243 - protein, 133 aa, Artificial Sequence
  derived and/or modified sequence
MKVLLLKDAKEDDCGQDPYIRELGLYGLEATLIPVLSFEFLSLPSFSEKLSHPEDYGGLIFTSPRAVEAAELCLEQNNKTEVWERSLKEKWNAKSVYVVGNATASLVSKIGLDTEGETCGNAEKLAEYICSSK

SEQ ID NO: 283244 - DNA, 558 bp, Artificial Sequence
  derived and/or modified sequence
atgaaggtgctgctgctgaaggacgccaaggaggacgactgcggccaggacccctacatcagactgagccaccccgaggactacggcggcctgatcttcaccagccccagagccgtggaggccgccgagctgtgcctggagcagaacaacaagaccgaggtgtgggagagaagcctgaaggagaagtggaacgccaagagcgtgtacgtggtgggcaacgccaccgccagcctggtgagcaagatcggcctggacaccgagggcgagacctgcggcaacgccgagaagctggccgagtacatctgcagcagagagagcagcgccctgcccctgctgttcccctgcggcaacctgaagagagagatcctgcccaaggccctgaaggacaagggcatcgccatggagagcatcaccgtgtaccagaccgtggcccaccccggcatccagggcaacctgaacagctactacagccagcagggcgtgcccgccagcatcaccttcttcagccccagcggcctgacctacagcctgaagcacatccaggagctgagcggctag

SEQ ID NO: 283245 - DNA, 558 bp, Artificial Sequence
  derived and/or modified sequence
atgaaagtgctgctgctgaaagacgctaaagaagatgactgtgggcaagacccctatataagactcagccaccccgaagactacggcggtctgattttcacatccccacgagccgtcgaggccgccgaactatgcctcgagcaaaacaataagacggaagtgtgggaaagatccctcaaagaaaaatggaatgctaagtcggtttatgtcgtgggcaacgccacggcatccctcgtgagtaagataggcctcgataccgagggcgagacgtgcggtaatgctgaaaagctggcggagtatatctgcagccgtgaatcctctgccctgccattgctatttccgtgtggcaacttaaagcgcgaaattctgccgaaagccctcaaagacaagggcatcgccatggagtccattacagtgtaccagacagtggcccacccgggtattcaaggtaacttaaactcctattacagtcagcagggcgtccctgcctcaatcaccttcttctctccgtctggactgacatattccctgaagcacatccaagagctgtccggatag

SEQ ID NO: 283246 - DNA, 558 bp, Artificial Sequence
  derived and/or modified sequence
atgaaggtgctgctgctgaaggatgccaaggaggatgactgtggccaggacccctacatccggctgagccaccctgaggactatggaggcctcatcttcaccagccccagggctgtggaggccgctgagctgtgcctggagcagaacaacaagacagaggtgtgggagaggagcctgaaggagaagtggaatgccaagtctgtgtatgtggtgggcaatgccacagccagcctggtgtccaagattggcctggacacagaaggagagacctgtggaaatgctgagaagctggccgagtacatctgcagccgggagagcagcgccctgcccctgctcttcccctgtggcaacctgaagcgggagatcctgcccaaggccctgaaggacaagggcatcgccatggagagcatcaccgtgtaccagacagtggcccaccctggcatccagggcaacctgaacagctactacagccagcagggcgtgcctgccagcatcaccttcttcagccccagcggcctgacctacagcctgaagcacatccaggagctgagcggctag

SEQ ID NO: 283247 - DNA, 558 bp, Artificial Sequence
  derived and/or modified sequence
atgaaggtgctgctgctgaaggacgccaaggaggacgactgcggccaagatccctacattcgtcttagccaccccgaggactatggggggctgattttcacttctcctagagcagtggaagcagctgaactgtgtcttgagcagaataacaagactgaggtgtgggaaagaagcctgaaagagaaatggaacgccaaatccgtgtacgtcgtgggtaatgctaccgccagcctggtcagtaaaattgggttggacaccgagggcgagacttgcggaaacgctgaaaaacttgccgagtatatttgctcccgcgaatcaagcgccctcccactcctatttccttgtggcaaccttaagcgtgagatacttccgaaggcattaaaagataaggggatcgcaatggaatccatcaccgtgtaccagaccgtggctcaccctggaatacagggcaacctgaactcttactatagccagcagggagtccctgccagtatcacattcttttcgccctccggcctaacatactctttaaagcatatccaagagctgtctgggtag

SEQ ID NO: 283248 - DNA, 558 bp, Artificial Sequence
  derived and/or modified sequence
atgaaagtgctcctcctaaaggacgcaaaggaggacgattgcgggcaggatccttatatccgtctcagtcaccccgaagactacgggggtctgatctttacatcaccgagagctgtcgaggccgcagaattgtgcctggagcaaaacaacaaaactgaggtttgggagagatccttgaaagagaaatggaacgcgaaatctgtgtatgtcgtgggaaacgccacagccagtctggtctctaagatcggcctcgacaccgaaggggagacctgcggcaacgctgaaaagcttgccgaatatatatgctctcgcgagtcatccgctctcccccttttgtttccatgcggaaatctaaagagggaaatactccccaaggccttaaaagataaaggcatcgcaatggagtcaatcacggtctaccagaccgttgctcaccccggaatccagggcaaccttaactcctactatagccaacaaggggtgcccgcaagcattacattcttctcgccgagcggtttaacttattccctgaaacacattcaagagcttagcggctag

SEQ ID NO: 283249 - DNA, 802 bp, Artificial Sequence
  derived and/or modified sequence
gcgcctagctgcgcgcagccacccacgcgaccccagtctgaggtgcggggtcctggggcccggcgcgggtggccgccgcggcccctcgggctgcgtggggagggggcttccgcccctgttgtcattgctcctgcagccttttcgctgggactgcgcgacaccgccccccgaccgggtgcccgctgtgtgccaggccgggtgctgggcacggtcccgcgagtgccctataaggactgccaggcaataatgaaggttcttttactgaaggatgcgaaggaagatgactgtggccaggatccgtatatcaggctttctcatcctgaagattacgggggactcatttttaccagccccagagcagtggaagcagcagagttatgtttggagcaaaacaataaaactgaagtctgggaaaggtctctgaaagaaaaatggaatgccaagtcagtgtatgtggttggaaatgctactgcttctctagtgagtaaaattggcctggatacagaaggagaaacctgtggaaatgcagaaaagcttgcagaatatatttgttccagggagtcctcagcactgcctcttctatttccctgtggaaacctcaaaagagaaatcctgccaaaagcgctcaaggacaaagggattgccatggaaagcataactgtgtatcagacagttgcacacccaggaatccaagggaacctgaacagctactattcccagcagggggttccagccagcatcacattttttagtccctctggcctcacatacagtctcaagcacattcaggagttatctggtg

SEQ ID NO: 283250 - protein, 139 aa, Artificial Sequence
  derived and/or modified sequence
MKVLLLKDAKEDDCGQDPYIRELGLYGLEATLIPVLSFEFLSLPSFSEKLSHPEDYGGLIFTSPRAVEAAELCLEQNNKTEVWERSLKEKWNAKSVYVVGNATASLVSKIGLDTEGETCGNAEKLAEYICSSEEVKGIF

SEQ ID NO: 283251 - DNA, 402 bp, Artificial Sequence
  derived and/or modified sequence
atgaaggtgctgctgctgaaggacgccaaggaggacgactgcggccaggacccctacatcagagagctgggcctgtacggcctggaggccaccctgatccccgtgctgagcttcgagttcctgagcctgcccagcttcagcgagaagctgagccaccccgaggactacggcggcctgatcttcaccagccccagagccgtggaggccgccgagctgtgcctggagcagaacaacaagaccgaggtgtgggagagaagcctgaaggagaagtggaacgccaagagcgtgtacgtggtgggcaacgccaccgccagcctggtgagcaagatcggcctggacaccgagggcgagacctgcggcaacgccgagaagctggccgagtacatctgcagcagcaagtag

SEQ ID NO: 283252 - DNA, 420 bp, Artificial Sequence
  derived and/or modified sequence
atgaaggtgctgctgctgaaggacgccaaggaggacgactgcggccaggacccctacatcagagagctgggcctgtacggcctggaggccaccctgatccccgtgctgagcttcgagttcctgagcctgcccagcttcagcgagaagctgagccaccccgaggactacggcggcctgatcttcaccagccccagagccgtggaggccgccgagctgtgcctggagcagaacaacaagaccgaggtgtgggagagaagcctgaaggagaagtggaacgccaagagcgtgtacgtggtgggcaacgccaccgccagcctggtgagcaagatcggcctggacaccgagggcgagacctgcggcaacgccgagaagctggccgagtacatctgcagcagcgaggaggtgaagggcatcttctag

SEQ ID NO: 283253 - DNA, 402 bp, Artificial Sequence
  derived and/or modified sequence
atgaaggtccttcttctcaaagatgctaaggaagacgactgcggccaagacccttacatccgggagcttggcttgtatggactcgaagccaccttgatacctgtgctctccttcgagtttctgagtctgcctagtttctccgagaaattgtcccaccccgaagactatggcggcttgatctttacctcacctagggccgtcgaagccgcagagttgtgcctggagcagaataacaagacagaagtatgggagcgctcactcaaggaaaagtggaacgccaagagcgtgtacgtggtgggcaacgctacggcatccctagtttcgaagatcggattggacaccgagggcgagacttgcggcaatgctgaaaagctcgcagagtacatatgtagctctaaatag

SEQ ID NO: 283254 - DNA, 420 bp, Artificial Sequence
  derived and/or modified sequence
atgaaggtgctgcttctgaaagacgcgaaggaagatgactgtggtcaggatccctacattcgggaacttggcctgtatggcctggaagctaccctaatccctgtcctttccttcgaatttctgagcttaccatcctttagtgaaaaactgtcccaccccgaggattatggcggcctcattttcacgagccccagagcggtcgaagcagccgaattgtgtctggagcaaaacaacaagactgaagtctgggagcgatctctaaaggagaagtggaacgctaagtccgtgtacgtcgtcggtaacgccacagcatcccttgtcagcaagattggtctcgataccgagggcgagacctgcggtaatgccgaaaaactcgccgagtacatttgctcctccgaagaggtgaaggggattttttag

SEQ ID NO: 283255 - DNA, 402 bp, Artificial Sequence
  derived and/or modified sequence
atgaaggtgctgctgctgaaggatgccaaggaggatgactgtggccaggacccctacatccgggagctgggcctgtatggcctggaggccaccctcatccctgtgctgagctttgagttcctgagcctgcccagcttcagcgagaagctgagccaccctgaggactatggaggcctcatcttcaccagccccagggctgtggaggccgctgagctgtgcctggagcagaacaacaagacagaggtgtgggagaggagcctgaaggagaagtggaatgccaagtctgtgtatgtggtgggcaatgccacagccagcctggtgtccaagattggcctggacacagaaggagagacctgtggaaatgctgagaagctggccgagtacatctgcagcagcaagtag

SEQ ID NO: 283256 - DNA, 420 bp, Artificial Sequence
  derived and/or modified sequence
atgaaggtgctgctgctgaaggatgccaaggaggatgactgtggccaggacccctacatccgggagctgggcctgtatggcctggaggccaccctcatccctgtgctgagctttgagttcctgagcctgcccagcttcagcgagaagctgagccaccctgaggactatggaggcctcatcttcaccagccccagggctgtggaggccgctgagctgtgcctggagcagaacaacaagacagaggtgtgggagaggagcctgaaggagaagtggaatgccaagtctgtgtatgtggtgggcaatgccacagccagcctggtgtccaagattggcctggacacagaaggagagacctgtggaaatgctgagaagctggccgagtacatctgcagcagcgaggaggtgaagggcatcttctag

SEQ ID NO: 283257 - DNA, 402 bp, Artificial Sequence
  derived and/or modified sequence
atgaaggtgctgctgctgaaggacgccaaggaggacgactgcggccaggacccctacataagagagctcgggctgtatggattagaggcaacccttatccctgtactgagttttgaattcctctccctgccttctttctccgaaaaactgagccatcccgaggactacgggggcctgatcttcacgtctccacgggccgtggaggctgccgaactctgtttagagcagaacaacaagaccgaagtgtgggaacgttccctgaaagagaaatggaacgccaaaagtgtctatgtcgtcggcaacgcgacagcatcccttgtgagcaagattgggctggatactgaaggcgaaacctgtgggaatgccgaaaagctggctgaatacatttgtagctccaagtag

SEQ ID NO: 283258 - DNA, 420 bp, Artificial Sequence
  derived and/or modified sequence
atgaaggtgctgctgctgaaggacgccaaggaggacgactgcggccaggatccttacataagagagctgggattgtacgggctggaggccacgttaatccccgtgctgtcatttgagtttctcagtcttccttcattttctgagaaactctcgcatccagaggattatggtggactcatcttcacctctccgcgtgcagtcgaagcagctgagttgtgcttggaacagaataacaagacggaagtgtgggaacggagccttaaagaaaaatggaatgcaaaatccgtctacgtagtaggcaacgcgacagcttctctcgtgtccaagatagggctggatacagaaggagagacctgcggaaacgcagagaaactggcagagtatatctgttcatccgaagaggtgaagggcatcttttag

SEQ ID NO: 283259 - DNA, 402 bp, Artificial Sequence
  derived and/or modified sequence
atgaaggtcctgctgcttaaggacgcaaaggaggatgactgtggacaagacccttacatccgtgaactggggctgtacggactcgaggcaaccctgattccagtgctgagctttgagtttctgtccctgccgagcttctctgagaagttgagccacccagaggattacggaggactaatcttcacaagcccgcgagctgtggaagccgcagagctgtgcttggagcaaaacaataagacagaggtctgggagcggtctcttaaagagaaatggaacgccaaaagtgtttacgtggttggcaatgctacagctagtttggtatccaaaataggtctggacactgagggagaaacctgcggcaatgctgagaagctggcagagtatatttgctcatcaaaatag

SEQ ID NO: 283260 - DNA, 420 bp, Artificial Sequence
  derived and/or modified sequence
atgaaagttctgcttctcaaagatgccaaggaggacgattgtgggcaagacccttacattagggaacttgggctgtacggactcgaagctactctcatcccggtgctctcatttgagttcctctctcttccttctttctcagagaagttgagtcaccccgaagattatggaggactgattttcacgtctcctagggcagtcgaggccgcagagctctgtctggagcagaataacaagacagaggtttgggaacgaagcctgaaagagaagtggaatgctaagagcgtttacgttgtcggcaatgccacagcctcgcttgtatccaagattggcctggacaccgagggtgaaacgtgcggcaatgccgagaagctcgcagagtacatttgcagttccgaagaagtcaaaggtatcttctag

SEQ ID NO: 283261 - DNA, 744 bp, Artificial Sequence
  derived and/or modified sequence
accgccccccgaccgggtgcccgctgtgtgccaggccgggtgctgggcacggtcccgcgagtgccctataaggactgccaggcaataatgaaggttcttttactgaaggatgcgaaggaagatgactgtggccaggatccgtatatcagggaattaggattatatggacttgaagccactttgatccctgttttatcgtttgagtttttgtctcttcccagtttctctgagaagctttctcatcctgaagattacgggggactcatttttaccagccccagagcagtggaagcagcagagttatgtttggagcaaaacaataaaactgaagtctgggaaaggtctctgaaagaaaaatggaatgccaagtcagtgtatgtggttggaaatgctactgcttctctagtgagtaaaattggcctggatacagaaggagaaacctgtggaaatgcagaaaagcttgcagaatatatttgttccagtaagtagaaaaacatcactccaaatgaagccatttattttttgttgacctcacaaccactacctagggaaaagaatatttcctcagtgcattcttggtggtgagattgattggtgagcatcgtataacccactctgggagcatagcctatttgtatttgtgtatgtctatactttgtgaggtttagcccacttccttctaccccctgtaccaaagaacttgacttgaacataacacaaaataaaacatttgggagataaaaa

SEQ ID NO: 283262 - DNA, 1556 bp, Artificial Sequence
  derived and/or modified sequence
ctggggcccggcgcgggtggccgccgcggcccctcgggctgcgtggggagggggcttccgcccctgttgtcattgctcctgcagccttttcgctgggactgcgcgacaccgccccccgaccgggtgcccgctgtgtgccaggccgggtgctgggcacggtcccgcgagtgccctataaggactgccaggcaataatgaaggttcttttactgaaggatgcgaaggaagatgactgtggccaggatccgtatatcagggaattaggattatatggacttgaagccactttgatccctgttttatcgtttgagtttttgtctcttcccagtttctctgagaagctttctcatcctgaagattacgggggactcatttttaccagccccagagcagtggaagcagcagagttatgtttggagcaaaacaataaaactgaagtctgggaaaggtctctgaaagaaaaatggaatgccaagtcagtgtatgtggttggaaatgctactgcttctctagtgagtaaaattggcctggatacagaaggagaaacctgtggaaatgcagaaaagcttgcagaatatatttgttccagtgaagaagtcaaaggaatcttttgaagtgaagaaagtgggtttggacgtgcccttatgctgatgaatcattggagtaatatctggggtttagccgcatccttggtggcaaggcggtggggaaagcccctgagggtgaggccagcctgagccccaagggaaaggggctgctgggacctcctgacctcaactcatctccaggagcgcacagggcctcgcacagatgcctcagtctgtaccgctgggagttcgtgccatctcagacctaccctccctacctgggctgtacctaaagagatactgctaggctttctctagaatgtttcatgagccagcactgtgagacattttcaagctaaaaacatacagttcaggagactgtaatctgtggtagaaagtgttcaccatttgctgctagtaaagacggttggccctgtgcttctctggccacttgtgccacatggtgttctcggaagaggcctctccatgcaccagtgtggagaagccctctggaggccaattcaaagagcatctgaggctaagcaactgaaaggaaaaggcctgatggccaacgtgttgctttctgtggaatgttccagactggattgctgggggtcattttctttaacagcagcctagacaggcagtgactctcttttattcagccaggtgttgaaatagctgcagggaagccacagacagttgttccagctttccggatcagagagcactggttgggccccgtgccatgtggccccagccccatgggatcgctcctcaggtcatggagccacacatcagtgtggagggttcgctccaggggttcctggtacaggatgcagatgggtcttgtctggctccaggctttttgtttctaatgttgtttctagagagtcatcatcaccgcataaatggtatcaaagcccttcttttaaaaatgtagaaataaatgtaaatggtagatcttga

SEQ ID NO: 283263 - protein, 806 aa, Artificial Sequence
  derived and/or modified sequence
GQMTDQVADLRARGQGSSPVAMQKAQQVSQGLDVLTAKVENAARKLEAMTNSKQSIAKKIDAAQNWLADPNGGPEGEEQIRGALAEARKIAELCDDPKERDDILRSLGEISALTSKLADLRRQGKGDSPEARALAKQVATALQNLQTKTNRAVANSRPAKAAVHLEGKIEQAQRWIDNPTVDDRGVGQAAIRGLVAEGHRLANVMMGPYRQDLLAKCDRVDQLTAQLADLAARGEGESPQARALASQLQDSLKDLKARMQEAMTQEVSDVFSDTTTPIKLLAVAATAPPDAPNREEVFDERAANFENHSGKLGATAEKAAAVGTANKSTVEGIQASVKTARELTPQVVSAARILLRNPGNQAAYEHFETMKNQWIDNVEKMTGLVDEAIDTKSLLDASEEAIKKDLDKCKVAMANIQPQMLVAGATSIARRANRILLVAKREVENSEDPKFREAVKAASDELSKTISPMVMDAKAVAGNISDPGLQKSFLDSGYRILGAVAKVREAFQPQEPDFPPPPPDLEQLRLTDELAPPKPPLPEGEVPPPRPPPPEEKDEEFPEQKAGEVINQPMMMAARQLHDEARKWSSKPGIPAAEVGIGVVAEADAADAAGFPVPPDMEDDYEPELLLMPSNQPVNQPILAAAQSLHREATKWSSKGNDIIAAAKRMALLMAEMSRLVRGGSGTKRALIQCAKDIAKASDEVTRLAKEVAKQCTDKRIRTNLLQVCERIPTISTQLKILSTVKATMLGRTNISDEESEQATEMLVHNAQNLMQSVKETVREAEAASIKIRTDAGFTLRWVRKTPWYQ

SEQ ID NO: 283264 - DNA, 2421 bp, Artificial Sequence
  derived and/or modified sequence
ggccagatgaccgaccaggtggccgacctgagagccagaggccagggcagcagccccgtggccatgcagaaggcccagcaggtgagccagggcctggacgtgctgaccgccaaggtggagaacgccgccagaaagctggaggccatgaccaacagcaagcagagcatcgccaagaagatcgacgccgcccagaactggctggccgaccccaacggcggccccgagggcgaggagcagatcagaggcgccctggccgaggccagaaagatcgccgagctgtgcgacgaccccaaggagagagacgacatcctgagaagcctgggcgagatcagcgccctgaccagcaagctggccgacctgagaagacagggcaagggcgacagccccgaggccagagccctggccaagcaggtggccaccgccctgcagaacctgcagaccaagaccaacagagccgtggccaacagcagacccgccaaggccgccgtgcacctggagggcaagatcgagcaggcccagagatggatcgacaaccccaccgtggacgacagaggcgtgggccaggccgccatcagaggcctggtggccgagggccacagactggccaacgtgatgatgggcccctacagacaggacctgctggccaagtgcgacagagtggaccagctgaccgcccagctggccgacctggccgccagaggcgagggcgagagcccccaggccagagccctggccagccagctgcaggacagcctgaaggacctgaaggccagaatgcaggaggccatgacccaggaggtgagcgacgtgttcagcgacaccaccacccccatcaagctgctggccgtggccgccaccgccccccccgacgcccccaacagagaggaggtgttcgacgagagagccgccaacttcgagaaccacagcggcaagctgggcgccaccgccgagaaggccgccgccgtgggcaccgccaacaagagcaccgtggagggcatccaggccagcgtgaagaccgccagagagctgaccccccaggtggtgagcgccgccagaatcctgctgagaaaccccggcaaccaggccgcctacgagcacttcgagaccatgaagaaccagtggatcgacaacgtggagaagatgaccggcctggtggacgaggccatcgacaccaagagcctgctggacgccagcgaggaggccatcaagaaggacctggacaagtgcaaggtggccatggccaacatccagccccagatgctggtggccggcgccaccagcatcgccagaagagccaacagaatcctgctggtggccaagagagaggtggagaacagcgaggaccccaagttcagagaggccgtgaaggccgccagcgacgagctgagcaagaccatcagccccatggtgatggacgccaaggccgtggccggcaacatcagcgaccccggcctgcagaagagcttcctggacagcggctacagaatcctgggcgccgtggccaaggtgagagaggccttccagccccaggagcccgacttccccccccccccccccgacctggagcagctgagactgaccgacgagctggccccccccaagccccccctgcccgagggcgaggtgcccccccccagaccccccccccccgaggagaaggacgaggagttccccgagcagaaggccggcgaggtgatcaaccagcccatgatgatggccgccagacagctgcacgacgaggccagaaagtggagcagcaagcccggcatccccgccgccgaggtgggcatcggcgtggtggccgaggccgacgccgccgacgccgccggcttccccgtgccccccgacatggaggacgactacgagcccgagctgctgctgatgcccagcaaccagcccgtgaaccagcccatcctggccgccgcccagagcctgcacagagaggccaccaagtggagcagcaagggcaacgacatcatcgccgccgccaagagaatggccctgctgatggccgagatgagcagactggtgagaggcggcagcggcaccaagagagccctgatccagtgcgccaaggacatcgccaaggccagcgacgaggtgaccagactggccaaggaggtggccaagcagtgcaccgacaagagaatcagaaccaacctgctgcaggtgtgcgagagaatccccaccatcagcacccagctgaagatcctgagcaccgtgaaggccaccatgctgggcagaaccaacatcagcgacgaggagagcgagcaggccaccgagatgctggtgcacaacgcccagaacctgatgcagagcgtgaaggagaccgtgagagaggccgaggccgccagcatcaagatcagaaccgacgccggcttcaccctgagatgggtgagaaagaccccctggtaccagtag

SEQ ID NO: 283265 - DNA, 2421 bp, Artificial Sequence
  derived and/or modified sequence
gggcagatgaccgatcaggtggccgacttgagagcaagaggacagggctcaagtcctgttgccatgcagaaggcacagcaggtttcccaggggctcgacgttttgaccgctaaggtggagaatgccgcacggaagctggaagccatgacgaattcaaagcagagtatcgcaaagaagattgacgccgcccagaattggttagctgatccaaacgggggccccgagggtgaggagcagataaggggggccctagcagaggcccgaaagattgctgaactgtgtgacgatcccaaagaacgggacgatatcctaagatccctgggcgaaattagtgcacttacaagcaaactggccgatctccgacggcagggcaagggcgatagcccagaggcacgtgctctggcaaagcaggtggccaccgcactgcagaacctccagaccaagacaaaccgggccgtagccaattctcgacctgcaaaagccgctgtgcacctcgagggcaagatcgaacaggcgcagaggtggattgacaaccctacagtggacgaccgcggggtcgggcaagccgccatccggggcttggttgccgaagggcatcgcctggcaaacgttatgatgggtccataccggcaagacttactcgcaaagtgtgatcgggtggatcagcttactgcacagctggccgaccttgcagctcgaggggagggagagtccccccaagccagagctctggcctcacagttgcaggactcattaaaagatttgaaggccagaatgcaggaagcaatgactcaggaggtgtcagacgttttctccgacacaaccacccctattaaactccttgcggtcgccgcaacagctccgccagacgcccccaaccgagaagaagttttcgacgaacgcgccgctaactttgagaaccacagtgggaaactgggcgctaccgctgagaaggcagctgctgtcggcactgccaacaagagtacagtcgaaggtatacaggcctccgtgaaaacagcccgcgagctgaccccacaggtagttagcgcagctcgaattcttttgagaaacccagggaaccaggcagcctatgagcactttgaaacgatgaaaaaccaatggattgacaatgtggagaagatgacaggactggtggatgaggctatagataccaagagcctcctggacgcttccgaagaagccattaaaaaggacctcgataagtgtaaagttgccatggccaacattcagccccagatgctagtggcaggggccacatctatcgcccggcgggccaataggattctactcgttgctaaacgagaggtcgagaatagtgaggatccaaaatttagagaggcagtcaaggcggccagcgatgagctctcgaaaacaatttctcctatggttatggacgccaaagcagtggcaggaaatatctctgacccaggccttcaaaaatccttcctggattctgggtatagaattctcggcgccgtggctaaagtgcgggaagcgtttcagccccaggagcctgattttccgcctcctccacctgatttggaacagttgcggctgaccgacgagctggccccccctaaaccgcccttgcccgaaggcgaggttcctccccctcgtccccccccaccagaagagaaggacgaggagttccccgaacaaaaggcaggtgaagtgattaatcagcccatgatgatggctgcccgtcagctccacgatgaggcaagaaagtggtcaagcaagccagggatcccggcagcagaagtgggaatcggagtcgttgcggaggctgatgctgcggacgccgcaggttttccagtgcccccagacatggaggatgactatgaaccagagctccttttgatgccatcaaatcagcctgtgaaccagcctattttggccgcagcccagtctcttcatcgggaggcgacaaagtggtccagcaagggcaatgacataatagcagcagccaagcggatggccctgctcatggctgagatgtctcggctggtacgaggcggatccggcaccaaaagagccttaatccagtgcgccaaagacattgctaaggccagtgacgaggtgacaaggctggctaaggaggtcgctaagcagtgtacggacaaacggatacgaacaaacttgctgcaggtatgcgagagaattcccacaatttctacgcagctgaagatactctctacagttaaagccacaatgctcgggaggacgaacatttctgatgaagagtcagaacaggctacagagatgttagttcacaacgcacagaatttgatgcagagcgtgaaagaaaccgtgcgggaggccgaagccgcaagcattaagatacgcacggacgcagggttcaccctgcggtgggtccgcaaaacaccatggtaccagtag

SEQ ID NO: 283266 - DNA, 2421 bp, Artificial Sequence
  derived and/or modified sequence
ggccagatgacagaccaggtggccgacctgcgggcccggggccagggcagcagccctgtggccatgcagaaggcccagcaggtgtcccagggcctggatgtgctgacagccaaggtggagaatgctgccaggaagctggaggccatgaccaacagcaagcagagcatcgccaagaagattgatgctgcccagaactggctggccgaccccaatggaggccctgagggggaggagcagatccggggggccctggccgaggccaggaagattgctgagctgtgtgatgaccccaaggagagagatgacatcctgcggagcctgggggagatcagcgccctgaccagcaagctggccgacctgcggcggcagggcaaaggagacagccctgaggcccgggccctggccaagcaggtggccacagccctgcagaacctgcagaccaagaccaacagagctgtggccaacagcaggcctgccaaggctgctgtgcacctggagggcaagattgagcaggcccagcgctggattgacaaccccaccgtggatgacagaggagtgggccaggccgccatccggggcctggtggccgagggccaccggctggccaacgtgatgatgggcccctaccggcaggacctgctggccaagtgtgacagagtggaccagctgacagcccagctggccgacctggccgcccggggggagggggagagcccccaggcccgggccctggccagccagctgcaggacagcctgaaggacctgaaggccaggatgcaggaggccatgacccaggaggtgtctgatgtgttcagtgacaccaccacccccatcaagctgctggccgtggccgccacagcccccccagatgcccccaaccgggaggaggtgtttgatgagcgggccgccaactttgagaaccacagcggcaagctgggcgccacagctgagaaggctgctgctgtgggcacagccaacaagagcacagtggagggcatccaggcctctgtgaagacagcccgggagctgaccccccaggtggtgtctgctgcccgcatcctgctgaggaaccctggcaaccaggccgcctatgagcactttgagaccatgaagaaccagtggattgacaacgtggagaagatgacaggcctggtggatgaggccatcgacaccaagagcctgctggatgccagcgaggaggccatcaagaaggacctggacaagtgcaaggtggccatggccaacatccagccccagatgctggtggccggggccaccagcatcgcccggcgggccaaccgcatcctgctggtggccaagcgggaggtggagaacagcgaggaccccaagttccgggaggccgtgaaggccgccagtgatgagctgagcaagaccatcagccccatggtgatggatgccaaggctgtggccggcaacatcagtgaccccggcctgcagaagagcttcctggacagcggctaccgcatcctgggcgctgtggccaaggtgcgggaggccttccagccccaggagccagacttccccccacctcctccagacctggagcagctgcggctgacagatgagctggccccacccaagccacccctgcctgagggggaggtgcccccacccaggcctcctcctcctgaggagaaggatgaggagttccctgagcagaaggccggggaggtgatcaaccagcccatgatgatggccgcccggcagctgcatgatgaggccaggaagtggagcagcaagccaggcatcccagctgctgaggtgggcattggagtggtggccgaggctgatgctgctgatgctgctggcttccctgtgcccccagacatggaggatgattatgagcctgagctgctgctgatgcccagcaaccagcctgtgaaccagcccatcctggccgccgcccagagcctgcaccgggaggccaccaagtggagcagcaaaggaaatgacatcatcgccgccgccaagaggatggccctgctgatggccgagatgagccggctggtgcggggcggcagcggcaccaagagggccctgatccagtgtgccaaggacatcgccaaggccagtgatgaggtgacccggctggccaaggaggtggccaagcagtgcacagacaagaggatccgcaccaacctgctgcaggtgtgtgagcgcatccccaccatcagcacccagctgaagatcctgagcacagtgaaggccaccatgctgggccgcaccaacatcagtgatgaggagagcgagcaggccacagagatgctggtgcacaatgcccagaacctgatgcagagcgtgaaggagaccgtgcgggaggccgaggccgccagcatcaagatcagaacagatgctggcttcaccctgcgctgggtgaggaagaccccctggtaccagtag

SEQ ID NO: 283267 - DNA, 2421 bp, Artificial Sequence
  derived and/or modified sequence
ggccagatgaccgaccaggtggccgacctgcgggcccggggccaggggtcttcccctgtcgcgatgcagaaggcacagcaggtgagtcagggccttgatgttttgacggccaaggttgaaaacgccgctcgcaaattagaagcaatgaccaatagtaagcagtcgatcgccaagaaaattgatgctgcccaaaattggctggctgaccccaacggtggaccggagggcgaggagcagatcaggggagccctggccgaagcacgcaaaatcgcagagctttgcgacgaccctaaggagcgcgacgatatacttcgatctcttggcgaaatttcagcccttacatctaagctggccgaccttcgcagacagggtaagggggactcacccgaggctcgcgcattggctaaacaagtcgctaccgctctccagaacctgcagacaaaaactaatagagctgtcgcgaacagcagaccggctaaagcagccgttcacctcgaggggaagattgagcaggcccagcggtggattgataaccctacagtggatgacaggggtgttgggcaggcagctattcgcggattggtagccgaggggcaccgcctcgcgaatgtgatgatgggaccctatagacaggatctgctggccaaatgcgaccgtgtggatcagctgaccgcacagctcgccgatctggcagccagaggtgagggtgagtcaccccaagccagagcactggctagccagttgcaggattccctgaaagacttgaaagcccggatgcaggaggccatgacccaggaggtgtcggacgtgttttccgacactacaacacccatcaagttactggcggtggctgctactgcacctccagatgcaccaaatcgggaggaagtgtttgatgaacgagccgcgaactttgaaaatcatagcggcaagctcggagctacagctgaaaaagcagcagccgtggggaccgctaacaagtccacagtcgagggcatacaggcatctgttaagacagctcgcgagctcaccccccaggtagtctccgcagccagaatcctgttaagaaatccgggtaatcaggctgcatacgagcattttgaaactatgaagaaccaatggattgataacgtcgagaagatgaccggtctggtcgatgaagctatcgacactaagtccctcttagacgcctccgaggaggcgattaaaaaggacctagataagtgcaaggttgctatggctaacatccaaccgcagatgctggtggctggggcgacctctatcgctagaagagcaaataggatcctgttagtggccaaaagagaggttgaaaattcagaggatcccaagttccgtgaagcagttaaggccgcgtctgacgagctatccaaaacgatttcccccatggtgatggacgcaaaagccgtagcaggcaatatctcagatcccggcttacagaagtcattcctcgacagcggttatcggattttaggcgccgtcgccaaagtaagggaggcattccagccccaagaacccgatttcccaccgccccccccagaccttgaacagctccgccttaccgacgaattggcccccccaaagccccccctgccagaaggcgaagtgcccccgccacgtccgcctcctcccgaagagaaagacgaggagtttcccgaacagaaggccggggaagttatcaatcaacctatgatgatggctgcccgacagctgcacgatgaagcccggaagtggtcctctaagcctggaataccagccgccgaggtgggaatcggagtggtggccgaggcggacgcggcagatgccgccgggtttcccgttcctcctgatatggaagacgactatgagcctgagctcctcctcatgcctagtaaccagcccgtcaaccaacctattctcgcggcagcacagagtctgcatcgcgaagccaccaagtggtcttcaaaaggcaatgatatcatcgccgcggccaaacgcatggcgcttctcatggcagagatgtcccgactagtcagaggcggatctggcacaaaacgggcgttaattcagtgcgcaaaggacatagccaaggcctcggatgaggtgacgaggcttgctaaagaagtagccaagcagtgcaccgacaagcggattaggacaaatttgctgcaggtgtgcgaaagaattcctaccattagcacccaactgaagatcctatcaacagtcaaagctaccatgctcgggcgcacgaatatctccgacgaggagagcgaacaggctactgagatgttggtgcataacgcccagaacctaatgcagagtgttaaagagaccgtcagggaagcagaagcagcgtctatcaaaattcggaccgatgcagggttcactcttcgctgggtccggaagacaccctggtatcagtag

SEQ ID NO: 283268 - DNA, 2421 bp, Artificial Sequence
  derived and/or modified sequence
ggccaaatgactgaccaggtcgctgatctgcgagctcgcggacagggatcttccccggtcgctatgcaaaaggcccagcaggtgtcccaaggcctggacgtgcttacagcaaaagtcgagaacgccgcacgcaagctggaggccatgaccaactcgaagcagagcattgctaagaaaattgatgccgctcagaattggctggccgatccgaatgggggtcccgaaggcgaggagcaaatacggggagcactggcggaggctaggaaaatcgcagagctgtgcgatgaccctaaggaaagagatgatatactaagatctcttggcgaaatcagcgcccttacctccaagctggcagatctccgaagacagggcaaaggagattcaccagaggccagggccctggctaaacaggtcgcgactgcacttcagaatctgcagactaaaaccaatcgcgctgtggcaaacagccggccagccaaagctgccgtccatctggaaggcaaaattgaacaagcacagcgttggatagacaatccaactgtggacgaccgaggcgtcggccaagccgctatcaggggcttagttgctgagggacatagactggccaatgtgatgatgggcccttacagacaggacttactggcaaagtgtgacagagtcgatcaactgacagcacagctggccgacctggcagcccgaggtgagggggagagccctcaggcccgtgctcttgcttcccagcttcaggacagcctcaaagatcttaaagcccgtatgcaggaggcaatgactcaggaggtgtcagatgtctttagtgacactaccacacccatcaagctgctggcggtagctgccaccgccccacccgacgcccctaacagggaggaggtgttcgacgaacgggctgcgaacttcgaaaaccatagcggcaaactgggtgccacggccgagaaagccgctgcagtggggactgctaataaatccactgtagagggtattcaggcatccgtgaagacagcacgcgaactgacaccacaagtcgttagtgccgcacgtattttgctgcgaaaccctggcaaccaggcggcatatgagcacttcgagaccatgaagaaccagtggatagacaacgtcgaaaaaatgacgggcttagttgacgaggctatcgataccaaatctctgttagacgcctccgaggaggctatcaagaaggacctggacaaatgcaaggtagctatggccaatatacagccccagatgctggttgcgggagccacttccattgcacgaagagctaatcgcatcctgcttgtagctaagagggaggttgagaattcggaggatcctaaattcagagaagcagtcaaagctgcttccgacgagttaagtaaaacaatctctccaatggttatggacgccaaggccgtggctggcaacatcagtgaccccggtttgcaaaaaagtttcttagactcgggctaccgcatcttgggggcagtcgctaaagtccgggaagcctttcagcctcaggaacctgactttccgcctcctcccccagacctcgagcagctgcgcctgacagatgagctggcaccacccaagcctcctctgccagaaggcgaagtgcctccacccaggccaccccctccggaggaaaaggatgaagagtttcctgagcagaaagcaggtgaagtcatcaatcagccgatgatgatggccgctagacagctgcacgatgaggcacgcaagtggagttcaaagcctgggattcccgctgcggaagtgggcattggagtcgtggcagaagcagacgcggctgatgctgccggttttccagtgccccctgacatggaagatgactatgagcctgagctgctgctgatgccgtcaaaccaaccagtgaaccagccaatactcgccgcagctcaatccctgcatcgcgaggctacaaaatggagtagcaaggggaacgacattattgccgcagctaaacggatggcattgctgatggctgaaatgtccaggctggtccgagggggaagcgggactaagagagcacttatccagtgcgcaaaagatatcgctaaagcatccgacgaggtgaccaggctggctaaggaggtggctaagcagtgcacggacaagcgcattcgcaccaacctgctccaagtgtgtgagaggatcccaacaattagcactcagctgaagatactgtctaccgtgaaagcgacaatgctgggacgaactaatatatccgatgaagagtctgaacaggccactgagatgctagtacataatgcacagaacctcatgcaatcagtgaaggaaaccgttcgcgaagccgaggcggcaagcattaagattagaacggatgctgggttcaccctgaggtgggtgagaaaaacaccttggtaccaatag

SEQ ID NO: 283269 - DNA, 4412 bp, Artificial Sequence
  derived and/or modified sequence
gggcagatgactgatcaagtggctgacctccgtgccagaggacaaggatcctcaccggtggccatgcagaaagctcagcaggtatctcagggtctggatgtgctcacagcaaaagtggaaaatgcagctcgcaagctggaagccatgaccaactcaaagcagagcattgcaaagaagatcgatgctgctcagaactggcttgcagatccaaatggtggaccggaaggagaagagcagattcgaggtgctttggctgaagctcggaaaatagcagaattatgtgatgatcctaaagaaagagatgacattctacgttcccttggggaaatatctgctctgacttctaaattagcagatctacgaagacaggggaaaggagattctccagaggctcgagccttggccaaacaggtggccacggccctgcagaacctgcagaccaaaaccaaccgggctgtggccaacagcagaccggccaaagcagctgtacaccttgagggcaagattgagcaagcacagcggtggattgataatcccacagtggatgaccgtggagtcggtcaggctgccatccgggggcttgtggccgaagggcatcgtctggctaatgttatgatggggccttatcggcaagatcttctcgccaagtgtgaccgagtggaccagctgacagcccagctggctgacctggctgccagaggggaaggggagagtcctcaggcacgagcacttgcatctcagctccaagactccttaaaggatctaaaagctcggatgcaggaggccatgactcaggaagtgtcagatgttttcagcgataccacaactcccatcaagctgttggcagtggcagccacggcgcctcctgatgcgcctaacagggaagaggtatttgatgagagggcagctaactttgaaaaccattcaggaaagcttggtgctacggccgagaaggcggctgcggttggtactgctaataaatcaacagtggaaggcattcaggcctcagtgaagacggcccgagaactcacaccccaggtggtctcggctgctcgtatcttacttaggaaccctggaaatcaagctgcttatgaacattttgagaccatgaagaaccagtggatcgataatgttgaaaaaatgacagggctggtggacgaagccattgataccaaatctctgttggatgcttcagaagaagcaattaaaaaagacctggacaagtgcaaggtagctatggccaacattcagcctcagatgctggttgctggggcaaccagtattgctcgtcgggccaaccggatcctgctggtggctaagagggaggtggagaattccgaggatcccaagttccgtgaggctgtgaaagctgcctctgatgaattgagcaaaaccatctccccgatggtgatggatgcaaaagctgtggctggaaacatttccgaccctggactgcaaaagagcttcctggactcaggatatcggatcctgggagctgtggccaaggtcagagaagccttccaacctcaggagcctgacttcccgccgcctccaccagaccttgaacaactccgactaacagatgagcttgctcctcccaaaccacctctgcctgaaggtgaggtccctccacctaggcctccaccaccagaggaaaaggatgaagagttccctgagcagaaggccggggaggtgattaaccagccaatgatgatggctgccagacagctccatgatgaagctcgcaaatggtccagcaagccgggcatcccagccgctgaggtgggtataggtgttgtagctgaggcagatgcggccgatgctgctggcttccctgtcccccctgacatggaagacgattacgaacctgagctgctgttaatgccatccaatcagccggtcaaccagcccattctggccgcggctcagtccttgcatcgggaagctaccaagtggtctagtaagggcaatgacatcattgcagcagccaagcgcatggctctgctgatggctgagatgtctcggctggtaagagggggcagtggtaccaagcgggcactcattcagtgtgccaaggacatcgccaaggcctcagatgaggtgactcggttggccaaggaggttgccaagcagtgcacagataaacggattagaaccaacctcttacaggtatgtgagcgaatcccaaccataagcacccagctcaaaatcctgtccacagtgaaggccaccatgctgggccggaccaacatcagtgatgaggagtctgagcaggccacagagatgctggttcacaatgcccagaacctcatgcagtctgtgaaggagactgtgcgggaagctgaagctgcttcaatcaaaattcgaacagatgctggatttacactgcgctgggttagaaagactccctggtaccagtaggcacctggctgagcctggctggcacagaaacctctactaaaaagaaggaaaatgatctgagtcccaggagctgcccagagttgctgggagctgaaaaatcacatcctggcctggcacatcagaaaggaatgggggcctcttcaaattagaagacatttatactcttttttcatggacactttgaaatgtgtttctgtataaagcctgtattctcaaacacagttacacttgtgcaccctctatcccaataggcagactgggtttctagcccatggacttcacataagctcagaatccaagtgaacactagccagacactctgctctgcccttgttccctaggggacacttccctctgtttctctttccttggctcccattcactcttccagaatcccaagacccagggcccaggcaaatcagttactaagaagaaaattgctgtgcctcccaaaattgttttgagctttccatgttgctgccaaccataccttccttccctgggctgtgctacctgggtccttttcagaagtgagctttgctgctacaggggaaggtggcctctgtggagccccagcatatgggggcctggattcatttcctgcccttcctcagtttaatccttctagtttcccacaatataaaactgtacttcactgtcaggaagaaatcacagaatcatatgattctgcttttaccatgcccctgagcaatgtctgtgctagggaaacttcccgtcccatatcctgcctcagcccgccaaggtagccatcccatgaacacactgtgtcctggtgctctctgccactggaagggcagagtagccagggtgtggccctgccatcttcccagcagggccactcccggcactccatgcttagtcactgcctgcagaggtctgtgctgaggccttatcattcattcttagctcttaattgttcattttgagctgaaatgctgcattttaattttaaccaaaacatgtctcctatcctggtttttgtagccttcctccacatcctttctaaacaagattttaaagacatgtaggtgtttgttcatctgtaactctaaaagatcctttttaaattcagtcctaagaaagaggagtgcttgtcccctaagagtgtttaatggcaaggcagccctgtctgaaggacacttcctgcctaagggagagtggtatttgcagactagaattctagtgctgctgaagatgaatcaatgggaaatactactcctgtaattcctacctccctgcaaccaactacaaccaagctctctgcatctactcccaagtatggggttcaagagagtaatgggtttcatatttcttatcaccacagtaagttcctactaggcaaaatgagagggcagtgtttcctttttggtacttattactgctaagtatttcccagcacatgaaaccttattttttcccaaagccagaaccagatgagtaaaggagtaagaaccttgcctgaacatccttccttcccacccatcgctgtgtgttagttcccaacatcgaatgtgtacaacttaagttggtcctttacactcaggctttcactatttcctttataatgaggatgattattttcaaggccctcagcatatttgtatagttgcttgcctgatataaatgcaatattaatgcctttaaagtatgaatctatgccaaagatcacttgttgttttactaaagaaagattacttagaggaaataagaaaaatcatgtttgctctcccggttcttccagtggtttgagacactggtttacactttatgccggatgtgcttttctccaatatcagtgctcgagacacagtgaagcaaattaaaaaaaaaaaaaaaaaaaatccctgaatgatgattagagacatcaccgctaaaaaactacatttataagctaggatttgttatatgcaaatattttctgcctcttcttttgttctgtttaaaacaataaaatgcatttgtataaaaaa

SEQ ID NO: 283270 - protein, 327 aa, Artificial Sequence
  derived and/or modified sequence
MPVFHTRTIESILEPVAQQISHLVIMHEEGEVDGKAIPDLTAPVAAVQAAVSNLVRVGKETVQTTEDQILKRDMPPAFIKVENACTKLVQAAQMLQSDPYSVPARDYLIDGSRGILSGTSDLLLTFDEAEVPPPRPPPPEEKDEEFPEQKAGEVINQPMMMAARQLHDEARKWSSKGNDIIAAAKRMALLMAEMSRLVRGGSGTKRALIQCAKDIAKASDEVTRLAKEVAKQCTDKRIRTNLLQVCERIPTISTQLKILSTVKATMLGRTNISDEESEQATEMLVHNAQNLMQSVKETVREAEAASIKIRTDAGFTLRWVRKTPWYQ

SEQ ID NO: 283271 - protein, 300 aa, Artificial Sequence
  derived and/or modified sequence
MEPPMEPSGGEQEPGAVRFLDLPWEDVLLPHVLNRVPLRQLLRLQRVSRAFRSLVQLHLAGLRRFDAAQVGPQIPRAALARLLRDAEGLQELALAPCHEWLSDEDLVPVLARNPQLRSVALGGCGQLSRRALGALAEGCPRLQRLSLAHCDWVDGLALRGLADRCPALEELDLTACRQLKDEAIVYLAQRRGAGLRSLSLAVNANVGDAAVQELARNCPELHHLDLTGCLRVGSDGVRTLAEYCPVLRSLRVRHCHHVAESSLSRLRKRGVDIDVEPPLHQALVLLQDMAGFAPFVNLQV

SEQ ID NO: 283272 - protein, 296 aa, Artificial Sequence
  derived and/or modified sequence
MEPSGGEQEPGAVRFLDLPWEDVLLPHVLNRVPLRQLLRLQRVSRAFRSLVQLHLAGLRRFDAAQVGPQIPRAALARLLRDAEGLQELALAPCHEWLSDEDLVPVLARNPQLRSVALGGCGQLSRRALGALAEGCPRLQRLSLAHCDWVDGLALRGLADRCPALEELDLTACRQLKDEAIVYLAQRRGAGLRSLSLAVNANVGDAAVQELARNCPELHHLDLTGCLRVGSDGVRTLAEYCPVLRSLRVRHCHHVAESSLSRLRKRGVDIDVEPPLHQALVLLQDMAGFAPFVNLQV

SEQ ID NO: 283273 - protein, 203 aa, Artificial Sequence
  derived and/or modified sequence
MEPPMEPSGGEQEPGAVRFLDLPWEDVLLPHVLNRVPLRQLLRLQRVSRAFRSLVQLHLAGLRRFDAAQVGPQIPRAALARLLRDAEGLQELALAPCHEWLSDEDLVPVLARNPQLRSVALGGCGQLSRRALGALAEGCPRLQRLSLAHCDWVDGLALRGLADRCPALEELDLTACRQLKDEAIVYLAQRRGAGLRSLSLAVN

SEQ ID NO: 283274 - protein, 190 aa, Artificial Sequence
  derived and/or modified sequence
MEPPMEPSGGEQEPGAVRFLDLPWEDVLLPHVLNRVPLRQLLRLQRVSRAFRSLVQLHLAGLRRFDAAQVGPQIPRAALARLLRDAEGLQELALAPCHEWLSDEDLVPVLARNPQLRSVALGGCGQLSRRALGALAEGCPRLQRLSLAHCDWVDGLALRGLADRCPALEELDLTACRQLKDEAIVYLAQR

SEQ ID NO: 283275 - protein, 208 aa, Artificial Sequence
  derived and/or modified sequence
MEPPMEPSGGEQEPGAVRFLDLPWEDVLLPHVLNRVPLRQLLRLQRVSRAFRSLVQLHLAGLRRFDAAQVGPQIPRAALARLLRDAEGLQELALAPCHEWLSDEDLVPVLARNPQLRSVALGGCGQLSRRALGALAEGCPRLQRLSLAHCDWVDGLALRGLADRCPALEELDLTACRQLKDEAIVYLAQRRGAGLRSLSLAVNANVGD

SEQ ID NO: 283276 - protein, 157 aa, Artificial Sequence
  derived and/or modified sequence
MRSGFRCDEPAEAVAPERQTVSGAVALASFTSPHTHPVDDGGRHYSWGSPKRILGLGPGDAAKEAGLVRPLQGQSEKILLRTRNRQPMEPPMEPSGGEQEPGAVRFLDLPWEDVLLPHVLNRVPLRQLLRLQRVSRAFRSLVQLHLAGLRRFDAAQV

SEQ ID NO: 283277 - DNA, 474 bp, Artificial Sequence
  derived and/or modified sequence
atgagaagcggcttcagatgcgacgagcccgccgaggccgtggcccccgagagacagaccgtgagcggcgccgtggccctggccagcttcaccagcccccacacccaccccgtggacgacggcggcagacactacagctggggcagccccaagagaatcctgggcctgggccccggcgacgccgccaaggaggccggcctggtgagacccctgcagggccagagcgagaagatcctgctgagaaccagaaacagacagcccatggagccccccatggagcccagcggcggcgagcaggagcccggcgccgtgagattcctggacctgccctgggaggacgtgctgctgccccacgtgctgaacagagtgcccctgagacagctgctgagactgcagagagtgagcagagccttcagaagcctggtgcagctgcacctggccggcctgagaagattcgacgccgcccaggtgtag

SEQ ID NO: 283278 - DNA, 2344 bp, Artificial Sequence
  derived and/or modified sequence
ctccctaagcaggctgaggaagaagagatagcaagccctcacctaacttgacccctttcttgtctctccccgctgctagcttctcccttctcgctgccttgcggggtggggaaacgtggaaggaattctgggaaaaccagatgtctgggttctctattcccgtctggcttgattctggacaaggggcttcctctccagggcctcggtttccccatctttaaaatggactgatagcatagacctgcccacctttcagaggtgcccgaagccttgacgagataacagatgagaagtggttttcgttgtgatgagccagctgaagcggttgcaccggagcgccagaccgtcagcggtgcagtggctctcgcgtccttcacatccccccacacccatcccgtggatgatgggggaaggcactactcctggggttccccgaagcggatcctgggactgggacctggggacgcggtgagaggcagccctgaagctgagtccagaggtctggggcgtcattgtcccagggcggacccagccccagaccctacaactaaacccaaggccagccgagaagcactaccactggcgggctgagctgagctctcattcttcttaggactctggacctttggaggaaatgaaagggacccagttggaaatatagtctttcttcgcgccccctacatctctctcccccggcggaaacgcggcccaaactgttacgaagtggaagaggctggatagctcttcataattaatcaggaatgggaggtttgagcaggtttacttgatgagggaaacattatagcctcgccaattcattcattatttcaacaattacttattgaacacctgctacgtggcagacagtaagagcctggatagtttctccccgtttttcaaagtcgctaaacgcgaccagagggcagaggagaggccggtaacctaagagtcctggctccgccccctccgcgtttggccttgcctgctcctcccaccaccacttcgctcagaggcggctactggctcaagaggacgacagaagccagtctctgatgcccaccgcattctccagcttcaggcctcaagccctgtagccgagaaggcgaggcctaatgttacaccaccggtctgttccgcctccgtttcggggtccacccgaaaagctttcagatcggatcctcggtgagacggcactcgattaaataggtctgtctctacaggccaaggaggcgggtttggtgcggccactccaaggccaaagcgagaaaatcttactgcgcacgcgcaatagacagccgatggagccaccgatggagccgtccggaggggagcaagagcccggagccgtcaggttcctggacctgccctgggaagacgtgctgctcccacacgtcctgaaccgggtcccgctgcgccagctgctccggctgcagcgcgttagccgggccttccggtcgctggtgcagcttcacctggccgggctgcgtcgcttcgatgccgcgcaggtgggtccgcagatcccgcgggccgcattggcccggctgctgcgggatgccgaggggctgcaggagctggcactggcgccgtgtcacgaatggctgtcagacgaggacctggtgccggtgctggcgcggaatccgcagctgcggagtgtggcgttgggcggctgcgggcaactgagtcgccgggcgcttggggctttggccgagggctgcccacgcctgcagcgcctgtcgctcgcgcactgtgactgggtggacgggctggcgctgcgcggcctcgctgatcgctgcccggccctggaggagctggatctcaccgcctgccgccagctcaaggacgaggccatcgtgtacctggcgcagaggcgcggcgctggtctccgcagcctctctctggccgtcaacgccaacgtgggggacgccgcggttcaagagttggctcggaactgcccagaactccaccaccttgacctcaccggctgcctccgcgtcggaagcgacggtgtcaggacattggccgagtactgccccgtgctgcgttcgctgcgggtgcggcactgccaccatgtggcggagtccagcctgagccgcttgcggaagcgcggcgtggacatcgacgtggagccgccgctgcaccaggccctggtgctgctgcaggatatggcgggcttcgcaccttttgtcaacctgcaggtctgacccgcctgccaatcggagcacagctggactgtgtggctggggcctgacactgagctgtagggaaactgaactgtgaggacctctggtgagaggccagtgccctgccccaccctggagcttcaaataaagagctttttaccccc

SEQ ID NO: 283279 - DNA, 474 bp, Artificial Sequence
  derived and/or modified sequence
atgaggagtgggtttagatgcgatgaaccagccgaggccgtggccccagaaagacagacagtttccggagccgtcgccttggcttcttttacatctccccacactcaccccgtcgatgacggggggcgtcactatagttgggggagtcctaagaggatccttggccttggtcccggggacgctgctaaagaggccggtttggtgagaccccttcaggggcagagtgagaagattctgctacgcacacgcaatagacagccaatggaaccaccaatggagccgagcggaggcgagcaagaacccggtgccgtgcgattcctggatctcccatgggaggatgtgctgctgccccatgtgctgaatagggtgccactaaggcaactcttgcggctgcagagagtctcacgcgctttccggtccctggtgcagctccacctggccgggctgcggaggttcgacgcagcgcaggtgtag

SEQ ID NO: 283280 - DNA, 2362 bp, Artificial Sequence
  derived and/or modified sequence
tgtcctcccagctaccccctccctaagcaggctgaggaagaagagatagcaagccctcacctaacttgacccctttcttgtctctccccgctgctagcttctcccttctcgctgccttgcggggtggggaaacgtggaaggaattctgggaaaaccagatgtctgggttctctattcccgtctggcttgattctggacaaggggcttcctctccagggcctcggtttccccatctttaaaatggactgatagcatagacctgcccacctttcagaggtgcccgaagccttgacgagataacagatgagaagtggttttcgttgtgatgagccagctgaagcggttgcaccggagcgccagaccgtcagcggtgcagtggctctcgcgtccttcacatccccccacacccatcccgtggatgatgggggaaggcactactcctggggttccccgaagcggatcctgggactgggacctggggacgcggtgagaggcagccctgaagctgagtccagaggtctggggcgtcattgtcccagggcggacccagccccagaccctacaactaaacccaaggccagccgagaagcactaccactggcgggctgagctgagctctcattcttcttaggactctggacctttggaggaaatgaaagggacccagttggaaatatagtctttcttcgcgccccctacatctctctcccccggcggaaacgcggcccaaactgttacgaagtggaagaggctggatagctcttcataattaatcaggaatgggaggtttgagcaggtttacttgatgagggaaacattatagcctcgccaattcattcattatttcaacaattacttattgaacacctgctacgtggcagacagtaagagcctggatagtttctccccgtttttcaaagtcgctaaacgcgaccagagggcagaggagaggccggtaacctaagagtcctggctccgccccctccgcgtttggccttgcctgctcctcccaccaccacttcgctcagaggcggctactggctcaagaggacgacagaagccagtctctgatgcccaccgcattctccagcttcaggcctcaagccctgtagccgagaaggcgaggcctaatgttacaccaccggtctgttccgcctccgtttcggggtccacccgaaaagctttcagatcggatcctcggtgagacggcactcgattaaataggtctgtctctacaggccaaggaggcgggtttggtgcggccactccaaggccaaagcgagaaaatcttactgcgcacgcgcaatagacagccgatggagccaccgatggagccgtccggaggggagcaagagcccggagccgtcaggttcctggacctgccctgggaagacgtgctgctcccacacgtcctgaaccgggtcccgctgcgccagctgctccggctgcagcgcgttagccgggccttccggtcgctggtgcagcttcacctggccgggctgcgtcgcttcgatgccgcgcaggtgggtccgcagatcccgcgggccgcattggcccggctgctgcgggatgccgaggggctgcaggagctggcactggcgccgtgtcacgaatggctgtcagacgaggacctggtgccggtgctggcgcggaatccgcagctgcggagtgtggcgttgggcggctgcgggcaactgagtcgccgggcgcttggggctttggccgagggctgcccacgcctgcagcgcctgtcgctcgcgcactgtgactgggtggacgggctggcgctgcgcggcctcgctgatcgctgcccggccctggaggagctggatctcaccgcctgccgccagctcaaggacgaggccatcgtgtacctggcgcagaggcgcggcgctggtctccgcagcctctctctggccgtcaacgccaacgtgggggacgccgcggttcaagagttggctcggaactgcccagaactccaccaccttgacctcaccggctgcctccgcgtcggaagcgacggtgtcaggacattggccgagtactgccccgtgctgcgttcgctgcgggtgcggcactgccaccatgtggcggagtccagcctgagccgcttgcggaagcgcggcgtggacatcgacgtggagccgccgctgcaccaggccctggtgctgctgcaggatatggcgggcttcgcaccttttgtcaacctgcaggtctgacccgcctgccaatcggagcacagctggactgtgtggctggggcctgacactgagctgtagggaaactgaactgtgaggacctctggtgagaggccagtgccctgccccaccctggagcttcaaataaagagctttttaccccc

SEQ ID NO: 283281 - DNA, 474 bp, Artificial Sequence
  derived and/or modified sequence
atgaggagcggcttccgctgtgatgagcctgctgaggccgtggcccctgagcggcagacagtgtctggagctgtggccctggccagcttcaccagcccccacacccaccctgtggatgatggcggccgccactacagctggggcagccccaagaggatcctgggcctgggccctggagatgctgccaaggaggccggcctggtgcggcccctgcagggccagagcgagaagatcctgctgcggaccaggaaccggcagcccatggagccccccatggagcccagcggcggggagcaggagcctggagctgtgcgcttcctggacctgccctgggaggatgtgctgctgccccacgtgctgaacagagtgcccctgcggcagctgctgcggctgcagagggtgtcccgggccttccgcagcctggtgcagctgcacctggccggcctgcggagatttgatgctgcccaggtgtag

SEQ ID NO: 283282 - DNA, 474 bp, Artificial Sequence
  derived and/or modified sequence
atgcggagcggcttccggtgcgacgagcccgccgaggccgtggcccccgagaggcaaacagtgtcgggcgcagtggcactggctagtttcacaagtccgcatacgcatccagttgacgatgggggccgtcactactcttgggggtcacccaagcggatcttgggacttggccccggagacgcagccaaggaggccggcctcgtaaggcccctccaaggacagagcgagaagatcttactgcggactagaaaccgccagcctatggaacccccgatggagccatccggtggcgaacaggagccgggagctgtacgcttccttgatctcccttgggaggatgtcctgctgccacatgtgttaaatcgcgtacccttaagacagctcctaaggctacaacgagtgtcccgggctttccgctcactggtgcagctgcatctggctggcttaagacggttcgatgccgctcaggtgtag

SEQ ID NO: 283283 - DNA, 804 bp, Artificial Sequence
  derived and/or modified sequence
gaggcggctactggctcaagaggacgacagaagccagtctctgatgcccaccgcattctccagcttcaggcctcaagccctgtagccgagaaggcgaggcctaatgttacaccaccggccaaggaggcgggtttggtgcggccactccaaggccaaagcgagaaaatcttactgcgcacgcgcaatagacagccgatggagccaccgatggagccgtccggaggggagcaagagcccggagccgtcaggttcctggacctgccctgggaagacgtgctgctcccacacgtcctgaaccgggtcccgctgcgccagctgctccggctgcagcgcgttagccgggccttccggtcgctggtgcagcttcacctggccgggctgcgtcgcttcgatgccgcgcaggtgggtccgcagatcccgcgggccgcattggcccggctgctgcgggatgccgaggggctgcaggagctggcactggcgccgtgtcacgaatggctgtcagacgaggacctggtgccggtgctggcgcggaatccgcagctgcggagtgtggcgttgggcggctgcgggcaactgagtcgccgggcgcttggggctttggccgagggctgcccacgcctgcagcgcctgtcgctcgcgcactgtgactgggtggacgggctggcgctgcgcggcctcgctgatcgctgcccggccctggaggagctggatctcaccgcctgccgccagctcaaggacgaggccatcgtgtacctggcgcagaggcgcggcgctggtctccgcagcctctctctggccgtcaac

SEQ ID NO: 283284 - DNA, 474 bp, Artificial Sequence
  derived and/or modified sequence
atgaggagtggatttcgctgcgatgaacccgctgaggcagtggcgcctgagaggcagactgtgtcgggggctgtcgccctggccagttttacctccccacacacccacccagtcgacgacggcggaagacactacagctggggatccccaaaaagaatcctcggtcttggcccaggtgacgccgctaaggaggctggcctcgtgaggcccctccagggccagagcgaaaaaattctgctgcgtacgcgaaacagacagccaatggagccacctatggaaccaagcgggggagaacaggaacctggcgctgttaggtttctggaccttccttgggaggatgtcttgttgccacacgtgctcaaccgggttccactgaggcagcttctccgtctgcagcgcgtcagtagggcattccgcagtctggtacaactgcatctggctggactccggcgttttgatgcagcccaggtgtag

SEQ ID NO: 283285 - DNA, 874 bp, Artificial Sequence
  derived and/or modified sequence
acacggtatgggtgtagactggacccgccccctaaatccaggagaccatcaactatggaaaggagatctagggaacaccgtcttgaacccgccaggggttttgagtctcggacccaggagatccaaccctgaccaccctcccaggatgcagcagggggatgttaaatcagacttcaggaagaacttccttgctgcctgagttaggtgtcgtcacgcctgcccaggggccaaggaggcgggtttggtgcggccactccaaggccaaagcgagaaaatcttactgcgcacgcgcaatagacagccgatggagccaccgatggagccgtccggaggggagcaagagcccggagccgtcaggttcctggacctgccctgggaagacgtgctgctcccacacgtcctgaaccgggtcccgctgcgccagctgctccggctgcagcgcgttagccgggccttccggtcgctggtgcagcttcacctggccgggctgcgtcgcttcgatgccgcgcaggtgggtccgcagatcccgcgggccgcattggcccggctgctgcgggatgccgaggggctgcaggagctggcactggcgccgtgtcacgaatggctgtcagacgaggacctggtgccggtgctggcgcggaatccgcagctgcggagtgtggcgttgggcggctgcgggcaactgagtcgccgggcgcttggggctttggccgagggctgcccacgcctgcagcgcctgtcgctcgcgcactgtgactgggtggacgggctggcgctgcgcggcctcgctgatcgctgcccggccctggaggagctggatctcaccgcctgccgccagctcaaggacgaggccatcgtgtacctggcgcagagg

SEQ ID NO: 283286 - DNA, 871 bp, Artificial Sequence
  derived and/or modified sequence
ggaaacgcggcccaaactgttacgaagtggaagaggctggatagctcttcataattaatcaggaatgggaggtttgagcaggtttacttgatgagggaaacattatagcctcgccaattcattcattatttcaacaattacttattgaacacctgctacgtggcagacagccaaggaggcgggtttggtgcggccactccaaggccaaagcgagaaaatcttactgcgcacgcgcaatagacagccgatggagccaccgatggagccgtccggaggggagcaagagcccggagccgtcaggttcctggacctgccctgggaagacgtgctgctcccacacgtcctgaaccgggtcccgctgcgccagctgctccggctgcagcgcgttagccgggccttccggtcgctggtgcagcttcacctggccgggctgcgtcgcttcgatgccgcgcaggtgggtccgcagatcccgcgggccgcattggcccggctgctgcgggatgccgaggggctgcaggagctggcactggcgccgtgtcacgaatggctgtcagacgaggacctggtgccggtgctggcgcggaatccgcagctgcggagtgtggcgttgggcggctgcgggcaactgagtcgccgggcgcttggggctttggccgagggctgcccacgcctgcagcgcctgtcgctcgcgcactgtgactgggtggacgggctggcgctgcgcggcctcgctgatcgctgcccggccctggaggagctggatctcaccgcctgccgccagctcaaggacgaggccatcgtgtacctggcgcagaggcgcggcgctggtctccgcagcctctctctggccgtcaacgccaacgtgggggac

SEQ ID NO: 283287 - DNA, 776 bp, Artificial Sequence
  derived and/or modified sequence
tgtcctcccagctaccccctccctaagcaggctgaggaagaagagatagcaagccctcacctaacttgacccctttcttgtctctccccgctgctagcttctcccttctcgctgccttgcggggtggggaaacgtggaaggaattctgggaaaaccagatgtctgggttctctattcccgtctggcttgattctggacaaggggcttcctctccagggcctcggtttccccatctttaaaatggactgatagcatagacctgcccacctttcagaggtgcccgaagccttgacgagataacagatgagaagtggttttcgttgtgatgagccagctgaagcggttgcaccggagcgccagaccgtcagcggtgcagtggctctcgcgtccttcacatccccccacacccatcccgtggatgatgggggaaggcactactcctggggttccccgaagcggatcctgggactgggacctggggacgcggccaaggaggcgggtttggtgcggccactccaaggccaaagcgagaaaatcttactgcgcacgcgcaatagacagccgatggagccaccgatggagccgtccggaggggagcaagagcccggagccgtcaggttcctggacctgccctgggaagacgtgctgctcccacacgtcctgaaccgggtcccgctgcgccagctgctccggctgcagcgcgttagccgggccttccggtcgctggtgcagcttcacctggccgggctgcgtcgcttcgatgccgcgcaggtgag

SEQ ID NO: 283288 - protein, 727 aa, Artificial Sequence
  derived and/or modified sequence
MILSLLFSLGGPLGWGLLGAWAQASSTSLSDLQSSRTPGVWKAEAEDTGKDPVGRNWCPYPMSKLVTLLALCKTEKFLIHSQQPCPQGAPDCQKVKVMYRMAHKPVYQVKQKVLTSLAWRCCPGYTGPNCEHHGPMAVWCWPEPDSLQARLGQLQRNLSELHMTTARREEELQYTLEDMRATLTRHVDEIKELYSESDETFDQISKVERQVEELQVNHTALRELRVILMEKSLIMEENKEEVERQLLELNLTLQHLQGGHADLIKYVKDCNCQKLYLDLDVIREGQRDATRALEETQVSLDERRQLDGSSLQALQNAVDAVSLAVDAHKAEGERARAATSRLRSQVQALDDEVGALKAAAAEARHEVRQLHSAFAALLEDALRHEAVLAALFGEEVLEEMSEQTPGPLPLSYEQIRVALQDAASGLQEQALGWDELAARVTALEQASEPPRPAEHLEPSHDAGREEAATTALAGLARELQSLSNDVKNVGRCCEAEAGAGAASLNASLHGLHNALFATQRSLEQHQRLFHSLFGNFQGLMEANVSLDLGKLQTMLSRKGKKQQKDLEAPRKRDKKEAEPLVDIRVTGPVPGALGAALWEAGSPVAFYASFSEGTAALQTVKFNTTYINIGSSYFPEHGYFRAPERGVYLFAVSVEFGPGPGTGQLVFGGHHRTPVCTTGQGSGSTATVFAMAELQKGERVWFELTQGSITKRSLSGTAFGGFLMFKT

SEQ ID NO: 283289 - DNA, 807 bp, Artificial Sequence
  derived and/or modified sequence
atggatacccgggttggcacagccatggcatcacccccatctatgttcccttcctcattgaaatctagttggaccaagaccaaaagggtgcgcaggtcattcggtgccgaggatgaatgtggattgcggggtgctgagaggggcacggctgaggcccatgcggaacatgaacagcgcgcaagggctagtggggctggtgctggagcagggggtgcagaggatgccggtgccgctgccgctgctccaggcagggctcccggagcccaccgccaattacgcctgaccgccggagctggccacggccgtaacgctcatgccggacatagcggcctgctgcacggccctgcaagcagatcacaccgggcaaggccacgcccagcaagggaagctcatcggccacatcagggaaatcctggacccggacgccagcgggctcctgtgagatccggacgcgcacatgacgcagaagaaaagctgtgggccaggccctgccatacacccccacggggtagagaggcaggcggacctccgggacccggacctatcctgcacctaggcggatcctccccccctaaaattaagttcctccagcatcccttctctttccaaagcccccagccgcctgagccaggtaaatctacgcgcgacacacctcggaggacgtcacaaccaagagtgcctctgttgggcggacaaacacgctacacagggtctccaggacatccccaggacactggacaaaccaaacccacccctagtacacgccaggacccaccgaactatagtctcaggggggcagtgccatag

SEQ ID NO: 283290 - protein, 506 aa, Artificial Sequence
  derived and/or modified sequence
MEQLDVFISIKPKPKQPSKSVIVKSVERNALNMYEARKCLLGLESSGVTIATSPSPASCPAGLACPSLDILASAGLGLTGLGLLGPTTLSLNTSTTPNSLLNALNSSVSPLQSPSSGTPSPTLWAPPLANTSSATGFSAIPHLMIPSTAQATLTNILLSGVPTYGHTAPSPPPGLTPVDVHINSMQTEGKKISAALNGHAQSPDIKYGAISTSSLGEKVLSANHGDPSIQTSGSEQTSPKSSPTEGCNDAFVEVGMPRSPSHSGNAGDLKQMMCPSKVSCAKRQTVELLQGTKNSHLHSTDRLLSDPELSATESPLADKKAPGSERAAERAAAAQQNSERAHLAPRSSYVNMQAFDYEQKKLLATKAMLKKPVVTEVRTPTNTWSGLGFSKSMPAETIKELRRANHVSYKPTMTTTYEGSSMSLSRSNSREHLGGGSESDNWRDRNGIGPGSHSEFAASIGSPKRKQNKSSERCVLCTLLGIPRLECVYLGWSITDCGLSDFKCLV

SEQ ID NO: 283291 - DNA, 759 bp, Artificial Sequence
  derived and/or modified sequence
atgctccctccgcctagaccagcagctgcgctggccttgccggtgctgctcctccttcttgtagtattaacgccgcctccaaccggtgctcgacctagccctggacccgactacctcagacggggttggatgaggctgctggccgagggcgaggggtgtgctccctgcaggccagaggaatgcgctgctccgagaggctgcctggctggccgtgtgagggatgcgtgcggctgttgctgggagtgcgccaaccttgaaggccagctgtgtgatctggatccgagcgctcatttctacggacattgtggcgaacagcttgaatgtcggctggatacggggggagatctttcgaggggtgaggtccccgagccattgtgtgcttgccgtagtcaatcccctctgtgcggcagcgatggacatacatactcccaaatctgcagactacaggaggctgcccgtgcccgacccgatgctaatcttacagtcgcccaccctggcccatgtgagtcagggcctcagatcgtgagtcatccctatgacacttggaggggtccacggctgcaaaccctgggcacagaggatacccttacgacgttggtgggtgcgggtggaatggctagggccgtggcctgcggtgaagcgcctggcgagcatctggccctccaggtcctctgtttaagtggcaagagaagacacctttggcaggtggggtccactggcagctctgagggagtccctagcggtggctcattctggtag

SEQ ID NO: 283292 - DNA, 759 bp, Artificial Sequence
  derived and/or modified sequence
atgctgcctccccctcgccccgccgctgcactcgctcttcccgttctgcttctgctgttagtggtcttgactccaccgcccacgggtgccagaccatcaccaggcccagattacttaaggcgaggttggatgcgcctcttagccgagggagaagggtgtgctccatgtcgtccagaggaatgcgccgctccgcgcggatgcctggctggccgggttagagatgcttgtggatgttgctgggagtgtgcgaacctcgaaggacagctttgtgatcttgacccgtcagcccacttctatggtcattgtggtgaacagctggagtgccgcctggatactggtggggacttgtctcggggggaagtgcccgagccactgtgtgcatgtagatcccagtcacccctgtgcggatccgatgggcatacctactcacagatttgccgactgcaagaagctgcaagagcacgtccagacgcaaatctgactgtcgctcatccaggcccttgtgaatcaggtcctcagattgtctctcacccttatgatacatggcggggacctcgtcttcagactctgggcactgaggacaccttgaccacactggtgggcgccggcggcatggctcgggctgtggcttgcggagaggcccctggcgaacatctggccctgcaggtcctgtgcctgtccggcaaacgcagacacctatggcaggtgggttccaccggctcctcggagggcgttccatctggcggaagtttctggtag

SEQ ID NO: 283293 - DNA, 759 bp, Artificial Sequence
  derived and/or modified sequence
atgctgcctccccctcgccccgccgctgcactcgctcttcccgttctgcttctgctgttagtggtcttgactccaccgcccacgggtgccagaccatcaccaggcccagattacttaaggcgaggttggatgcgcctcttagccgagggagaagggtgtgctccatgtcgtccagaggaatgcgccgctccgcgcggatgcctggctggccgggttagagatgcttgtggatgttgctgggagtgtgcgaacctcgaaggacagctttgtgatcttgacccgtcagcccacttctatggtcattgcggagaacagctcgaatgcagattggataccggaggagacctgtcacgcggcgaagttcccgagcctctgtgcgcttgccgatcccaatcccccctatgtgggtctgacggtcacacttactcccagatctgccgactgcaggaggctgccagagcccgcccggacgctaatttgactgttgcacacccaggaccttgtgaatcaggacctcagatagtgtcccacccttacgacacctggagaggcccccgcctccaaacactaggcacggaagatacgctgaccaccttggtgggagccggtggaatggctcgagcagtggcctgtggagaagcccctggtgagcatctagctctgcaggttctgtgccttagcggaaaacgtcgacacttgtggcaggtcggatcaactggttcatctgaaggcgtgcccagcggaggatccttctggtag

SEQ ID NO: 283294 - DNA, 759 bp, Artificial Sequence
  derived and/or modified sequence
atgctgcccccccccagacccgccgccgccctggccctgcccgtgctgctgctgctgctggtggtgctgacccccccccccaccggcgccagacccagccccggccccgactacctgagaagaggctggatgagactgctggccgagggcgagggctgcgccccctgcagacccgaggagtgcgccgcccccagaggctgcctggccggcagagtgagagacgcctgcggctgctgctgggagtgcgccaacctggagggccagctgtgcgacctggaccccagcgcccacttctacggccactgcggcgagcagctggagtgcagactggacaccggcggcgacctgagcagaggcgaggtgcccgagcccctgtgcgcctgcagaagccagagccccctgtgcggcagcgacggccacacctacagccagatctgcagactgcaggaggccgccagagccagacccgacgccaacctgaccgtggcccaccccggcccctgcgagagcggcccccagatcgtgagccacccctacgacacctggagaggccccagactgcagaccctgggcaccgaggacaccctgaccaccctggtgggcgccggcggcatggccagagccgtggcctgcggcgaggcccccggcgagcacctggccctgcaggtgctgtgcctgagcggcaagagaagacacctgtggcaggtgggcagcaccggcagcagcgagggcgtgcccagcggcggcagcttctggtag

SEQ ID NO: 283295 - DNA, 1684 bp, Artificial Sequence
  derived and/or modified sequence
aaagtgccacggtggcggtggtggcggccgcgaggccgagtgtctccggccctgccagcctcgcaaccgtaacctgtaatcccgacccgagggacgcccgccggggaggcgccagcccgcctctccctgcggccgctggtcggctccgacctcgaatcacccggctcacccgcgggtcgcagcacctgccggatgtggggaggaagaaggaggccagatgagggaaggcggatgtaggcgcccagtctgtccgcgccttggtggggcagctgggtgggcaagcctgcggtcgctcccgggaaccagccctgggctgcggggagacgaaggtggttggtcctgccctccaggagcgccccgacatcgacgtaaaatgacttggcaccagagctcctgccgcctcccccttatgcagctgccctcgccgacgccagggactgtaaaatcagatgggacagggcctagccgttcagccaacactttgagcttcccagccaaactcctacccccactccccgcctccggtcctcacccccttcctctctcccagcctcggtgtctggttacggctcctctgctcgcattgtgactttgggccaggctgggggaaatgacccgggagggtcccatgcggctacataaaattggcagccttagaactagtgggaaggcgggtgcgcgaagtcgaggggcggagagagggggccggaggagctgctttctgaatccaagttcgtgggctctctcagaagtcctcaggacggagcagaggtggccggcgggcccggctgactgcgcctctgctttctttccataaccttttctttcggactcgaatcacggctgctgcgaagggtctagttccggacactagggtgcccgaacgcgctgatgccccgagtgctcgcagggcttcccgctaaccatgctgccgccgccgcggcccgcagctgccttggcgctgcctgtgctcctgctactgctggtggtgctgacgccgcccccgaccggcgcaaggccatccccaggcccagattacctgcggcgcggctggatgcggctgctagcggagggcgagggctgcgctccctgccggccagaagagtgcgccgcgccgcggggctgcctggcgggcagggtgcgcgacgcgtgcggctgctgctgggaatgcgccaacctcgagggccagctctgcgacctggaccccagtgctcacttctacgggcactgcggcgagcagcttgagtgccggctggacacaggcggcgacctgagccgcggagaggtgccggaacctctgtgtgcctgtcgttcgcagagtccgctctgcgggtccgacggtcacacctactcccagatctgccgcctgcaggaggcggcccgcgctcggcccgatgccaacctcactgtggcacacccggggccctgcgaatcggggccccagatcgtgtcacatccatatgacacttggagagggccaagactgcagaccttggggaccgaggacaccctcaccacgctggtgggggctggggggatggcgcgggcggtggcgtgcggggaagcgcctggggaacacctggctctgcaagttttgtgccttagcggaaagaggcgacatctctggcaagttgggagtacaggaagtagcgaaggagtgccatctggtggatccttctggtag

SEQ ID NO: 283296 - DNA, 759 bp, Artificial Sequence
  derived and/or modified sequence
atgctgcctccgccgaggccggccgccgcgctggccctccctgttctgttactgctcttagtggttctgacacccccccctacaggtgcccgcccaagtcccggcccagattatttgaggcgaggatggatgagacttctggcagaaggcgaaggctgtgcaccatgtcgccctgaagagtgcgctgctcctagagggtgcctagccggcagggttcgggacgcttgtggctgctgttgggaatgcgccaacctcgagggccagctgtgcgacctggatccgtccgcccacttctacggccattgtggggagcaactggaatgccggcttgataccggaggcgatctgtctcgcggagaagttcctgagcccctttgcgcctgtaggtcgcagtcacccttatgcggttcagacggccatacctacagccagatttgtagattgcaggaagctgcacgcgctagacctgacgcaaatctgaccgtggcacaccccgggccctgtgagagcggaccccagatcgtcagccacccatacgacacttggcgcggcccacggctgcagaccctgggaaccgaagatactctaaccacattggtgggcgctggaggaatggcgcgggctgtggcttgtggcgaagctcccggcgagcacctggccctccaggttctgtgcctgagcggaaagagacggcacttatggcaggtcgggtctactggtagctccgagggagtgccctccggaggctctttttggtag

SEQ ID NO: 283297 - DNA, 759 bp, Artificial Sequence
  derived and/or modified sequence
atgctgcccccacccaggcctgctgctgccctggccctgcctgtgctgctgctgctgctggtggtgctgaccccaccacccaccggggcccggcccagccctggccctgactacctgcggcggggctggatgaggctgctggccgagggggagggctgtgccccctgcaggcctgaggagtgtgccgccccccggggctgcctggccggccgggtgagagatgcctgtggctgctgctgggagtgtgccaacctggagggccagctgtgtgacctggaccccagcgcccacttctacggccactgtggggagcagctggagtgccgcctggacaccggcggggacctgagcagaggagaggtgcctgagcccctgtgtgcctgccgcagccagagccccctgtgtggcagtgatggccacacctacagccagatctgccgcctgcaggaggccgcccgggcccggccagatgccaacctgactgtggcccaccctggcccctgtgagagcggcccccagatcgtgagccacccctatgacacctggaggggcccccggctgcagaccctgggcacagaggacaccctgaccaccctggtgggcgctgggggcatggcccgggctgtggcctgtggggaggcccctggagagcacctggccctgcaggtgctgtgcctgagcggcaagaggaggcacctgtggcaggtgggcagcacaggcagcagcgagggcgtgcccagcggcggcagcttctggtag

SEQ ID NO: 283298 - DNA, 759 bp, Artificial Sequence
  derived and/or modified sequence
atgctgccccccccccggcccgccgccgccctggccctgcccgtgctcctgctcctgctggtggtgctcacaccgccccccacaggcgccagaccatcaccggggcctgactaccttcgtagaggatggatgagactgctagctgaaggagaaggatgtgcaccctgtaggccggaagaatgcgccgctccgagaggctgcctagcgggtagagttagagatgcttgtgggtgttgttgggagtgcgctaacttagagggccaactgtgtgacctcgacccgagtgcccacttctacggccactgcggggaacagctggagtgcaggcttgacacaggcggggatctgtctcgtggtgaggttccagagcctctctgcgcttgccggagtcagtccccgctatgtggtagcgacggtcatacttactctcagatttgtaggctgcaggaagctgctcgggccagaccagacgccaacctgactgtggcacatccaggcccctgcgagtccggacctcaaatcgtcagtcacccttatgatacttggagaggcccccgattacaaacactgggcaccgaagacaccctgaccacactggtgggggcgggtgggatggcacgcgccgtggcttgtggggaagcccccggcgaacatctggcactgcaggtcctgtgcctgtcaggcaagcgaaggcacctgtggcaagtaggcagcaccggctcaagcgaaggagtgcctagtgggggctcgttttggtag

SEQ ID NO: 283299 - RNA, 759 nt, Artificial Sequence
  derived and/or modified sequence
augcugccucccccucgccccgccgcugcacucgcucuucccguucugcuucugcuguuaguggucuugacuccaccgcccacgggugccagaccaucaccaggcccagauuacuuaaggcgagguuggaugcgccucuuagccgagggagaagggugugcuccaugucguccagaggaaugcgccgcuccgcgcggaugccuggcuggccggguuagagaugcuuguggauguugcugggagugugcgaaccucgaaggacagcuuugugaucuugacccgucagcccacuucuauggucauuguggugaacagcuggagugccgccuggauacugguggggacuugucucggggggaagugcccgagccacugugugcauguagaucccagucaccccugugcggauccgaugggcauaccuacucacagauuugccgacugcaagaagcugcaagagcacguccagacgcaaaucugacugucgcucauccaggcccuugugaaucagguccucagauugucucucacccuuaugauacauggcggggaccucgucuucagacucugggcacugaggacaccuugaccacacuggugggcgccggcggcauggcucgggcuguggcuugcggagaggccccuggcgaacaucuggcccugcagguccugugccuguccggcaaacgcagacaccuauggcagguggguuccaccggcuccucggagggcguuccaucuggcggaaguuucugguag

SEQ ID NO: 283300 - RNA, 759 nt, Artificial Sequence
  derived and/or modified sequence
augcugccucccccucgccccgccgcugcacucgcucuucccguucugcuucugcuguuaguggucuugacuccaccgcccacgggugccagaccaucaccaggcccagauuacuuaaggcgagguuggaugcgccucuuagccgagggagaagggugugcuccaugucguccagaggaaugcgccgcuccgcgcggaugccuggcuggccggguuagagaugcuuguggauguugcugggagugugcgaaccucgaaggacagcuuugugaucuugacccgucagcccacuucuauggucauugcggagaacagcucgaaugcagauuggauaccggaggagaccugucacgcggcgaaguucccgagccucugugcgcuugccgaucccaauccccccuaugugggucugacggucacacuuacucccagaucugccgacugcaggaggcugccagagcccgcccggacgcuaauuugacuguugcacacccaggaccuugugaaucaggaccucagauagugucccacccuuacgacaccuggagaggcccccgccuccaaacacuaggcacggaagauacgcugaccaccuuggugggagccgguggaauggcucgagcaguggccuguggagaagccccuggugagcaucuagcucugcagguucugugccuuagcggaaaacgucgacacuuguggcaggucggaucaacugguucaucugaaggcgugcccagcggaggauccuucugguag

SEQ ID NO: 283301 - protein, 533 aa, Artificial Sequence
  derived and/or modified sequence
MATTATCTRFTDDYQLFEELGKGAFSVVRRCVKKTSTQEYAAKIINTKKLSARDHQKLEREARICRLLKHPNIVRLHDSISEEGFHYLVFDLVTGGELFEDIVAREYYSEADASHCIHQILESVNHIHQHDIVHRDLKPENLLLASKCKGAAVKLADFGLAIEVQGEQQAWFGFAGTPGYLSPEVLRKDPYGKPVDIWACGVILYILLVGYPPFWDEDQHKLYQQIKAGAYDFPSPEWDTVTPEAKNLINQMLTINPAKRITADQALKHPWVCQRSTVASMMHRQETVECLRKFNARRKLKGAILTTMLVSRNFSAAKSLLNKKSDGGVKEPQTTVVHNATDGIKGSTESCNTTTEDEDLKAAPLRTGNGSSVPEGRSSRDRTAPSAGMQPQPSLCSSAMRKQEIIKITEQLIEAINNGDFEAYTKICDPGLTSFEPEALGNLVEGMDFHKFYFENLLSKNSKPIHTTILNPHVHVIGEDAACIAYIRLTQYIDGQGRPRTSQSEETRVWHRRDGKWLNVHYHCSGAPAAPLQ

SEQ ID NO: 283302 - DNA, 1602 bp, Artificial Sequence
  derived and/or modified sequence
atggccacgacggcaacatgtacacgcttcactgacgactatcagctttttgaagaactaggaaaaggtgcattttctgtggtgcgcagatgtgtgaagaaaacgagtactcaagaatacgcggccaagatcattaatacgaagaagctgtccgcccgggaccatcagaagctggagcgggaggctagaatttgtaggctgctcaaacaccctaacatagtgcgcctacacgatagtattagcgaagagggattccactacctggtttttgacctcgtcaccggcggtgagctgttcgaagacattgtggctcgcgaatattactcagaggcggatgcttcgcattgcatccaccagatcctggaatctgttaaccacatacatcagcacgatattgttcaccgagacctgaaaccggagaacctcctgttggctagcaagtgcaaaggagccgccgttaagctggctgatttcggtttggcaatcgaggtgcagggagagcaacaagcatggtttggattcgccggtactccaggttacctcagtccagaggtgctgcgcaaagacccctacggtaaacccgtggacatttgggcctgcggggtcatcctatacattttactcgtggggtaccctcctttctgggatgaagatcagcataaactgtatcagcagataaaggccggagcctatgactttccatctccagagtgggacaccgttacgccagaagcgaaaaatttgatcaatcagatgctcaccataaatcccgccaagcgaataactgccgatcaggcgttgaagcacccgtgggtatgccagagatcgactgtggcctccatgatgcacagacaggagacggtagagtgcctgagaaaattcaatgccagaaggaagctgaaaggggctattctcaccacaatgctggtgtcccgtaatttctcagcagccaaatcactgctgaataagaagtcagatggcggagttaaagagccgcagaccaccgtggtacataatgccacggatgggattaagggatccacagaaagctgcaacaccactaccgaagacgaagatctaaaggcagcccctctgaggacaggaaacgggtcgagtgtgcccgaaggtaggtcctccagagataggacggcaccctcagcagggatgcagcctcaaccttcattatgcagctctgcgatgaggaaacaggaaataatcaaaatcaccgaacagctgattgaggccattaacaacggcgatttcgaagcttataccaaaatctgcgatcctgggctgacctctttcgagccagaagcgttggggaatcttgtggagggaatggatttccacaagttctatttcgaaaatctcttatctaagaattccaagcccatccacaccaccatcctcaacccacacgtacacgtaattggtgaagatgctgcttgcatagcctatatacggctcacccagtatatcgacggacagggccggcctaggacctctcagagcgaagaaactcgggtgtggcatcgacgagatggcaagtggctgaatgtgcactaccactgctctggtgcgccggccgcacctctgcaatag

SEQ ID NO: 283303 - DNA, 1602 bp, Artificial Sequence
  derived and/or modified sequence
atggccaccacagccacctgcacccgcttcacagatgactaccagctgtttgaggagctgggcaagggggccttctctgtggtgagaagatgtgtgaagaagaccagcacccaggagtatgctgccaagatcatcaacaccaagaagctgagcgcccgggaccaccagaagctggagcgggaggcccgcatctgccgcctgctgaagcaccccaacatcgtgcggctgcatgacagcatcagcgaggagggcttccactacctggtgtttgacctggtgactggaggagagctgtttgaggacatcgtggcccgggagtactacagcgaggctgatgccagccactgcatccaccagatcctggagagcgtgaaccacatccaccagcacgacatcgtgcaccgggacctgaagccagagaacctgctgctggccagcaaatgtaaaggagctgctgtgaagctggccgactttggcctggccatcgaggtgcagggcgagcagcaggcctggtttggatttgctggcaccccaggctacctgagccctgaggtgctgaggaaggacccctacggcaagcctgtggacatctgggcctgtggggtcatcctgtacatcctgctggtgggctacccacccttctgggatgaggaccagcacaagctgtaccagcagatcaaggccggggcctatgacttccccagccctgagtgggacacagtgaccccagaggccaagaacctgatcaaccagatgctgaccatcaacccagccaagaggatcacagctgaccaggccctgaagcacccctgggtgtgccagaggagcacagtggcctccatgatgcaccggcaggagaccgtggagtgcctgaggaagttcaatgcccggaggaagctgaagggggccatcctgaccaccatgctggtgtccaggaacttctctgctgccaagagcctgctgaacaagaagagtgatggcggcgtgaaggagccccagaccaccgtggtgcacaatgccacagatggcatcaagggcagcacagagagctgcaacaccaccacagaagatgaggacctgaaggccgcccccctgaggactggaaatggcagctctgtgcctgagggccgcagcagccgggacagaacagcccccagcgctggcatgcagccccagcccagcctgtgcagcagcgccatgaggaagcaggagatcatcaagatcacagagcagctgattgaggccatcaacaacggggactttgaggcctacaccaagatctgtgaccccggcctgaccagctttgagcctgaggccctgggcaacctggtggagggcatggacttccacaagttctactttgagaacctgctgagcaagaacagcaagcccatccacaccaccatcctgaacccccacgtgcacgtgattggagaagatgctgcctgcatcgcctacatccggctgacccagtacattgatggccagggccggcccaggaccagccagagcgaggagaccagggtgtggcacagaagagatggcaagtggctgaatgtgcactaccactgcagcggggccccagctgcccccctgcagtag

SEQ ID NO: 283304 - DNA, 1602 bp, Artificial Sequence
  derived and/or modified sequence
atggccaccaccgccacctgcacccggttcaccgacgactaccagctgtttgaggagctgggcaaaggggcattctccgttgtgaggagatgtgtcaagaaaacgagtactcaggagtatgctgctaagattattaataccaagaaactgtctgcccgggaccatcagaagctggagcgcgaagccagaatctgcagattactcaagcatcctaacatcgtacggttacacgacagcattagcgaagaagggttccactacttagtcttcgatctggtgacagggggggagctctttgaggacatcgtcgcccgggaatactactcagaagcagacgcgtcccactgcattcatcagattttggaatcggtgaaccatattcatcaacacgatattgtgcacagagatttgaagccggaaaacttgcttctggcctctaaatgtaagggggcagcggtgaagctagcagattttggtctcgcaatagaagtacagggggagcagcaggcctggtttggtttcgccggaactcccggatatctctcccctgaggtcctgcgaaaggatccttatgggaagccagtggatatctgggcctgtggcgttattctgtacatcctacttgtgggctatcctcctttttgggatgaagaccagcacaagttgtaccaacagatcaaggccggggcgtatgattttcctagtcctgagtgggacactgtgacgcctgaggcaaagaacttgatcaaccagatgctgactattaatcctgccaagcggatcacagccgatcaagcactcaaacacccgtgggtttgtcagagatctactgttgcctccatgatgcatcgccaggaaaccgtggagtgtctgcgaaaattcaatgctcggaggaaattgaaaggcgccattctcacaaccatgctggtgagtaggaacttttccgccgccaagagtctgcttaataagaaatctgacggcggtgtcaaggagccacagactaccgtcgtgcacaacgcaacagacggtatcaagggatccaccgagtcctgcaataccacaaccgaggacgaagatctcaaggccgcacccctgcgtactggcaacggtagctccgtgcctgaaggccgatcctctagggacagaaccgcaccctccgcagggatgcagccccagccatcactctgtagctctgccatgaggaaacaagagattataaagattactgagcagctcatcgaagccattaataatggcgactttgaggcctacacaaaaatttgtgatccaggcttgacatcctttgaacctgaggctctcggcaacctggtcgagggtatggactttcataagttttacttcgaaaaccttttaagcaagaacagtaagcctatacataccactatactcaacccgcatgtccacgtaatcggcgaggacgcagcgtgcatagcctacattaggctaactcagtatattgacgggcagggaaggcccagaacatcacagtcagaagagaccagagtctggcacaggcgagacgggaaatggttgaacgtacactatcactgctccggcgcaccggctgcgcctctgcaatag

SEQ ID NO: 283305 - DNA, 1602 bp, Artificial Sequence
  derived and/or modified sequence
atggcaacaaccgccacatgtacaagatttacagatgattaccagctcttcgaagagttgggcaagggcgctttctctgttgtgcggagatgtgtcaaaaagacatctacgcaggagtacgcagcaaaaattatcaatactaaaaaattgtcagcaagagaccaccagaagctggaaagggaggcccgtatctgcagactgcttaaacatcctaacatcgttagactccatgactcaatatccgaggaaggattccactatctggtatttgatctggtgacagggggtgagctgtttgaagacatcgtagcccgtgaatactacagtgaggccgatgccagccactgtatccaccaaatcttagagtcagtgaaccatatccaccaacacgatatcgtgcacagagatctgaagccagagaaccttttgttggcaagcaaatgtaaaggtgcagcagttaaactggctgattttggactggcaattgaggtccagggggagcagcaggcttggttcggtttcgccggaaccccaggctacctcagtcctgaagtcctcaggaaagacccgtacggaaaaccagtggacatatgggcctgcggggtaattctctatatcttgctggtgggctacccgcctttctgggacgaggaccagcacaaactataccagcagatcaaggccggagcttacgatttccccagcccggagtgggacaccgtgactccagaggcaaagaacctcattaatcaaatgcttaccatcaaccccgctaagaggatcacggccgatcaggctctcaaacatccgtgggtatgccagagatccaccgtggccagcatgatgcaccgccaggagactgttgaatgccttagaaaattcaacgcacgccgaaagttaaaaggagcaattctgacaaccatgctcgtgtcaaggaacttttccgcagccaaatcacttctgaataaaaagtctgatggcggtgtgaaagagccccagactacagtcgttcataatgccactgacggcatcaaagggtcgacagaatcttgtaatactacaactgaagacgaagatctcaaagctgcccctctgaggactgggaatggctcctctgtgccggaggggagatcctctcgagaccgcactgcgccatctgcgggtatgcaaccacagccaagcctgtgtagttcagcaatgagaaagcaagaaatcatcaagattacagagcagcttattgaggccattaataacggggactttgaagcatataccaagatctgtgacccaggactcactagctttgaacctgaggcgctcgggaacctggtggaaggtatggacttccacaaattttacttcgaaaatctgctgtctaaaaatagcaaaccaattcataccaccattttgaacccgcatgtgcacgtgattggggaagatgccgcatgcatcgcatacatccgcctcacccaatacattgacgggcaaggacggcctcggacatcacagtctgaagaaacacgggtgtggcacaggagagacggtaagtggctgaatgttcactatcactgcagcggcgcaccggctgctccgcttcaatag

SEQ ID NO: 283306 - DNA, 3743 bp, Artificial Sequence
  derived and/or modified sequence
ggtaaagtctcgcggtgctgccgggctcagccccgtctcctcctcttgctccctcggccgggcggcggtgactgtgcaccgacgtcggcgcgggctgcaccgccgcgtccgcccgcccgccagcatggccaccaccgccacctgcacccgtttcaccgacgactaccagctcttcgaggagcttggcaagggtgctttctctgtggtccgcaggtgtgtgaagaaaacctccacgcaggagtacgcagcaaaaatcatcaataccaagaagttgtctgcccgggatcaccagaaactagaacgtgaggctcggatatgtcgacttctgaaacatccaaacatcgtgcgcctccatgacagtatttctgaagaagggtttcactacctcgtgtttgaccttgttaccggcggggagctgtttgaagacattgtggccagagagtactacagtgaagcagatgccagccactgtatacatcagattctggagagtgttaaccacatccaccagcatgacatcgtccacagggacctgaagcctgagaacctgctgctggcgagtaaatgcaagggtgccgccgtcaagctggctgattttggcctagccatcgaagtacagggagagcagcaggcttggtttggttttgctggcaccccaggttacttgtcccctgaggtcttgaggaaagatccctatggaaaacctgtggatatctgggcctgcggggtcatcctgtatatcctcctggtgggctatcctcccttctgggatgaggatcagcacaagctgtatcagcagatcaaggctggagcctatgatttcccatcaccagaatgggacacggtaactcctgaagccaagaacttgatcaaccagatgctgaccataaacccagcaaagcgcatcacggctgaccaggctctcaagcacccgtgggtctgtcaacgatccacggtggcatccatgatgcatcgtcaggagactgtggagtgtttgcgcaagttcaatgcccggagaaaactgaagggtgccatcctcacgaccatgcttgtctccaggaacttctcagctgccaaaagcctattgaacaagaagtcggatggcggtgtcaaggagccacaaaccactgtggtacacaacgctacagatgggatcaagggctccacagagagctgcaacaccaccacagaagatgaggacctcaaagctgccccgctccgcactgggaatggcagctcggtgcctgaaggacggagctcccgggacagaacagccccctctgcaggcatgcagccccagccttctctctgctcctcagccatgcgaaaacaggagatcattaagattacagaacagctgattgaagccatcaacaatggggactttgaggcctacacgaagatttgtgatccaggcctcacttcctttgagcctgaggcccttggtaacctcgtggaggggatggatttccataagttttactttgagaatctcctgtccaagaacagcaagcctatccataccaccatcctaaacccacacgtccacgtgattggggaggacgcagcgtgcatcgcctacatccgcctcacccagtacatcgacgggcagggtcggcctcgcaccagccagtcagaagagacccgggtctggcaccgtcgggatggcaagtggctcaatgtccactatcactgctcaggggcccctgccgcaccgctgcagtgagctcagccacaggggctttaggagattccagccggaggtccaaccttcgcagccagtggctctggagggcctgagtgacagcggcagtcctgtttgtttgaggtttaaaacaattcaattacaaaagcggcagcagccaatgcacgcccctgcatgcagccctcccgcccgcccttcgtgtctgtctctgctgtaccgaggtgttttttacatttaagaaaaaaaaaaaagaaaaaaagattgtttaaaaaaaaaaggaatccataccatgatgcgttttaaaaccaccgacagcccttgggttggcaagaaggcaggagtatgtatgaggtccatcctggcatgagcagtggctcacccaccggccttgaagaggtgagcttggcctctctggtccccatggacttagggggaccaggcaagaactctgacagagctttgggggccgtgatgtgattgcagctcctgaggtggcctgcttaccccaggtctaggaatgaacttctttggaacttgcataggcgcctagaatggggctgatgagaacatcgtgaccatcagacctacttgggagagaacgcagagctcccagcctgctgtggaggcagctgagaagtggtggcctcaggactgagagcccggacgttgctgtactgtcttgtttagtgtagaagggaagagaattggtgctgcagaagtgtacccgccatgaagccgatgagaaacctcgtgttagtctgacatgcactcactcatccatttctataggatgcacaatgcatgtgggccctaatattgaggccttatccctgcagctaggagggggaggggttgttgctgctttgcttcgtgttttcttctaacctggcaaggagagagccaggccctggtcagggctcccgtgccgcctttggcggttctgtttctgtgctgatctggaccatctttgtcttgccttttcacggtagtggtccccatgctgaccctcatctgggcctgggccctctgccaagtgcccctgtgggatgggaggagtgaggcagtgggagaagaggtggtggtcgtttctatgcattcaggctgcctttggggctgcctcccttcttattcttccttgctgcacgtccatctcttttcctgtctttgagattgacctgactgctctggcaagaagaagaggtgtccttacagaggcctctttactgaccaactgaagtatagacttactgctggacaatctgcatgggcatcacccctccccgcatgtaacccaaaagaggtgtccagagccaaggcttctaccttcattgtccctctctgtgctcaaggagttccattccaggaggaagagatctataccctaagcagatagcaaagaagataatggaggagcaattggtcatggccttggtttccctcaaaacaacgctgcagatttatctgcacaaacatctccacttttgggggaaaggtgggtagattccagttccctggactaccttcaggaggcacgagagctgggagaagaggcaaagctacaggtttacttgggagccagctgagaagagagcagactcacaggtgctggtgcttggatttagccaggctcctccgagcacctcatgcatgtcccagcccctgggccctagccctttcctgccctgcagtctgcagtgccagcacgcaaatcccttcaccacagggtttcgttttgctggcttgaagacaaatggtcttagaattcattgagacccatagcttcatatggctgctccagccccacttcttagcattcttactcctcttctggggctaatgtcagcatctatagacaatagactattaaaaaatcaccttttaaacaagaaacggaaggcatttgatgcagaatttttgcatgacaacatagaaataatttaaaaatagtgtttgttctgaatgttggtagacccttcatagctttgttacaatgaaaccttgaactgaaaatatttaataaaataacctttaaacagtc

SEQ ID NO: 283307 - DNA, 1602 bp, Artificial Sequence
  derived and/or modified sequence
atggccaccaccgccacctgcaccagattcaccgacgactaccagctgttcgaggagctgggcaagggcgccttcagcgtggtgagaagatgcgtgaagaagaccagcacccaggagtacgccgccaagatcatcaacaccaagaagctgagcgccagagaccaccagaagctggagagagaggccagaatctgcagactgctgaagcaccccaacatcgtgagactgcacgacagcatcagcgaggagggcttccactacctggtgttcgacctggtgaccggcggcgagctgttcgaggacatcgtggccagagagtactacagcgaggccgacgccagccactgcatccaccagatcctggagagcgtgaaccacatccaccagcacgacatcgtgcacagagacctgaagcccgagaacctgctgctggccagcaagtgcaagggcgccgccgtgaagctggccgacttcggcctggccatcgaggtgcagggcgagcagcaggcctggttcggcttcgccggcacccccggctacctgagccccgaggtgctgagaaaggacccctacggcaagcccgtggacatctgggcctgcggcgtgatcctgtacatcctgctggtgggctacccccccttctgggacgaggaccagcacaagctgtaccagcagatcaaggccggcgcctacgacttccccagccccgagtgggacaccgtgacccccgaggccaagaacctgatcaaccagatgctgaccatcaaccccgccaagagaatcaccgccgaccaggccctgaagcacccctgggtgtgccagagaagcaccgtggccagcatgatgcacagacaggagaccgtggagtgcctgagaaagttcaacgccagaagaaagctgaagggcgccatcctgaccaccatgctggtgagcagaaacttcagcgccgccaagagcctgctgaacaagaagagcgacggcggcgtgaaggagccccagaccaccgtggtgcacaacgccaccgacggcatcaagggcagcaccgagagctgcaacaccaccaccgaggacgaggacctgaaggccgcccccctgagaaccggcaacggcagcagcgtgcccgagggcagaagcagcagagacagaaccgcccccagcgccggcatgcagccccagcccagcctgtgcagcagcgccatgagaaagcaggagatcatcaagatcaccgagcagctgatcgaggccatcaacaacggcgacttcgaggcctacaccaagatctgcgaccccggcctgaccagcttcgagcccgaggccctgggcaacctggtggagggcatggacttccacaagttctacttcgagaacctgctgagcaagaacagcaagcccatccacaccaccatcctgaacccccacgtgcacgtgatcggcgaggacgccgcctgcatcgcctacatcagactgacccagtacatcgacggccagggcagacccagaaccagccagagcgaggagaccagagtgtggcacagaagagacggcaagtggctgaacgtgcactaccactgcagcggcgcccccgccgcccccctgcagtag

SEQ ID NO: 283308 - protein, 529 aa, Artificial Sequence
  derived and/or modified sequence
MATTATCTRFTDDYQLFEELGKGAFSVVRRCVKKTSTQEYAAKIINTKKLSARDHQKLEREARICRLLKHPNIVRLHDSISEEGFHYLVFDLVTGGELFEDIVAREYYSEADASHCIHQILESVNHIHQHDIVHRDLKPENLLLASKCKGAAVKLADFGLAIEVQGEQQAWFGFAGTPGYLSPEVLRKDPYGKPVDIWACGVILYILLVGYPPFWDEDQHKLYQQIKAGAYDFPSPEWDTVTPEAKNLINQMLTINPAKRITADQALKHPWVCQRSTVASMMHRQETVECLRKFNARRKLKGAILTTMLVSRNFSAAKSLLNKKSDGGVKKRKSSSSVHLMPQSNNKNSLVSPAQEPAPLQTAMEPQTTVVHNATDGIKGSTESCNTTTEDEDLKVRKQEIIKITEQLIEAINNGDFEAYTKICDPGLTSFEPEALGNLVEGMDFHKFYFENLLSKNSKPIHTTILNPHVHVIGEDAACIAYIRLTQYIDGQGRPRTSQSEETRVWHRRDGKWLNVHYHCSGAPAAPLQ

SEQ ID NO: 283309 - DNA, 1590 bp, Artificial Sequence
  derived and/or modified sequence
atggccactacagccacatgtacaagatttactgatgactaccagctgttcgaagaactgggcaagggcgctttttctgttgttcgccgatgcgtcaaaaagacatctacccaagaatatgctgccaagattattaacacgaagaaactctccgctagagaccatcagaagctggagcgcgaggctcggatatgccggctcttgaagcacccaaacattgtacgtctgcacgattctatctccgaagagggatttcattacctggtgttcgacctcgtcacaggcggcgaactcttcgaagatatcgttgctcgggagtattattcagaggcggacgcatcccactgtattcaccagatccttgaatctgtgaaccacatccaccagcacgacattgttcatcgcgatctgaagccagagaacctgctgctagccagtaaatgtaagggcgccgccgtcaaacttgctgacttcggcctggcaatcgaagtgcaaggggagcaacaggcttggttcggcttcgcaggaacaccaggatacttgagtccagaagtgcttcgcaaagacccctatggcaagccagtcgatatatgggcttgcggtgttattctgtacattctgctggtcgggtaccccccattttgggatgaggaccagcacaaactgtaccaacaaatcaaggctggcgcgtatgactttcccagtcctgagtgggacactgtaaccccagaagcgaagaacttaataaaccagatgctgactattaaccccgccaagcggattacggccgaccaggccctgaagcacccatgggtgtgtcagcgaagcacagtcgctagcatgatgcatcggcaagagacagtcgaatgcctacgcaagttcaatgcgcgcaggaagctgaaaggagccatcctgacaacaatgctagttagtagaaacttctctgctgccaagtctttgctgaataaaaaaagtgatggtggagtcaaaaagaggaaatcaagtagttctgttcatctgatgccacagagcaacaataaaaacagcctagtcagccccgcccaggagcctgctcctctgcagactgcaatggaaccacagaccacagtcgtgcacaatgccacggatgggatcaagggaagtacagaatcgtgcaatactactactgaagacgaggatttaaaagttcggaaacaagagattattaagattacggagcaactcatcgaagcaataaataatggagacttcgaggcctatacaaagatctgtgatccaggactgacatcatttgagccagaggctctgggcaatctggtggaggggatggacttccataaattttattttgagaatttattatctaaaaacagtaaacccatccataccacgatcctgaatccccacgttcacgtgatcggtgaggatgctgcttgtattgcctacattaggttgactcaatatatcgacggccaaggaagacccagaacaagccaaagtgaagagacgcgcgtgtggcacaggcgagatgggaaatggcttaacgtgcactaccattgttccggcgctccagccgcacccctgcaatag

SEQ ID NO: 283310 - DNA, 1590 bp, Artificial Sequence
  derived and/or modified sequence
atggccaccacagccacctgcacccgcttcacagatgactaccagctgtttgaggagctgggcaagggggccttctctgtggtgagaagatgtgtgaagaagaccagcacccaggagtatgctgccaagatcatcaacaccaagaagctgagcgcccgggaccaccagaagctggagcgggaggcccgcatctgccgcctgctgaagcaccccaacatcgtgcggctgcatgacagcatcagcgaggagggcttccactacctggtgtttgacctggtgactggaggagagctgtttgaggacatcgtggcccgggagtactacagcgaggctgatgccagccactgcatccaccagatcctggagagcgtgaaccacatccaccagcacgacatcgtgcaccgggacctgaagccagagaacctgctgctggccagcaaatgtaaaggagctgctgtgaagctggccgactttggcctggccatcgaggtgcagggcgagcagcaggcctggtttggatttgctggcaccccaggctacctgagccctgaggtgctgaggaaggacccctacggcaagcctgtggacatctgggcctgtggggtcatcctgtacatcctgctggtgggctacccacccttctgggatgaggaccagcacaagctgtaccagcagatcaaggccggggcctatgacttccccagccctgagtgggacacagtgaccccagaggccaagaacctgatcaaccagatgctgaccatcaacccagccaagaggatcacagctgaccaggccctgaagcacccctgggtgtgccagaggagcacagtggcctccatgatgcaccggcaggagaccgtggagtgcctgaggaagttcaatgcccggaggaagctgaagggggccatcctgaccaccatgctggtgtccaggaacttctctgctgccaagagcctgctgaacaagaagagtgatggcggcgtgaagaagaggaagagcagcagctctgtgcacctgatgccccagagcaacaacaagaacagcctggtgtccccagcccaggagcccgcccccctgcagacagccatggagccccagaccaccgtggtgcacaatgccacagatggcatcaagggcagcacagagagctgcaacaccaccacagaagatgaggacctgaaggtgaggaagcaggagatcatcaagatcacagagcagctgattgaggccatcaacaacggggactttgaggcctacaccaagatctgtgaccccggcctgaccagctttgagcctgaggccctgggcaacctggtggagggcatggacttccacaagttctactttgagaacctgctgagcaagaacagcaagcccatccacaccaccatcctgaacccccacgtgcacgtgattggagaagatgctgcctgcatcgcctacatccggctgacccagtacattgatggccagggccggcccaggaccagccagagcgaggagaccagggtgtggcacagaagagatggcaagtggctgaatgtgcactaccactgcagcggggccccagctgcccccctgcagtag

SEQ ID NO: 283311 - DNA, 1590 bp, Artificial Sequence
  derived and/or modified sequence
atggccaccaccgccacctgcacccggttcaccgacgactaccagctgtttgaggagctgggaaagggagcttttagcgtagtgcgacgctgtgtgaaaaagaccagtacccaagagtatgctgcaaaaataattaatacaaagaaactgtccgctcgcgaccatcagaagctggagcgcgaagctcgcatttgccgtctcctcaaacaccccaacatcgtgcgtctgcacgactctatcagcgaggagggattccattacctggtgttcgacctggtaaccggaggcgaactcttcgaagacatcgtggctagggagtactatagtgaagcggacgccagtcactgtattcatcagatcctcgaatcggtcaatcacatacatcagcacgatattgttcatcgggatctcaaacccgagaatctgcttctggcttccaaatgcaaaggcgcagcggttaagctggcagatttcggcctcgcaatcgaagttcagggtgagcagcaggcctggtttgggttcgctggaactccaggatacctctcgcctgaagttctgcgaaaggacccgtatggaaaacctgtagacatctgggcctgtggtgtgattctgtatatacttctggtagggtaccccccattttgggatgaggaccaacacaagctgtaccagcagatcaaagctggagcctacgactttccatcaccagagtgggacacagtgacccccgaggccaaaaacctaatcaaccagatgctcaccattaaccctgccaagagaataactgcagaccaagcgttaaagcacccttgggtgtgccaacgcagtacagtggcctccatgatgcacagacaggaaactgtggagtgcttgaggaagttcaatgccagacggaagctgaaaggggccatcctcacaacaatgcttgtgtccagaaacttttccgctgccaagagtttattgaataaaaagtcagacggaggagtcaaaaaacgtaagtcctcttcatccgtgcatttgatgcctcagagcaacaacaaaaattcgctcgtatcacctgctcaggagcccgccccactccagacggccatggaaccacagacaacagtagtccataatgccacagatgggattaagggatccaccgagtcatgtaacacgactactgaggatgaagacctgaaagttagaaagcaggaaatcattaaaattactgaacagttaattgaggccattaacaatggggattttgaggcctacaccaaaatttgcgatcctgggctaacatcatttgagcccgaggcgttaggtaatctggttgaaggcatggactttcacaagttttatttcgagaacttgttatcaaagaacagtaagcctatccacacaaccatattgaatcctcatgttcacgtgattggggaggacgctgcatgcatcgcctatatccgtctcactcagtatattgacgggcagggaaggcctaggacatcgcagtcagaggaaacccgcgtgtggcatagacgggacggcaaatggctcaacgttcactatcactgttccggcgcacccgccgccccgttacagtag

SEQ ID NO: 283312 - DNA, 1590 bp, Artificial Sequence
  derived and/or modified sequence
atggccaccaccgctacttgcaccagatttaccgacgactaccaacttttcgaggagctgggcaagggcgcattctctgttgtgcgtaggtgcgtgaaaaaaacctcgactcaagagtacgccgctaagattattaatactaaaaagttatcagccagagatcaccaaaaattggaaagggaggcccgtatctgcagactgctgaaacatcccaatatcgtgaggcttcatgactctatcagtgaagagggctttcactacttggtctttgacctggttacaggaggagaactgtttgaggatattgtggctcgcgaatactacagtgaggcagacgcctcgcactgtatccaccaaattctcgaaagtgtcaatcatatccatcagcatgatattgtgcacagagatctcaaacctgaaaatctgctcctggctagcaagtgcaagggtgccgcagtcaagctagcagactttggactggccatagaggtgcaaggtgaacagcaagcctggtttgggttcgcgggaacccccggataccttagcccagaagtgttgcgtaaggatccctatgggaaacctgtggacatttgggcatgtggggtgatcctctatatcctgctcgtgggctacccacccttctgggatgaagaccaacacaaattatatcagcaaattaaggccggagcatacgacttcccttccccagaatgggacacagtgacacccgaggctaaaaacttgataaatcagatgctaacaatcaatcctgcgaagcgcataaccgcggaccaggccttaaagcacccctgggtctgccagcgatcaacggtcgcttctatgatgcaccggcaagagactgttgagtgcttgcgcaaattcaatgccaggaggaagttgaagggagcaatccttacaacgatgctcgtgtccagaaatttttctgccgctaaaagcttgttaaataagaagtccgacgggggagtcaagaaacgcaagagtagttcgtccgtgcatctgatgccccagtctaacaataaaaacagcttggtgtccccggcacaagagcccgcaccccttcagaccgctatggaaccacagacaactgtggtgcacaacgcgaccgatggtatcaaaggttctaccgaatcatgcaacactaccactgaggatgaagacctgaaagtgaggaagcaggaaatcatcaagatcaccgagcagttgattgaagctatcaataacggggactttgaagcctacacgaaaatctgcgatccaggcttaacttctttcgaacccgaggccctgggcaatcttgtggaaggaatggactttcataagttttacttcgaaaacttactcagcaagaactcaaaaccgatacatactactattctgaaccctcacgtgcacgttatcggagaggatgccgcatgtatcgcctatatccggctcactcagtatattgacggtcaggggcgtcccagaacaagtcaatcggaggagactagggtgtggcatcgcagggacggaaagtggctcaatgtccattaccactgttccggggctcccgctgcaccattgcagtag

SEQ ID NO: 283313 - DNA, 1820 bp, Artificial Sequence
  derived and/or modified sequence
atggccaccaccgccacctgcacccgtttcaccgacgactaccagctcttcgaggagcttggcaagggtgctttctctgtggtccgcaggtgtgtgaagaaaacctccacgcaggagtacgcagcaaaaatcatcaataccaagaagttgtctgcccgggatcaccagaaactagaacgtgaggctcggatatgtcgacttctgaaacatccaaacatcgtgcgcctccatgacagtatttctgaagaagggtttcactacctcgtgtttgaccttgttaccggcggggagctgtttgaagacattgtggccagagagtactacagtgaagcagatgccagccactgtatacatcagattctggagagtgttaaccacatccaccagcatgacatcgtccacagggacctgaagcctgagaacctgctgctggcgagtaaatgcaagggtgccgccgtcaagctggctgattttggcctagccatcgaagtacagggagagcagcaggcttggtttggttttgctggcaccccaggttacttgtcccctgaggtcttgaggaaagatccctatggaaaacctgtggatatctgggcctgcggggtcatcctgtatatcctcctggtgggctatcctcccttctgggatgaggatcagcacaagctgtatcagcagatcaaggctggagcctatgatttcccatcaccagaatgggacacggtaactcctgaagccaagaacttgatcaaccagatgctgaccataaacccagcaaagcgcatcacggctgaccaggctctcaagcacccgtgggtctgtcaacgatccacggtggcatccatgatgcatcgtcaggagactgtggagtgtttgcgcaagttcaatgcccggagaaaactgaagggtgccatcctcacgaccatgcttgtctccaggaacttctcagctgccaaaagcctattgaacaagaagtcggatggcggtgtcaagaaaaggaagtcgagttccagcgtgcacctaatgccacagagcaacaacaaaaacagtctcgtaagcccagcccaagagcccgcgcccttgcagacggccatggagccacaaaccactgtggtacacaacgctacagatgggatcaagggctccacagagagctgcaacaccaccacagaagatgaggacctcaaagtgcgaaaacaggagatcattaagattacagaacagctgattgaagccatcaacaatggggactttgaggcctacacgaagatttgtgatccaggcctcacttcctttgagcctgaggcccttggtaacctcgtggaggggatggatttccataagttttactttgagaatctcctgtccaagaacagcaagcctatccataccaccatcctaaacccacacgtccacgtgattggggaggacgcagcgtgcatcgcctacatccgcctcacccagtacatcgacgggcagggtcggcctcgcaccagccagtcagaagagacccgggtctggcaccgtcgggatggcaagtggctcaatgtccactatcactgctcaggggcccctgccgcaccgctgcagtgagctcagccacaggggctttaggagattccagccggaggtccaaccttcgcagccagtggctctggagggcctgagtgacagcggcagtcctgtttgtttgaggtttaaaacaattcaattacaaaagcggcagcagccaatgcacgcccctgcatgcagccctcccgcccgcccttcgtgtctgtctctgctgtaccgaggtgttttttacatttaagaaaaaaaaaaaa

SEQ ID NO: 283314 - DNA, 1590 bp, Artificial Sequence
  derived and/or modified sequence
atggccaccaccgccacctgcaccagattcaccgacgactaccagctgttcgaggagctgggcaagggcgccttcagcgtggtgagaagatgcgtgaagaagaccagcacccaggagtacgccgccaagatcatcaacaccaagaagctgagcgccagagaccaccagaagctggagagagaggccagaatctgcagactgctgaagcaccccaacatcgtgagactgcacgacagcatcagcgaggagggcttccactacctggtgttcgacctggtgaccggcggcgagctgttcgaggacatcgtggccagagagtactacagcgaggccgacgccagccactgcatccaccagatcctggagagcgtgaaccacatccaccagcacgacatcgtgcacagagacctgaagcccgagaacctgctgctggccagcaagtgcaagggcgccgccgtgaagctggccgacttcggcctggccatcgaggtgcagggcgagcagcaggcctggttcggcttcgccggcacccccggctacctgagccccgaggtgctgagaaaggacccctacggcaagcccgtggacatctgggcctgcggcgtgatcctgtacatcctgctggtgggctacccccccttctgggacgaggaccagcacaagctgtaccagcagatcaaggccggcgcctacgacttccccagccccgagtgggacaccgtgacccccgaggccaagaacctgatcaaccagatgctgaccatcaaccccgccaagagaatcaccgccgaccaggccctgaagcacccctgggtgtgccagagaagcaccgtggccagcatgatgcacagacaggagaccgtggagtgcctgagaaagttcaacgccagaagaaagctgaagggcgccatcctgaccaccatgctggtgagcagaaacttcagcgccgccaagagcctgctgaacaagaagagcgacggcggcgtgaagaagagaaagagcagcagcagcgtgcacctgatgccccagagcaacaacaagaacagcctggtgagccccgcccaggagcccgcccccctgcagaccgccatggagccccagaccaccgtggtgcacaacgccaccgacggcatcaagggcagcaccgagagctgcaacaccaccaccgaggacgaggacctgaaggtgagaaagcaggagatcatcaagatcaccgagcagctgatcgaggccatcaacaacggcgacttcgaggcctacaccaagatctgcgaccccggcctgaccagcttcgagcccgaggccctgggcaacctggtggagggcatggacttccacaagttctacttcgagaacctgctgagcaagaacagcaagcccatccacaccaccatcctgaacccccacgtgcacgtgatcggcgaggacgccgcctgcatcgcctacatcagactgacccagtacatcgacggccagggcagacccagaaccagccagagcgaggagaccagagtgtggcacagaagagacggcaagtggctgaacgtgcactaccactgcagcggcgcccccgccgcccccctgcagtag

SEQ ID NO: 283315 - protein, 516 aa, Artificial Sequence
  derived and/or modified sequence
MATTATCTRFTDDYQLFEELGKGAFSVVRRCVKKTSTQEYAAKIINTKKLSARDHQKLEREARICRLLKHPNIVRLHDSISEEGFHYLVFDLVTGGELFEDIVAREYYSEADASHCIHQILESVNHIHQHDIVHRDLKPENLLLASKCKGAAVKLADFGLAIEVQGEQQAWFGFAGTPGYLSPEVLRKDPYGKPVDIWACGVILYILLVGYPPFWDEDQHKLYQQIKAGAYDFPSPEWDTVTPEAKNLINQMLTINPAKRITADQALKHPWVCQRSTVASMMHRQETVECLRKFNARRKLKGAILTTMLVSRNFSVGRQSSAPASPAASAAGLAGQAAKSLLNKKSDGGVKEPQTTVVHNATDGIKGSTESCNTTTEDEDLKVRKQEIIKITEQLIEAINNGDFEAYTKICDPGLTSFEPEALGNLVEGMDFHKFYFENLLSKNSKPIHTTILNPHVHVIGEDAACIAYIRLTQYIDGQGRPRTSQSEETRVWHRRDGKWLNVHYHCSGAPAAPLQ

SEQ ID NO: 283316 - DNA, 1551 bp, Artificial Sequence
  derived and/or modified sequence
atggcaacaaccgctacctgcacccgctttactgacgactatcaactcttcgaagaactggggaaaggggcctttagcgttgtgagacggtgtgtcaaaaagacatctactcaggagtacgctgcaaagatcataaacactaagaaactttcggcgcgggaccatcaaaagttagagcgtgaggcccgaatctgcagacttcttaagcaccctaacatagtcaggttgcacgactccattagcgaagagggtttccattatctggtgttcgaccttgtcacagggggagaattatttgaggacatcgtggcccgcgaatattactctgaggcagacgccagccactgcatacaccagatcctagagagcgtcaatcatatacatcagcacgacatcgtccatcgcgatctgaaaccagaaaacctcctcctggcttcgaagtgcaagggtgctgccgtcaagttagctgatttcggactagctatcgaggtccagggagagcaacaggcgtggttcggatttgccggaaccccagggtatctgagccccgaagtgcttcgtaaagacccctacgggaaacccgtcgacatttgggcctgtggcgtgatcttgtacatcctcctggttggttatccacctttttgggacgaggatcagcataaactctatcagcagataaaggctggggcttacgacttccctagtcccgaatgggataccgtcactcctgaggccaaaaatctcattaaccaaatgctcacaataaatccagcaaagcggatcactgccgaccaggctcttaagcatccttgggtttgtcaaagaagcacggtggcatctatgatgcaccgccaggaaacggtggagtgcctgcgaaagttcaacgcccgaaggaagctcaaaggcgctatactgactacaatgttggtcagccggaatttctcagtggggaggcaatcatcggccccagccagcccagctgcttccgccgccggtcttgctggccaggctgccaagagtctactgaataagaagtccgatggcggtgtgaaggaaccacagaccacagtggtgcacaatgccaccgacggcattaagggcagcacagagtcttgtaacaccacaaccgaagacgaggacttgaaagtacggaaacaagaaatcattaaaataaccgagcagctcattgaagccataaataatggagattttgaggcttacactaagatttgtgacccgggattgacatcgttcgaacctgaagccctcgggaacctcgttgagggtatggacttccacaaattctactttgaaaacttgctctctaaaaacagtaagcctatccacacaacaatcctgaacccccatgtacacgtaatcggagaggacgccgcctgtattgcctatataaggctgacacaatatattgatgggcagggcaggccacggacctcacaaagcgaggaaacaagagtatggcacaggcgagatggcaagtggcttaacgtgcactatcactgttccggcgcccccgccgccccattgcagtag

SEQ ID NO: 283317 - DNA, 1551 bp, Artificial Sequence
  derived and/or modified sequence
atggccaccacagccacctgcacccgcttcacagatgactaccagctgtttgaggagctgggcaagggggccttctctgtggtgagaagatgtgtgaagaagaccagcacccaggagtatgctgccaagatcatcaacaccaagaagctgagcgcccgggaccaccagaagctggagcgggaggcccgcatctgccgcctgctgaagcaccccaacatcgtgcggctgcatgacagcatcagcgaggagggcttccactacctggtgtttgacctggtgactggaggagagctgtttgaggacatcgtggcccgggagtactacagcgaggctgatgccagccactgcatccaccagatcctggagagcgtgaaccacatccaccagcacgacatcgtgcaccgggacctgaagccagagaacctgctgctggccagcaaatgtaaaggagctgctgtgaagctggccgactttggcctggccatcgaggtgcagggcgagcagcaggcctggtttggatttgctggcaccccaggctacctgagccctgaggtgctgaggaaggacccctacggcaagcctgtggacatctgggcctgtggggtcatcctgtacatcctgctggtgggctacccacccttctgggatgaggaccagcacaagctgtaccagcagatcaaggccggggcctatgacttccccagccctgagtgggacacagtgaccccagaggccaagaacctgatcaaccagatgctgaccatcaacccagccaagaggatcacagctgaccaggccctgaagcacccctgggtgtgccagaggagcacagtggcctccatgatgcaccggcaggagaccgtggagtgcctgaggaagttcaatgcccggaggaagctgaagggggccatcctgaccaccatgctggtgtccaggaacttctctgtgggccggcagagcagcgccccagccagccctgctgccagcgctgctggcctggccggccaggccgccaagagcctgctgaacaagaagagtgatggaggagtgaaggagccccagaccaccgtggtgcacaatgccacagatggcatcaagggcagcacagagagctgcaacaccaccacagaagatgaggacctgaaggtgaggaagcaggagatcatcaagatcacagagcagctgattgaggccatcaacaatggagactttgaggcctacaccaagatctgtgaccccggcctgaccagctttgagcctgaggccctgggcaacctggtggagggcatggacttccacaagttctactttgagaacctgctgagcaagaacagcaagcccatccacaccaccatcctgaacccccacgtgcacgtgattggagaagatgctgcctgcatcgcctacatccggctgacccagtacattgatggccagggccggcccaggaccagccagagcgaggagaccagggtgtggcacagaagagatggcaagtggctgaatgtgcactaccactgcagcggggccccagctgcccccctgcagtag

SEQ ID NO: 283318 - DNA, 1551 bp, Artificial Sequence
  derived and/or modified sequence
atggccaccaccgccacctgcacccggttcaccgacgactaccagctgttcgaagaactcggtaaaggagctttctccgtcgttcggaggtgtgtcaagaagacttctactcaggagtatgccgcaaaaatcatcaatacgaagaaacttagcgctcgcgaccaccaaaagctcgagagagaagcccggatctgtagactcttgaagcaccctaatatcgtcaggctccatgacagcatttccgaggagggattccactatctggtcttcgatttggtgacgggtggagagctgttcgaggacatcgtcgcacgagagtactattcagaagcggacgcctctcactgcatccatcaaatcctggagagcgttaatcatatccaccaacacgatatcgtgcatagggatcttaaacccgagaacctgctcctggcctctaagtgcaaaggagccgcagtcaagctcgccgatttcgggctcgccatcgaagtgcagggagagcaacaggcatggttcggtttcgctggtacgccgggctatctgtctcccgaggtgctgcgcaaggatccgtacgggaaacccgttgatatctgggcatgtggcgtcatcttgtatatattgctcgtcggttatccacccttttgggatgaggatcagcacaaattgtatcaacagatcaaggcaggagcctacgactttccatcccccgagtgggacaccgtgacccctgaagccaagaatttaattaatcagatgttgactataaacccagccaaacgcataacggctgatcaggcactgaagcacccttgggtttgccagcggtccacagtagcaagtatgatgcaccgccaggaaacggtggaatgccttcgcaaatttaatgcaagacgcaaattaaagggcgccatcctgacgacaatgttggtttcccgaaatttcagtgtgggccgacagagcagcgcccccgcttccccagccgcatctgccgccgggctggcaggacaggcggctaagtcgctcttgaacaaaaagtctgacgggggcgtcaaagagccgcagaccactgtggttcacaatgctacagatgggatcaagggctcgacggaatcttgcaacacaacaactgaggatgaagaccttaaggttcgcaagcaggagatcataaagatcactgaacagctgattgaagcaatcaataatggagattttgaggcctacacaaagatatgcgatcctgggctcaccagctttgagcccgaggccctcggcaatttagtggaggggatggactttcacaagttctacttcgagaacctactgtctaaaaattccaagcccatacatactacaatactgaatcctcacgttcatgtgatcggggaagatgcagcctgcatagcatacattcgtcttacccagtatatcgacggacaaggaaggcctaggacaagccaatcggaggagacccgcgtgtggcaccgacgcgacgggaagtggcttaatgtacattaccactgttcaggcgctccagctgccccactccagtag

SEQ ID NO: 283319 - DNA, 1551 bp, Artificial Sequence
  derived and/or modified sequence
atggccaccacggctacctgtacccgttttacggatgattatcaactgtttgaggaattgggcaagggagccttttcagtcgtccgtcgatgcgttaagaagactagtactcaggaatacgctgcgaagattatcaacacgaagaagctatccgctcgagatcatcagaaactggagcgggaagccagaatatgccggctgctgaagcacccaaatatcgtaagacttcatgattcgatctcggaagaaggctttcactatcttgtgttcgacttggtgacaggaggggagctctttgaggatatcgtggccagggagtactattctgaagcggacgcgtcccactgcattcatcagatcttagagtccgtgaatcacatccatcagcatgacatcgtccatcgggacctgaagcccgaaaatctgctgttggctagcaaatgtaaaggcgctgccgtgaaactcgccgacttcggacttgcaattgaggttcagggcgagcaacaagcttggttcggcttcgctggaacacctggatatctgtcgcccgaggtgctgcgcaaggatccttatggaaaacctgtggatatttgggcctgcggggttattctctatattcttctggtgggttacccacccttttgggatgaggaccagcacaagctgtatcagcagatcaaggcaggagcctatgatttccccagccctgagtgggacaccgttacacctgaggctaagaacttgattaaccagatgctgacaattaacccagcgaaaaggattactgccgatcaggctctgaagcatccttgggtttgtcagcgatccacggtcgcttctatgatgcatcggcaggaaaccgtagagtgtttgcgcaaatttaatgcaaggcgaaaacttaaaggagccatcttaacaacgatgctggtctccagaaactttagcgtcgggcgacagtcttcggcaccagcatctcccgctgcttctgcggctggtctggccggtcaggccgctaaaagtctgttgaacaagaagtccgatggcggagttaaggaaccacagactacagtggtccataatgccacagacggtattaagggtagtaccgagagctgtaatacgaccacagaagatgaagacttgaaggtccggaaacaagagattatcaagatcacggagcagctgatagaggccatcaataatggcgacttcgaggcctacactaaaatctgcgatccaggattgacatccttcgaacctgaggcactgggcaacctggttgaaggtatggatttccacaagttctatttcgagaatctgctctccaagaattctaaacccatccacaccactatcctgaatccacacgtgcatgtcatcggtgaagatgccgcatgtatcgcctacatcagactcacccagtacatcgatgggcaaggtcgccctcgaacatctcagtctgaagagacccgggtctggcatagaagggatgggaagtggctgaatgtccactaccactgttctggtgcgcctgccgcacccctccagtag

SEQ ID NO: 283320 - DNA, 1822 bp, Artificial Sequence
  derived and/or modified sequence
gtcggcgcgggctgcaccgccgcgtccgcccgcccgccagcatggccaccaccgccacctgcacccgtttcaccgacgactaccagctcttcgaggagcttggcaagggtgctttctctgtggtccgcaggtgtgtgaagaaaacctccacgcaggagtacgcagcaaaaatcatcaataccaagaagttgtctgcccgggatcaccagaaactagaacgtgaggctcggatatgtcgacttctgaaacatccaaacatcgtgcgcctccatgacagtatttctgaagaagggtttcactacctcgtgtttgaccttgttaccggcggggagctgtttgaagacattgtggccagagagtactacagtgaagcagatgccagccactgtatacatcagattctggagagtgttaaccacatccaccagcatgacatcgtccacagggacctgaagcctgagaacctgctgctggcgagtaaatgcaagggtgccgccgtcaagctggctgattttggcctagccatcgaagtacagggagagcagcaggcttggtttggttttgctggcaccccaggttacttgtcccctgaggtcttgaggaaagatccctatggaaaacctgtggatatctgggcctgcggggtcatcctgtatatcctcctggtgggctatcctcccttctgggatgaggatcagcacaagctgtatcagcagatcaaggctggagcctatgatttcccatcaccagaatgggacacggtaactcctgaagccaagaacttgatcaaccagatgctgaccataaacccagcaaagcgcatcacggctgaccaggctctcaagcacccgtgggtctgtcaacgatccacggtggcatccatgatgcatcgtcaggagactgtggagtgtttgcgcaagttcaatgcccggagaaaactgaagggtgccatcctcacgaccatgcttgtctccaggaacttctcagttggcaggcagagctccgcccccgcctcgcctgccgcgagcgccgccggcctggccgggcaagctgccaaaagcctattgaacaagaagtcggatggcggtgtcaaggagccacaaaccactgtggtacacaacgctacagatgggatcaagggctccacagagagctgcaacaccaccacagaagatgaggacctcaaagtgcgaaaacaggagatcattaagattacagaacagctgattgaagccatcaacaatggggactttgaggcctacacgaagatttgtgatccaggcctcacttcctttgagcctgaggcccttggtaacctcgtggaggggatggatttccataagttttactttgagaatctcctgtccaagaacagcaagcctatccataccaccatcctaaacccacacgtccacgtgattggggaggacgcagcgtgcatcgcctacatccgcctcacccagtacatcgacgggcagggtcggcctcgcaccagccagtcagaagagacccgggtctggcaccgtcgggatggcaagtggctcaatgtccactatcactgctcaggggcccctgccgcaccgctgcagtgagctcagccacaggggctttaggagattccagccggaggtccaaccttcgcagccagtggctctggagggcctgagtgacagcggcagtcctgtttgtttgaggtttaaaacaattcaattacaaaagcggcagcagccaatgcacgcccctgcatgcagccctcccgcccgcccttcgtgtctgtctctgctgtaccgaggtgttttttacatttaagaaaaaaaaaaaa

SEQ ID NO: 283321 - DNA, 1551 bp, Artificial Sequence
  derived and/or modified sequence
atggccaccaccgccacctgcaccagattcaccgacgactaccagctgttcgaggagctgggcaagggcgccttcagcgtggtgagaagatgcgtgaagaagaccagcacccaggagtacgccgccaagatcatcaacaccaagaagctgagcgccagagaccaccagaagctggagagagaggccagaatctgcagactgctgaagcaccccaacatcgtgagactgcacgacagcatcagcgaggagggcttccactacctggtgttcgacctggtgaccggcggcgagctgttcgaggacatcgtggccagagagtactacagcgaggccgacgccagccactgcatccaccagatcctggagagcgtgaaccacatccaccagcacgacatcgtgcacagagacctgaagcccgagaacctgctgctggccagcaagtgcaagggcgccgccgtgaagctggccgacttcggcctggccatcgaggtgcagggcgagcagcaggcctggttcggcttcgccggcacccccggctacctgagccccgaggtgctgagaaaggacccctacggcaagcccgtggacatctgggcctgcggcgtgatcctgtacatcctgctggtgggctacccccccttctgggacgaggaccagcacaagctgtaccagcagatcaaggccggcgcctacgacttccccagccccgagtgggacaccgtgacccccgaggccaagaacctgatcaaccagatgctgaccatcaaccccgccaagagaatcaccgccgaccaggccctgaagcacccctgggtgtgccagagaagcaccgtggccagcatgatgcacagacaggagaccgtggagtgcctgagaaagttcaacgccagaagaaagctgaagggcgccatcctgaccaccatgctggtgagcagaaacttcagcgtgggcagacagagcagcgcccccgccagccccgccgccagcgccgccggcctggccggccaggccgccaagagcctgctgaacaagaagagcgacggcggcgtgaaggagccccagaccaccgtggtgcacaacgccaccgacggcatcaagggcagcaccgagagctgcaacaccaccaccgaggacgaggacctgaaggtgagaaagcaggagatcatcaagatcaccgagcagctgatcgaggccatcaacaacggcgacttcgaggcctacaccaagatctgcgaccccggcctgaccagcttcgagcccgaggccctgggcaacctggtggagggcatggacttccacaagttctacttcgagaacctgctgagcaagaacagcaagcccatccacaccaccatcctgaacccccacgtgcacgtgatcggcgaggacgccgcctgcatcgcctacatcagactgacccagtacatcgacggccagggcagacccagaaccagccagagcgaggagaccagagtgtggcacagaagagacggcaagtggctgaacgtgcactaccactgcagcggcgcccccgccgcccccctgcagtag

SEQ ID NO: 283322 - protein, 312 aa, Artificial Sequence
  derived and/or modified sequence
MERYKAQGCCCLVVQRRIRQVSASLEQLLTELDDFLKILDQENLSSTALVKKSCLAELLRLYTKSSSSDEEYIYMNKVTINKQQNAESQGKAPEEQGLLPNGEPSQHSSAPQKSLPDLPPPKMIPERKQLAIPKTESPEGYYEEAEPYDTSLNEDGEAVSSSYESYDEEDGSKGKSAPYQWPSPEAGIELMRDARICAFLWRKKWLGQWAKQLCVIKDNRLLCYKSSKDHSPQLDVNLLGSSVIHKEKQVRKKEHKLKITPMNADVIVLGLQSKDQAEQWLRVIQEVSGLPSEGASEGNQYTPDAQRFNCQK

SEQ ID NO: 283323 - DNA, 939 bp, Artificial Sequence
  derived and/or modified sequence
atggagaggtacaaagcccaggggtgttgttgtcttgtggtacagaggaggattcgccaggtctccgcatccttggaacagctgctgactgaactggatgattttctaaaaattcttgaccaagaaaatctgtccagtaccgctctagttaagaagtcgtgccttgcggagctgctcagattgtacaccaaatcctctagtagcgacgaggagtacatttacatgaacaaagtgacgattaacaaacagcagaatgctgagtctcaggggaaggcccctgaggagcagggccttttgcctaacggagagccctctcagcatagctcagccccacagaagtccctccctgacttgcccccacccaaaatgatcccggagcggaaacagttggccatcccaaaaaccgagagtccggagggatattacgaggaggctgagccttatgatacatccttaaacgaggatggagaggcggtgtcaagcagctacgagtcttatgatgaagaagacgggagtaaagggaaatctgccccgtatcagtggccatctcctgaggctggaattgagctcatgcgcgatgccagaatttgtgcattcctatggaggaagaagtggctgggccaatgggctaagcagctgtgtgtgatcaaggataacaggctgttgtgctacaagagtagtaaagatcattcaccgcagcttgacgtcaatttgcttggatcttccgttatacataaggagaagcaagtgcggaagaaggaacacaaactcaagatcacacccatgaacgccgatgtcatcgtgctggggctgcaaagtaaggaccaagccgaacaatggctacgggttatccaggaggtgagtgggctgccttctgagggggccagtgagggaaaccagtacactccagatgcccagaggttcaactgtcagaaatag

SEQ ID NO: 283324 - DNA, 939 bp, Artificial Sequence
  derived and/or modified sequence
atggagcggtacaaggcccagggatgctgttgcctggtcgtccagcggagaatccggcaggtatctgcctccttggaacagctgctcacagagctcgacgattttctgaaaattttggatcaggagaatttatcttccaccgccctggtgaagaaaagctgtctcgctgaactgctgagactctatactaaatctagctccagcgatgaggagtacatctatatgaacaaggtcactatcaataagcagcagaacgcggagagccagggaaaggctccagaggagcagggcctccttccaaatggcgaacccagtcagcactcatctgcaccgcagaagagtcttcctgatttgcctcctcctaaaatgatacctgaacggaagcagctcgcaattcccaagaccgagagccccgaaggatattacgaggaggcagagccctacgacacatctctgaatgaggatggggaggccgtgagcagctcgtacgaatcctacgatgaggaggatgggtctaagggcaaaagtgcgccctaccagtggccttcacctgaagccggcattgaacttatgagagatgctcggatctgtgccttcctttggcggaaaaagtggctaggacagtgggccaaacagctgtgcgttattaaggataaccggctgctttgttataagagtagtaaagatcactctccgcagctggacgtcaatttactgggttccagcgttatacacaaagagaaacaggtgcggaagaaagaacacaagctgaaaatcacccctatgaatgccgacgtgatcgttctggggctccagagcaaagaccaggccgaacaatggctgagagtcatacaggaggtgagcgggctcccgagtgaaggtgcctctgaggggaaccaatacaccccagacgcccagcggtttaattgccagaaatag

SEQ ID NO: 283325 - DNA, 939 bp, Artificial Sequence
  derived and/or modified sequence
atggagcgctacaaggcccagggctgctgctgcctggtggtgcagaggcgcatccggcaggtgtctgccagcctggagcagctgctgacagagctggatgacttcctgaagatcctggaccaggagaacctgagcagcacagccctggtgaagaagagctgcctggccgagctgctgcggctgtacaccaagagcagcagcagtgatgaggagtacatctacatgaacaaggtgaccatcaacaagcagcagaatgctgagagccagggcaaggcccctgaggagcagggcctgctgcccaatggagagcccagccagcacagcagcgccccccagaagagcctgcctgacctgcccccacccaagatgatccctgagaggaagcagctggccatccccaagacagagagccctgagggctactatgaggaggccgagccctatgacaccagcctgaatgaagatggagaggccgtgagcagcagctatgagagctatgatgaagaagatggcagcaagggcaagagcgccccctaccagtggcccagccctgaggccggcatcgagctgatgagagatgcccgcatctgtgccttcctgtggaggaagaagtggctgggccagtgggccaagcagctgtgtgtgatcaaggacaaccggctgctgtgctacaagagcagcaaggaccacagcccccagctggatgtgaacctgctgggcagcagcgtcatccacaaggagaagcaggtgaggaagaaggagcacaagctgaagatcacccccatgaatgctgatgtgattgtgctgggcctgcagagcaaggaccaggccgagcagtggctgcgggtcatccaggaggtgtctggcctgcccagcgagggcgccagcgagggcaaccagtacaccccagatgcccagcgcttcaactgccagaagtag

SEQ ID NO: 283326 - DNA, 939 bp, Artificial Sequence
  derived and/or modified sequence
atggagcggtacaaggcccagggctgctgctgcctggtggtgcagcggaggatcagacaagtgtctgcctctttggaacagctactcaccgagctggatgatttcttaaagatcctggaccaggagaacctgagcagtactgccctcgtcaagaaaagctgtctggccgaacttttgcgcctttatacaaagagctcctcttctgacgaggagtatatctacatgaacaaggtgaccattaacaaacagcagaacgccgagtcccaggggaaggcccctgaagagcaggggctgctcccaaacggcgagccttcccaacatagcagtgcacctcagaagtccctgcccgacctcccccccccgaaaatgattcccgagcggaaacaacttgcaattcctaagaccgagtcgcctgaagggtattatgaggaagccgaaccgtatgacacatctctgaatgaagacggtgaggccgtttcttctagctacgagtcttatgatgaggaagacggatctaaagggaagagcgccccctaccagtggccttcaccggaggctgggattgagctgatgcgggatgcgaggatctgcgcctttctgtggcgaaagaaatggctcggacagtgggccaagcagctgtgcgttattaaagacaaccgcctactgtgctacaagtcctctaaggatcacagccctcaactggacgtaaacctactgggatccagcgtcattcataaggaaaagcaggtccggaagaaagaacacaagctgaaaatcacacccatgaacgctgacgtcatcgtgttaggcctccaatccaaggatcaggcggagcagtggctgagagtgattcaggaagtctccggactaccaagtgaaggcgcttcagaaggaaaccaatacaccccagacgctcagcggttcaattgtcagaaatag

SEQ ID NO: 283327 - DNA, 939 bp, Artificial Sequence
  derived and/or modified sequence
atggagcggtacaaggcccagggctgctgctgcctggtggtgcagcgacgaataaggcaggtgagtgcttctttagagcagctcttgacagagctagatgatttcctgaaaattcttgaccaggaaaacctctcaagcacagccctggtcaaaaagagctgcctggcagagttgctgcgcttgtacacaaaatcaagctcttcagacgaggaatacatttatatgaacaaggtgaccattaacaagcagcagaacgctgagagtcaaggcaaagcgccagaggaacaaggactgctgcccaatggcgaaccttcccagcattcctcagccccccagaaaagtttacctgacttaccaccgccaaaaatgattcctgaaagaaagcagctggccattccaaagaccgaaagtccagaaggctactacgaggaggcggagccatatgacacctcactaaacgaggacggtgaagccgtgtccagcagctacgaatcctatgatgaagaagacggctccaagggaaagtctgccccgtaccaatggccctctcctgaagccggtatagaattaatgcgcgatgctagaatctgtgctttcctgtggcgcaagaagtggctgggacagtgggcaaagcaactgtgcgtgatcaaagacaatcggttactgtgttataagagcagcaaagatcattctccccagctggatgtgaaccttctggggtccagcgtgattcacaaagaaaagcaggttcgcaagaaggagcacaagctgaaaatcacccctatgaatgctgacgttattgtcctcggacttcagagcaaggaccaggcagagcagtggctcagggtcatccaagaggtgtctggactgcctagcgaaggagcctctgagggtaatcagtacacgccggacgcacaacggtttaactgccagaagtag

SEQ ID NO: 283328 - DNA, 939 bp, Artificial Sequence
  derived and/or modified sequence
atggagcggtacaaggcacaagggtgctgttgtctggtcgttcagagacgtatcagacaagtctccgccagcttggaacagctgctgactgagctagacgatttcctcaaaatattagatcaggaaaatctgtcctccaccgccctggtgaagaagtcttgtctagccgaactcctgcgattatacaccaagtcaagttctagcgacgaggagtacatctacatgaacaaggtgactataaacaaacagcagaacgctgagagccaagggaaagccccagaagagcagggactattgccaaacggagaaccctcccagcattcgagcgctccccaaaaatctttgcccgatctccccccacctaaaatgatccccgaacgcaagcaactggctattcccaagacagagagcccagaaggctattacgaggaagcggaaccctacgatacctctctgaatgaggacggcgaagccgtttcctcttcgtatgaaagttacgacgaggaggatgggtctaagggaaagagcgccccttatcagtggccttcccccgaagccggaatcgagctgatgcgagatgcccgtatctgcgcatttctctggcgaaagaagtggcttggtcaatgggcgaagcaactttgtgtcataaaggacaaccggttgctatgctacaagagttccaaagatcactctcctcagcttgacgtcaatctgcttggctcatccgtcattcacaaggaaaaacaggtccggaaaaaagagcacaagctaaagattacaccgatgaacgcggacgttattgttcttggcctgcaatccaaggaccaggccgaacagtggctgagggtaattcaggaggtttcagggctgcctagcgagggcgctagcgagggcaatcagtacacgcctgacgctcagcgctttaattgccagaagtag

SEQ ID NO: 283329 - DNA, 939 bp, Artificial Sequence
  derived and/or modified sequence
atggaaagatacaaggcccagggctgttgctgcctggtagtgcagagaaggatcagacaggtgagtgccagccttgaacagcttctgactgagcttgacgactttctgaagatcttggaccaggagaatcttagtagcacggcccttgtcaaaaaatcatgcttggctgagctgttgagactgtacactaaatcttcttcctcagacgaagagtacatttatatgaataaggttaccattaacaaacagcaaaatgccgaaagccaggggaaagcgccagaggagcaaggtctcctgccaaatggcgaaccgagccaacattcatccgccccacagaagtcactgcccgacctgccacctcccaagatgatcccggaacgcaaacagctggccatccccaagacggagagtcctgagggatactatgaagaggctgaaccatacgatacatccctgaatgaagacggcgaggccgtgtcatccagttacgaatcatatgatgaggaggacgggtccaaggggaagagtgcaccatatcagtggccaagcccggaagccggtatcgaactgatgcgggatgccagaatttgtgcattcctctggaggaagaaatggttgggccagtgggccaagcaactgtgcgtcatcaaggacaatcgattgttatgttacaaatccagcaaagatcactcccctcagctggacgtgaatctactcggctccagtgttatccacaaagagaagcaggtgagaaaaaaagagcataagctgaaaatcacaccgatgaatgccgacgttatcgtgcttggactgcagtccaaggaccaggcagagcagtggttgcgggtgatccaggaggtgtcgggactgcctagcgagggcgcatctgaaggcaaccaatatactccagacgcccagaggttcaattgccagaagtag

SEQ ID NO: 283330 - DNA, 961 bp, Artificial Sequence
  derived and/or modified sequence
gcgaggagcgcactccgtggccccgatggagcggtacaaagcacaggggtgttgctgtctggtggtacagagaaggatccggcaggtttctgcgtccctggaacagctgctgacagagttggatgacttcctcaagattcttgaccaggagaacctgagcagcacagcactggtgaagaagagctgcctggcggagctcctccggctttacaccaaaagcagcagctctgatgaggagtacatttatatgaacaaagtgaccatcaacaagcaacagaatgcagagtctcaaggcaaagcgcctgaggagcagggcctgctacccaatggggagcccagccagcactcctcggcccctcagaagagccttccagacctcccgccacccaagatgattccagaacggaaacagcttgccatcccaaagacggagtctccagagggctactatgaagaggctgagccatatgacacatccctcaatgaggacggagaggctgtgagcagctcctacgagtcctacgatgaagaggacggcagcaagggcaagtcggccccttaccagtggccctcgccggaggccggcatcgagctgatgcgtgacgcccgcatctgcgccttcctgtggcgcaagaagtggctgggacagtgggccaagcagctctgtgtcatcaaggacaacaggcttctgtgctacaaatcctccaaggaccacagccctcagctggacgtgaacctactgggcagcagcgtcattcacaaggagaagcaagtgcggaagaaggagcacaagctgaagatcacgccgatgaatgccgatgtgattgtgctgggcctgcagagcaaggaccaggctgagcagtggctcagggtcatccaggaagtgagcggcctgccttccgaaggagcatctgaaggaaaccagtacaccccggatgcccagcgctttaactgccagaaa

SEQ ID NO: 283331 - DNA, 4028 bp, Artificial Sequence
  derived and/or modified sequence
gtgccaaggcggccgggggcggcgagcggggccgcgggcgcgcaccgactcaagagccgactgtcagcctcggcgggccggagttctccggcgctgggacaggggcgctgggacaggggcgctgggggcgagccctggcgggggccaggtccgaggaccctgggcgcggcggccccgccaggaggtccggccgcgagcgtgacctcacggggaggggccagcgcggcggcctgggcgctgagccgagcgccgggagagcagcgcagaagccgagccgcgaggagcgcactccgtggccccgatggagcggtacaaagcacaggggtgttgctgtctggtggtacagagaaggatccggcaggtttctgcgtccctggaacagctgctgacagagttggatgacttcctcaagattcttgaccaggagaacctgagcagcacagcactggtgaagaagagctgcctggcggagctcctccggctttacaccaaaagcagcagctctgatgaggagtacatttatatgaacaaagtgaccatcaacaagcaacagaatgcagagtctcaaggcaaagcgcctgaggagcagggcctgctacccaatggggagcccagccagcactcctcggcccctcagaagagccttccagacctcccgccacccaagatgattccagaacggaaacagcttgccatcccaaagacggagtctccagagggctactatgaagaggctgagccatatgacacatccctcaatgaggacggagaggctgtgagcagctcctacgagtcctacgatgaagaggacggcagcaagggcaagtcggccccttaccagtggccctcgccggaggccggcatcgagctgatgcgtgacgcccgcatctgcgccttcctgtggcgcaagaagtggctgggacagtgggccaagcagctctgtgtcatcaaggacaacaggcttctgtgctacaaatcctccaaggaccacagccctcagctggacgtgaacctactgggcagcagcgtcattcacaaggagaagcaagtgcggaagaaggagcacaagctgaagatcacgccgatgaatgccgatgtgattgtgctgggcctgcagagcaaggaccaggctgagcagtggctcagggtcatccaggaagtgagcggcctgccttccgaaggagcatctgaaggaaaccagtacaccccggatgcccagcgctttaactgccagaaaccagatatagctgagaagtacctgtcggcttcagagtatgggagctccgtggatggccaccctgaggtcccagaaaccaaagacgtcaagaagaaatgttctgctggcctcaaactgagcaacctaatgaatctgggcaggaagaaatccacctcactggagcctgtggagaggtccctcgagacatccagttacctgaacgtgctggtgaacagccagtggaagtctcgctggtgctctgtcagggacaatcacctgcacttctaccaggaccggaaccggagcaaggtggcccagcaacccctcagcctggtgggctgcgaggtggtcccagaccccagccccgaccacctctactccttccgcatcctccacaagggcgaggagctggccaagcttgaggccaagtcttccgaggaaatgggccactggctgggtctcctgctctctgagtcaggctccaagacagacccagaagagttcacctacgactatgtggatgccgatagggtctcctgtattgtgagtgcggccaaaaactctctcttactgatgcagagaaagttctcagagcccaacacttacatcgatggcctgcctagccaggaccgccaggaggagctgtatgacgacgtggacctgtcagagctcacagctgcggtggagcctaccgaggaagccacccctgttgcagatgacccaaatgagagagaatctgaccgagtgtacctggacctcacacctgtcaagtcctttctgcatggccccagcagtgcacaggcccaggcctcctccccgacgttgtcctgcctggacaatgcaactgaggccctcccggcagactcaggcccaggtcccaccccagatgagccctgcataaagtgtccagagaacctgggagaacagcagctggagagtttggagccagaggatccttccctgagaatcaccaccgtcaaaatccagacggaacagcagagaatctccttcccaccgagctgcccggatgccgtggtggccaccccacctggtgccagcccacctgtgaaggacaggttgcgcgtgaccagtgcagagatcaagcttggcaagaatcggacagaagctgaggtgaagcggtacacagaggagaaggagaggcttgaaaagaagaaggaagaaatccgggggcacctggctcagctccggaaagagaaacgggagctaaaggaaaccctactgaaatgcacagacaaggaagtcctggcgagcctggagcagaagctgaaggaaattgacgaggagtgccggggcgaggagagcaggcgcgtggacctggagctcagcatcatggaggtgaaggacaacctgaagaaggctgaggcagggcctgtgacgttaggcaccaccgtggacaccacccacctggagaatgtgagcccccgccccaaagctgtcacacctgcctctgccccagactgtaccccagtcaactctgcaaccacactcaagaacaggcctctctcggtcgtggtcacaggcaaaggcactgtactccagaaagccaaggaatgggagaagaaaggagcaagttagaaaacaagcttcatctaaagactctcatgtcaatgtggaccttggtgacaatcctgctttgttaaagcaaaaactatgcgaaagggtgagtctgtttagaagaaaaagcaaagactgaggtactgtgaatggagagcttcagctaagaggaggctctgtcccttttcagagccaaaggaaataatacaacaaaaaggaggcttctttggagacctaagtctattggatgtaaacaagacgttgtatttagggatgttctgtgtttctttcttttttgaagttgtcatcaattgctttactaagatttttaaatagtgaaaacctcctgtttagactttggtggaagatgaatcaaggaagcagggccctgtcttatgggtcacgtgtctttggtgagtgagaagacctaaactcctggccatcatctcttatccaatacttagcagttggggattaaaccatccttgccttcagttctctccaatattaccaggcccaactcagtcttcagtgattttaaacagcattgacatcatctgtaaaaccatcatctgtaaaaccatctatgacatgagttttgagaaacaataatggggaaaatatttgggaccaagctgaagcactaatcccactaagttaaagacttctttccagtccaaggcaggcctgaatcaactgtctttaaataaaattttaagtgatgctgtattatatataggaaaaaatgcttaaaatcctgtcatttagaacagtgaaaagtatcttttgagattaaagtgactctttactgtaggaaaaatattactctgtgtttacagattcattgctgtggtcaggccatttttaagggaagagttatttaatataaatagtctctgattttaagttctgtttaatgttcattctccttccaagaacaaagtggtgatttttggttagggtgatcgccctcttaaaattggcagtgctgttccttgtgctgcccctgtcttttcctctgatggcatttttttttttttttttttaacacaggttgaaacatttcatctattatctctgcctcatttctggagggttgtgtatcagttctctaacacttgttcctgagaactaaatgtcttttttattcttatttcctctctcataaacatttggtgaccttttaccaagtggtgagttagttaggttttttaaaataaaatgttcattgtatttg

SEQ ID NO: 283332 - DNA, 939 bp, Artificial Sequence
  derived and/or modified sequence
atggagagatacaaggcccagggctgctgctgcctggtggtgcagagaagaatcagacaggtgagcgccagcctggagcagctgctgaccgagctggacgacttcctgaagatcctggaccaggagaacctgagcagcaccgccctggtgaagaagagctgcctggccgagctgctgagactgtacaccaagagcagcagcagcgacgaggagtacatctacatgaacaaggtgaccatcaacaagcagcagaacgccgagagccagggcaaggcccccgaggagcagggcctgctgcccaacggcgagcccagccagcacagcagcgccccccagaagagcctgcccgacctgcccccccccaagatgatccccgagagaaagcagctggccatccccaagaccgagagccccgagggctactacgaggaggccgagccctacgacaccagcctgaacgaggacggcgaggccgtgagcagcagctacgagagctacgacgaggaggacggcagcaagggcaagagcgccccctaccagtggcccagccccgaggccggcatcgagctgatgagagacgccagaatctgcgccttcctgtggagaaagaagtggctgggccagtgggccaagcagctgtgcgtgatcaaggacaacagactgctgtgctacaagagcagcaaggaccacagcccccagctggacgtgaacctgctgggcagcagcgtgatccacaaggagaagcaggtgagaaagaaggagcacaagctgaagatcacccccatgaacgccgacgtgatcgtgctgggcctgcagagcaaggaccaggccgagcagtggctgagagtgatccaggaggtgagcggcctgcccagcgagggcgccagcgagggcaaccagtacacccccgacgcccagagattcaactgccagaagtag

SEQ ID NO: 283333 - DNA, 405 bp, Artificial Sequence
  derived and/or modified sequence
atgcacggtgggggtggggtttcttcctgttcagcaagttctgtgagctctgttagccagaatcctcctgcggctgccgctcctggacacggggctagagagcacaggggacagctggctgcagccgaaagcgcctcttccccactgcacccggcaacaaaagcttcagttgggcctgctctgcaaagagagacgcctactattctgtgtgcaatactctgcctgggaccacacgtatccttagcctgtgtctctcgagagcttgcgacagagccgcgaacctccagtccgtgcgcaagccatgggagcagctcgcatccggtaaccttaaccgagctcctgatctctagtatctctctgagagacggcgctgccctcctgggcttgtgtagtcgtactgtttag

SEQ ID NO: 283334 - DNA, 450 bp, Artificial Sequence
  derived and/or modified sequence
ggcgatcccgtggccttgaattatactttctatcaagtgatcagtgcctccagtcagaccccccttgctctgcgaagcctgcaaaatagatgccttgttcccgggtactattcgacacacctgcaacggtggctgacctattatccgtccggccaactcctgatagtagatggtcaggagcttaggactaaccctgctgcttccatggagtccatacagaaatttttgggaataactcctttcctgaactacacccggaccctgaggtttgacgacgataagggtttctggtgccaaggactggagggcggaaagactcgctgcctgggtagatctaaaggaaggaggtaccccgatatggacaccgaggtgagcaaagctcggggtcgcggcatacccctgcatttccaggatctgatcctatgtcccacctcctatcatttctgctag

SEQ ID NO: 283335 - DNA, 450 bp, Artificial Sequence
  derived and/or modified sequence
ggggaccctgtggccctgaactacaccttctaccaggtgatcagcgccagcagccagacccccctggccctgcggagcctgcagaaccgctgcctggtgcccggctactacagcacccacctgcagcgctggctgacctactaccccagcggccagctgctgattgtggatggccaggagctgcggaccaacccagctgcctccatggagagcatccagaagttcctgggcatcacccccttcctgaactacaccaggaccctgcgctttgatgatgacaagggcttctggtgccagggcctggagggcggcaagacccgctgcctgggccgcagcaaaggaagacgctacccagacatggacacagaggtgtccaaggcccggggccggggcatccccctgcacttccaggacctgatcctgtgccccaccagctaccacttctgctag

SEQ ID NO: 283336 - DNA, 447 bp, Artificial Sequence
  derived and/or modified sequence
ggagacccagttgctctgaactataccttctatcaggtgatttcagcctcctcccagacccctctggcactacgctccctgcagaaccgctgtcttgtccctggctactattctacccatctacaacgctggctgacttactacccctctggacagttgctgattgtggatgggcaagagctgcgtaccaacccagcagcctcaatggagagcatccagaagttcctgggtatcacaccctttctgaactacacacggaccctcaggtttgatgatgataagggattttggtgccagggacttgaaggtggtaagactcgctgtctaggccggagcaaaggccggaggtatccagatatggacactgaggtaagtaaagccaggggcaggggaatccctctccacttccaggatctgattctgtgtcccacttcttaccatttctgc

SEQ ID NO: 283337 - DNA, 450 bp, Artificial Sequence
  derived and/or modified sequence
ggcgaccccgtggccctgaactacaccttctaccaggtgatcagcgcatcctctcagaccccactggcgttacggagcctgcaaaataggtgtttagtgccaggctactattcaactcatctacagagatggctgacctactatcccagcggccagcttctgatcgtggacggacaagaactgaggactaatcccgccgctagtatggaaagtatacagaagtttctaggtataacgcctttcctgaactacacaaggactttaaggtttgacgatgacaagggattttggtgccaaggattggagggcggaaaaacccggtgtcttggccgatcaaaaggacggaggtaccccgacatggataccgaggtcagtaaagcaagaggacgaggcattcctctccacttccaggacctgatcctgtgtcctacttcttaccatttttgttag

SEQ ID NO: 283338 - DNA, 450 bp, Artificial Sequence
  derived and/or modified sequence
ggcgatcccgtggccctgaactataccttttaccaggtgatcagcgccagttcccagactccattggccctgcgatccctccagaatcgatgcctagtccccggttattactctacgcacttacagcgatggcttacgtactatcccagcgggcagctcttgatcgtcgatggacaggagctgaggaccaatcctgccgctagcatggagagcatccagaagtttcttggaattaccccattcctgaattacacgaggacactccgctttgatgacgataaggggttctggtgtcaaggcctggagggcggaaagacacgatgcctaggcaggtcgaagggcagaaggtatccagacatggacacggaagtgtccaaggcgagaggtaggggcatccctcttcactttcaggatttaatattgtgtccaaccagttatcatttctgctag

SEQ ID NO: 283339 - DNA, 450 bp, Artificial Sequence
  derived and/or modified sequence
ggcgaccccgtggccctgaactacaccttctaccaggtgatcagcgccagcagccagacccccctggccctgagaagcctgcagaacagatgcctggtgcccggctactacagcacccacctgcagagatggctgacctactaccccagcggccagctgctgatcgtggacggccaggagctgagaaccaaccccgccgccagcatggagagcatccagaagttcctgggcatcacccccttcctgaactacaccagaaccctgagattcgacgacgacaagggcttctggtgccagggcctggagggcggcaagaccagatgcctgggcagaagcaagggcagaagataccccgacatggacaccgaggtgagcaaggccagaggcagaggcatccccctgcacttccaggacctgatcctgtgccccaccagctaccacttctgctag

SEQ ID NO: 283340 - protein, 557 aa, Artificial Sequence
  derived and/or modified sequence
MGGQITRSTLHDSIGGPFPVTSHRCHHKQKHCPAVLPSGGLPATPLLFHPHTKGSQILMDLSHKAVKRQASFCNAITFSNRPVLIYEQVRLKITKKQCCWSGALRLGFTSKDPSRIHPDSLPKYACPDLVSQSGFWAKALPEEFANEGNIIAFWVDKKGRVFHRINDSAVMLFFSGVRTADPLWALVDVYGLTRGVQLLDSELVLPDCLRPRSFTALRRPSLRREADDARLSVSLCDLNVPGADGDEAAPAAGCPIPQNSLNSQHSRALPAQLDGDLRFHALRAGAHVRILDEQTVARVEHGRDERALVFTSRPVRVAETIFVKVTRSGGARPGALSFGVTTCDPGTLRPADLPFSPEALVDRKEFWAVCRVPGPLHSGDILGLVVNADGELHLSHNGAAAGMQLCVDASQPLWMLFGLHGTITQIRILGSTILAERGIPSLPCSPASTPTSPSALGSRLSDPLLSTCSSGPLGSSAGGTAPNSPVSLPESPVTPGLGQWSDECTICYEHAVDTVIYTCGHMCLCYACGLRLKKALHACCPICRRPIKDIIKTYRSS

SEQ ID NO: 283341 - protein, 199 aa, Artificial Sequence
  derived and/or modified sequence
MGGQITRSTLHDSIGGPFPVTSHRCHHKQKHCPAVLPSGGLPATPLLFHPHTKGSQILMDLSHKAVKRQASFCNAITFSNRPVLIYEQVRLKITKKQCCWSGALRLGFTSKDPSRIHPDSLPKYACPDLVSQSGFWAKALPEEFANEGNIIAFWVDKKGRVFHRINDSAVMLFFSGVRTADPLWALVDVYGLTRGVQLL

SEQ ID NO: 283342 - protein, 108 aa, Artificial Sequence
  derived and/or modified sequence
MDLSHKAVKRQASFCNAITFSNRPVLIYEQVRLKITKKQCCWSGALRLGFTSKDPSRIHPDSLPKYACPDLVSQSGFWAKALPEEFANEGNIIAFWVDKKGRVFHRIN

SEQ ID NO: 283343 - DNA, 1674 bp, Artificial Sequence
  derived and/or modified sequence
atgggtggtcagatcacccgcagtaccctgcatgattctattggaggcccctttcctgtcacttcgcacagatgccatcacaaacagaaacactgtcccgccgtgctgccatctggtggcctgcctgccactccgctgctctttcacccacacaccaaaggtagccagatacttatggacctgagccacaaagccgtgaaaaggcaggcctctttttgcaacgcaatcactttctctaatcgtccagttttaatctatgagcaggttcggttaaagattacgaagaagcaatgttgttggagtggcgcattgagactgggtttcacgagcaaggatccaagtcgcattcatcccgattctcttcctaagtacgcttgcccggatctcgtgtcacagtccgggttctgggctaaagccctccccgaggaatttgcgaatgaaggaaatatcatagctttttgggtggacaaaaagggtagagttttccacagaatcaatgactctgcagtaatgcttttttttagtggcgtgaggaccgctgaccctttatgggccctggtggacgtctatgggttaacgcgcggggtccagctgctggattcagaactcgtgctgccggattgtctccgaccaaggtcttttaccgcactcagaagacctagcttacgccgcgaggcagacgatgctcggctttccgtaagtctgtgcgacctcaatgtacccggggccgacggagatgaagctgctccagccgccgggtgtcccatcccgcagaattccttaaactcacagcactcccgggccctgcccgctcagctggatggcgatctcagatttcacgctctgcgcgccggcgctcacgtgagaattctggacgaacaaactgttgcacgcgtagaacatggcagagacgaacgggccttggtgtttacttccaggcctgttcgtgtagctgaaaccatttttgtgaaagttactcgttctggcggtgctcgccctggcgctttgtcatttggagtgaccacatgtgatcccggaacgcttcgtcccgctgatctgcccttcagcccggaggctctagtggaccgtaaggagttctgggctgtgtgtagggtccccggtcctctccactctggtgacatactgggactggtggtcaatgcagatggggaattgcacctaagccacaatggggctgcagctggaatgcaactttgtgtagatgcaagtcaaccgctgtggatgttatttgggctccacgggaccatcactcagatccgcatcctcggctctaccattctcgccgaaagaggtattccatcactgccatgcagccctgcaagcactcctacgtctcccagcgcgttaggatcccgactgtcagatccactcctcagcacctgctcctccggccctcttggctcctctgccggaggtactgcaccgaactctccagtaagcctgcccgagagcccagttacaccgggcctcggacagtggagcgacgaatgcactatctgctacgagcacgccgtcgatacggtgatctacacatgtggtcatatgtgtctgtgttatgcctgtgggctgaggctgaaaaaagctctccacgcctgttgtcccatctgccggcgacctatcaaggacatcatcaagacttaccggtcgtcctag

SEQ ID NO: 283344 - DNA, 600 bp, Artificial Sequence
  derived and/or modified sequence
atgggagggcagatcacccggagtacgctgcacgattctatcggaggcccattccccgtgacgtctcaccgctgccaccacaagcagaagcactgtcccgccgttcttcccagtggcgggcttcctgcaactccactcttattccatccacacacgaaagggagccagattctgatggacctttcccataaagctgtgaagcgccaggcatcattctgcaatgccataactttcagcaaccgccccgtgttaatctatgagcaggtgagactgaaaatcacaaaaaagcagtgttgctggagcggggcactacgcttaggttttacgagcaaggatccctctaggatccatcctgacagcttgccaaaatacgcttgtccggacctcgtgtcccagtctggtttttgggcaaaagcactgcccgaagagttcgctaatgaaggcaatataattgcattttgggtcgacaagaagggaagggtttttcacaggatcaatgacagtgccgtgatgctgttttttagtggagtccgcacagctgatcctctgtgggccctcgtcgatgtttatggccttacgcgaggagtgcagctgctgtag

SEQ ID NO: 283345 - DNA, 1674 bp, Artificial Sequence
  derived and/or modified sequence
atgggcggccagatcaccaggagcaccctgcatgacagcatcggcggccccttccctgtgaccagccaccgctgccaccacaagcagaagcactgcccagctgtgctgcccagcggcggcctgcctgccacccccctgctcttccacccccacaccaagggcagccagatcctgatggacctgagccacaaggctgtgaagaggcaggccagcttctgcaatgccatcaccttcagcaacagacctgtgctgatctatgagcaggtgcggctgaagatcaccaagaagcagtgctgctggagcggggccctgcggctgggcttcaccagcaaggaccccagccgcatccacccagacagcctgcccaagtatgcctgcccagacctggtgtcccagagcggcttctgggccaaggccctgcctgaggagtttgccaatgaaggcaacatcatcgccttctgggtggacaagaagggccgggtcttccaccgcatcaatgacagcgctgtgatgctgttcttctctggagtgaggacagctgaccccctgtgggccctggtggatgtgtatggcctgacccggggcgtgcagctgctggacagcgagctggtgctgcctgactgcctgcggcccaggagcttcaccgccctgcggcggcccagcctgcggcgggaggctgatgatgcccggctgtctgtgtccctgtgtgacctgaatgtgcctggagcagatggagatgaggccgccccagctgctggctgccccatcccccagaacagcctgaacagccagcacagccgggccctgcctgcccagctggatggagacctgcgcttccacgccctgcgggccggggcccacgtgcgcatcctggatgagcagacagtggcccgggtggagcacggcagagatgagcgggccctggtgttcaccagcaggcctgtgcgggtggccgagaccatctttgtgaaggtgaccaggtctgggggcgcccggcctggggccctgagctttggagtgaccacctgtgaccccggcaccctgcggcctgctgacctgcccttcagccctgaggccctggtggacaggaaggagttctgggccgtgtgccgggtgcccggccccctgcacagcggggacatcctgggcctggtggtgaatgctgatggagagctgcacctgagccacaatggagctgctgctggcatgcagctgtgtgtggatgccagccagcccctgtggatgctgtttggcctgcacggcaccatcacccagatccgcatcctgggcagcaccatcctggccgagcggggcatccccagcctgccctgcagccctgccagcacccccaccagccccagcgccctgggcagccggctgagtgaccccctgctgagcacctgcagcagcggccccctgggcagcagcgctgggggcacagcccccaacagccctgtgtccctgcctgagagccctgtgaccccaggcctgggccagtggagcgatgaatgtaccatctgctatgagcacgctgtggacaccgtcatctacacctgtggccacatgtgcctgtgctacgcctgtggcctgcggctgaagaaggccctgcacgcctgctgccccatctgccggcggcccatcaaggacatcatcaagacctaccgcagcagctag

SEQ ID NO: 283346 - DNA, 600 bp, Artificial Sequence
  derived and/or modified sequence
atgggcggccagatcaccaggagcaccctgcatgacagcatcggcggccccttccctgtgaccagccaccgctgccaccacaagcagaagcactgcccagctgtgctgcccagcggcggcctgcctgccacccccctgctcttccacccccacaccaagggcagccagatcctgatggacctgagccacaaggctgtgaagaggcaggccagcttctgcaatgccatcaccttcagcaacagacctgtgctgatctatgagcaggtgcggctgaagatcaccaagaagcagtgctgctggagcggggccctgcggctgggcttcaccagcaaggaccccagccgcatccacccagacagcctgcccaagtatgcctgcccagacctggtgtcccagagcggcttctgggccaaggccctgcctgaggagtttgccaatgaaggcaacatcatcgccttctgggtggacaagaagggccgggtcttccaccgcatcaatgacagcgctgtgatgctgttcttctctggagtgaggacagctgaccccctgtgggccctggtggatgtgtatggcctgacccggggcgtgcagctgctgtag

SEQ ID NO: 283347 - DNA, 1674 bp, Artificial Sequence
  derived and/or modified sequence
atgggcggccagatcacccggagcaccctgcacgacagcatcggcggccctttccctgtgacatctcaccgatgccatcataaacagaaacactgtcccgcagttcttcccagtgggggactaccagcaactccactactttttcatccacacaccaagggcagccagatcctgatggacttatctcataaggcagtaaagcggcaggccagcttttgcaacgcaattacgttcagcaaccgccctgtgttgatatacgagcaggtgcgcttaaaaattaccaaaaaacagtgttgttggtcaggagccctccgactgggtttcacctccaaagaccctagccgaattcaccctgattctctgccgaagtatgcctgtcctgatttggtctcgcagtccgggttttgggcaaaggctcttcctgaagaatttgccaacgagggcaatataatcgcattctgggtggacaaaaagggtcgcgtattccatagaatcaacgacagcgctgtgatgctcttcttctcaggagtccgcaccgccgaccctctgtgggctctggtggatgtgtacggcttaactagaggcgtacagttgctggactctgaactggtcctgccagactgtctacgccccagaagcttcacagctctacgtagaccatcgctccgccgggaggctgacgatgcaagactgagcgtctccctatgcgacctcaatgtgcccggcgctgatggtgatgaggccgctccagccgcaggctgtccgattccccagaactctttaaattcacagcattccagggcccttcccgcacagttggacggcgacttgcgcttccacgcgctgagggcaggagcccatgtcagaatcctcgacgagcaaaccgttgcgcgcgtggagcacggaagagacgaaagggctctcgtgttcactagtagacccgtgagggtggcagagaccatcttcgtgaaggtgacgcggtcgggtggtgctcggccaggagcactgtctttcggtgtcaccacttgcgatcctggcacattaaggccagctgaccttcccttttcgcccgaagccttagtggaccggaaggagttttgggccgtatgtcgcgtgccagggccgcttcactccggagatatcctgggccttgtagtgaatgccgacggcgagctccacctgtcacataatggcgcagcggccggaatgcagctttgtgtggatgcctcacagcccctgtggatgctctttgggctccacggcactatcactcagattcgcattctgggcagtaccatcctcgctgagcggggtattccatctttaccctgcagtccggcctcgacacccacctctccctccgccctgggaagcaggctaagtgatccacttctttccacatgttcctctgggcctctcggatcaagtgcgggagggacggctcctaattcacctgtgtccctcccagagtctcccgtaactccgggactcggccagtggtctgacgagtgtaccatttgctacgagcacgcggtggataccgtgatctacacctgcgggcatatgtgtctgtgctatgcatgcggcctcaggctgaaaaaggcactgcacgcctgctgtccaatttgccggagacctattaaagacattatcaaaacttacagatcctcctag

SEQ ID NO: 283348 - DNA, 600 bp, Artificial Sequence
  derived and/or modified sequence
atgggcggccagatcacccggagcaccctgcacgacagcatcggcgggccattccctgtcactagccatcgctgtcaccataagcaaaagcactgtccggctgtgctgcccagcggaggactgcctgctacccctttgttgtttcatcctcacaccaagggttctcagatactaatggatctctctcacaaggctgtgaaacggcaggcatccttttgtaatgctataacattctccaatagacccgtgctgatctatgagcaagtccgcctaaaaatcaccaagaagcaatgctgctggtctggcgccctaaggctaggttttacttccaaggacccatctcgcatccatcccgactctctgcctaagtacgcctgcccagatctggtcagtcaatctggattctgggctaaagccctgcctgaggaatttgctaatgagggtaatattatcgcattttgggtggataaaaagggccgtgtttttcaccgcataaacgattccgctgtcatgttgtttttctccggtgttcgtaccgctgacccactgtgggctctagtcgacgtgtacggtctgacccgcggggtgcaacttctgtag

SEQ ID NO: 283349 - DNA, 3854 bp, Artificial Sequence
  derived and/or modified sequence
atggggggacagatcacccggagcactctccacgactctatcgggggccccttccccgtcacttctcaccgatgccaccacaagcagaagcactgtccggcagtgctgcccagcggggggctcccagccacgccgctgctcttccacccgcacaccaagggctcccagatcctcatggacctcagccacaaggctgtcaagaggcaggccagcttctgcaacgccatcaccttcagcaaccgcccggtcctcatctacgagcaagtcaggctgaagatcaccaagaagcagtgctgctggagcggggccctgcggctgggcttcaccagcaaggacccgtcccgcatccaccctgactcgctgcccaagtacgcctgccccgacctggtgtcccagagtggcttctgggccaaggcgctgcctgaggagtttgccaatgagggcaacatcatcgcattctgggtggacaagaagggccgtgtcttccaccgcatcaacgactcggctgttatgctgttcttcagcggggtccgcacggccgacccgctctgggccctggtggacgtctacggcctcacgcggggcgtccagctgcttgatagcgagctggtgctcccggactgtctgcggccgcgctccttcaccgccctgcggcggccgtcgctgcggcgcgaggcggacgacgcgcgcctctcggtgagcctatgcgacctcaacgtgccgggcgcggacggcgacgaggccgcgccggccgccggctgccccatcccgcagaactcactcaactcgcagcacagccgcgcgctgccggcgcagctcgacggcgacctgcgtttccacgccctgcgcgccggcgcgcacgtccgcatcctcgacgagcagacggtggcgcgcgtggagcacgggcgcgacgagcgcgcgctcgtcttcaccagccggcccgtgcgcgtggccgagaccatcttcgtcaaggtcacgcgctcgggtggcgcgcggcccggcgcgctgtcgttcggcgtcaccacgtgcgaccccggcacgctgcggccggccgacctgcctttcagccctgaggccctggtggaccgcaaggaattctgggccgtgtgccgcgtgcccgggcccctgcacagcggcgacatcctgggcctggtggtcaacgccgacggcgagctgcacctcagccacaatggcgcggccgccggcatgcagctgtgcgtggacgcctcgcagccgctttggatgctcttcggcctgcacgggaccatcacgcagatccgcatcctcggctccactatcctggccgagcggggtatcccatcactcccctgctcccctgcctccacgccaacctcgcccagtgccctgggcagccgcctgtctgaccccttgctcagcacgtgcagctctggccctctgggtagctctgctggtgggacagcccccaattcgccagtgagcctgcccgagtcgccagtgaccccaggtctgggccagtggagcgatgagtgcaccatttgctatgaacacgcggtggacacggtcatctacacatgtggccacatgtgcctctgctacgcctgtggcctgcgcctcaagaaggctctgcacgcctgctgccccatctgccgccgccccatcaaggacatcatcaagacctaccgcagctcctagcccgttgcggtggcccatcccgcatacccatcttctcgggcttcagcccagtcccagctgaggaacaagccagtggggccccttctcttcctcattttggaaacttttcctcctctattaaacatgggaaactgaagcccttgaaggtttggggagaggggggtatcaggcagggagggggcagaggcaaatcaccgggcagagggaggggaggagaggaggccgcactctccctgtctctcccgtctctgcacccagctcctctctgcatgctgagggctaaattgggatctcagcctgccctaatctttccccatctgaggcaggtttctaggaggtgtctgtagtccatgtggcacctttgtgagaattagaaaacatgtaccttcctctgggcagctgcagccctgagccaggacatgtggcctggctagtgcagcatggagtggattttaggctcatttgccctctcagccaactgcccttgagcagtgtacagcctgctcaacaaccgccctgggcaggccgctcctgagctgctgtctccctctctgacctatgcctaccttctctttcttcgttccctgcccactgggcatggcagctgggggtgagaggctggtggttgcctcccgtcctgggcaggctgcagcctcatgccatgtctctctcccactacctgatgggcacatggacaggctgcagagggctccaggttctgggcccctggctgagaaggggaggatcctgtcctggctgtagccttcctgccccaatcatctcgctggatgccattgcccaggggtagcccttcggtatgggctggggagaagggttggtcttctgccagggtccctaagaacaggtttgcagctaccctctctgaccttttccccatatcttgtgctgtccagggcctaggctgatagtcagagcctgtggcacacctgggatgggccagggccctgggtggggaggtgtgggttccctgggccaagaccagcctttttcctcagtttaattaatttatttatttggtttgtggttttgggttttttttgtttgtttgtttgtaggtgagttcccatcctctgggcccctagaaatgctgcctttgtgtgtggggtacctgggaaagggtgtggctgaggcagtcataatgcagtatcttcccctgactccagccacaaagctcatacccagccctaccaatcatgaactggaactccataaggaggggccaaattgggaggccttttggcaaacagtgtctattttacagagaggcaaaccaagcctccttagtgccctggggctgatggtcacccagagccatagagcacccttcctcctgggccagagctgggttatcatggttggcttaggtacctcaggtggcccaggaggtcccccctccataaggacgtcaaacttccaggagggccagtgttcctagtgtgggccaggaacaggacagggagaccttgtgatggcggggcagggagcctgttcgtagggaagatgaggaggcaagggctgcctctcacacctccaggttctctaagttctggggagggagcgccccacctgctgaggtcggtcctctcagccctgcctgccctggcctgggctctcccagcctcccagccctctgccccctcagatggctttttgtttttgtttttttttgcatccatcagagactgcacctctgtgtggcaggcagggcatgggttttagtcctggccactgaccagctgtgtggccctggccgagtcgtagccccctggagcccagcttccatttctataaaatggttgtttcgggagagaggggcaggctttctgtgtgactcgggagttcttccgtgagggctgccagggggtggtgtgccaggacctcaggctgggcctttgtgctggccttgcagtgggtgtgtggggaagtcactgtcccactatgggtctccactacccagtcactgaccctgggagaccccttctgtgtgggagggagcgggggctggctagcgggccccccagccagggatcccagaggctgagggttggggagaggaagccatcatctcattacctctgtcagtgcaggggtggctgctgcttcccttgtgcacttgggtcgctgtgattgtgaataaaagtgatttcgtaccagcctga

SEQ ID NO: 283350 - DNA, 746 bp, Artificial Sequence
  derived and/or modified sequence
gggggcgcgggaggggcctcggccctgccatgccggtctccgcccgcgggggaggagacgggggaggaggaggggagcagccggccggggcgactcggtgaccagccggccggcccagcagaggtggctgcactgcccgtcgccggagatggggggacagatcacccggagcactctccacgactctatcgggggccccttccccgtcacttctcaccgatgccaccacaagcagaagcactgtccggcagtgctgcccagcggggggctcccagccacgccgctgctcttccacccgcacaccaagggctcccagatcctcatggacctcagccacaaggctgtcaagaggcaggccagcttctgcaacgccatcaccttcagcaaccgcccggtcctcatctacgagcaagtcaggctgaagatcaccaagaagcagtgctgctggagcggggccctgcggctgggcttcaccagcaaggacccgtcccgcatccaccctgactcgctgcccaagtacgcctgccccgacctggtgtcccagagtggcttctgggccaaggcgctgcctgaggagtttgccaatgagggcaacatcatcgcattctgggtggacaagaagggccgtgtcttccaccgcatcaacgactcggctgttatgctgttcttcagcggggtccgcacggccgacccgctctgggccctggtggacgtctacggcctcacgcggggcgtccagctgcttg

SEQ ID NO: 283351 - DNA, 1674 bp, Artificial Sequence
  derived and/or modified sequence
atgggtggacagatcactcgcagcacccttcacgactccatcgggggaccatttccggtcacaagtcataggtgccatcataaacagaaacactgcccagccgtcctcccatcaggcggactgcccgctacaccgctcctcttccatccccataccaaggggagtcagattttaatggatctgtcacataaggctgttaaacgccaagcttctttctgtaatgccataaccttctctaataggccagtgttgatttacgaacaggtcaggttgaagatcaccaagaagcagtgctgctggtcaggcgcactgcgactagggtttacctcaaaggatccttctcgcatccacccagatagccttccaaagtatgcatgcccagaccttgtctcccaatcaggtttctgggccaaggccctccctgaggagtttgcaaacgaagggaatatcatcgccttctgggtcgacaaaaagggtcgggtctttcaccgcatcaatgattccgccgtaatgctgtttttcagcggtgtcagaacagccgatcccctgtgggcattagttgatgtttatggattgaccagaggtgtccaattgttagactctgagctggttctgcctgactgtctgcgtcctaggagctttaccgccctgcgcagaccgagcctgcgacgcgaggcagacgatgccaggctgagcgtgagtctctgcgatctcaatgtgccaggggcagatggtgacgaggcggcacctgccgcagggtgtccaattccacagaactcactaaatagtcagcattcacgagccctgccggcacagttggacggcgacctgaggtttcacgccctgagagccggagcacacgtgcgcatcctcgacgagcagaccgtagcaagggtcgagcacggtagagatgaaagagctcttgttttcacctccaggccagttagggtcgccgaaacaatttttgtcaaagtgacgagatcaggcggagccaggccaggggcactttcctttggtgtgaccacctgcgatccgggaacattacgcccagctgaccttccattcagtcccgaggcactggttgaccgaaaagaattctgggccgtctgccgggtgcccggacctctgcatagcggcgacatcctgggcttggtagttaacgctgacggggaattgcacctgtcacacaatggcgctgctgccggaatgcagctttgtgtggacgcgtcccagccactgtggatgctctttgggctgcacggaaccatcacacaaatccggattctggggagcactatcctggcggaaagaggaatcccatcccttccctgcagccctgcgagtacccccactagcccttccgctctgggatcaagattgagtgacccgctgctgtcaacttgttctagcggaccgctggggtcgtccgctggaggtactgccccaaactcccctgtttctttgccagagtcaccagttacccctggacttggccagtggagtgacgaatgcacaatttgctacgaacacgccgtggacaccgtgatctacacatgtgggcacatgtgcctctgttacgcctgcggactgcgccttaagaaagctctgcatgcatgctgtccaatctgtagaagacctatcaaagacattataaagacctacaggtcctcctag

SEQ ID NO: 283352 - DNA, 600 bp, Artificial Sequence
  derived and/or modified sequence
atggggggtcagatcacaagaagtactctgcatgatagcattggcggaccgttccctgtaacaagtcatcgctgccaccacaaacagaaacattgtcctgcagtcctgccctccggcggacttccagccacgccacttctctttcatcctcataccaagggatcacagatcctgatggacttatcccacaaggccgtgaaaaggcaggcctccttttgcaacgccatcaccttctcaaataggccagtcctgatctacgagcaggttaggttaaagattacaaagaaacagtgctgctggtctggagccttacggctgggattcacctcaaaagatcccagtaggatccatcccgatagcctacctaagtacgcgtgcccagacctagtgtctcagtctggcttttgggcgaaggcccttccagaggaattcgccaatgaggggaacattatcgcattctgggttgacaaaaaaggcagggtgtttcatcggattaacgacagcgccgttatgctgtttttttcaggcgtgagaactgcagatccgctctgggctcttgtcgacgtttatggacttactcgcggagtgcagctgctctag

SEQ ID NO: 283353 - DNA, 1674 bp, Artificial Sequence
  derived and/or modified sequence
atgggcggccagatcaccagaagcaccctgcacgacagcatcggcggccccttccccgtgaccagccacagatgccaccacaagcagaagcactgccccgccgtgctgcccagcggcggcctgcccgccacccccctgctgttccacccccacaccaagggcagccagatcctgatggacctgagccacaaggccgtgaagagacaggccagcttctgcaacgccatcaccttcagcaacagacccgtgctgatctacgagcaggtgagactgaagatcaccaagaagcagtgctgctggagcggcgccctgagactgggcttcaccagcaaggaccccagcagaatccaccccgacagcctgcccaagtacgcctgccccgacctggtgagccagagcggcttctgggccaaggccctgcccgaggagttcgccaacgagggcaacatcatcgccttctgggtggacaagaagggcagagtgttccacagaatcaacgacagcgccgtgatgctgttcttcagcggcgtgagaaccgccgaccccctgtgggccctggtggacgtgtacggcctgaccagaggcgtgcagctgctggacagcgagctggtgctgcccgactgcctgagacccagaagcttcaccgccctgagaagacccagcctgagaagagaggccgacgacgccagactgagcgtgagcctgtgcgacctgaacgtgcccggcgccgacggcgacgaggccgcccccgccgccggctgccccatcccccagaacagcctgaacagccagcacagcagagccctgcccgcccagctggacggcgacctgagattccacgccctgagagccggcgcccacgtgagaatcctggacgagcagaccgtggccagagtggagcacggcagagacgagagagccctggtgttcaccagcagacccgtgagagtggccgagaccatcttcgtgaaggtgaccagaagcggcggcgccagacccggcgccctgagcttcggcgtgaccacctgcgaccccggcaccctgagacccgccgacctgcccttcagccccgaggccctggtggacagaaaggagttctgggccgtgtgcagagtgcccggccccctgcacagcggcgacatcctgggcctggtggtgaacgccgacggcgagctgcacctgagccacaacggcgccgccgccggcatgcagctgtgcgtggacgccagccagcccctgtggatgctgttcggcctgcacggcaccatcacccagatcagaatcctgggcagcaccatcctggccgagagaggcatccccagcctgccctgcagccccgccagcacccccaccagccccagcgccctgggcagcagactgagcgaccccctgctgagcacctgcagcagcggccccctgggcagcagcgccggcggcaccgcccccaacagccccgtgagcctgcccgagagccccgtgacccccggcctgggccagtggagcgacgagtgcaccatctgctacgagcacgccgtggacaccgtgatctacacctgcggccacatgtgcctgtgctacgcctgcggcctgagactgaagaaggccctgcacgcctgctgccccatctgcagaagacccatcaaggacatcatcaagacctacagaagcagctag

SEQ ID NO: 283354 - DNA, 600 bp, Artificial Sequence
  derived and/or modified sequence
atgggcggccagatcaccagaagcaccctgcacgacagcatcggcggccccttccccgtgaccagccacagatgccaccacaagcagaagcactgccccgccgtgctgcccagcggcggcctgcccgccacccccctgctgttccacccccacaccaagggcagccagatcctgatggacctgagccacaaggccgtgaagagacaggccagcttctgcaacgccatcaccttcagcaacagacccgtgctgatctacgagcaggtgagactgaagatcaccaagaagcagtgctgctggagcggcgccctgagactgggcttcaccagcaaggaccccagcagaatccaccccgacagcctgcccaagtacgcctgccccgacctggtgagccagagcggcttctgggccaaggccctgcccgaggagttcgccaacgagggcaacatcatcgccttctgggtggacaagaagggcagagtgttccacagaatcaacgacagcgccgtgatgctgttcttcagcggcgtgagaaccgccgaccccctgtgggccctggtggacgtgtacggcctgaccagaggcgtgcagctgctgtag

SEQ ID NO: 283355 - protein, 325 aa, Artificial Sequence
  derived and/or modified sequence
MQETPSSANGPSREGSRLPPAREGHPVYPQLRPGYIPIPVLHEGAENRQVHPFHVYPQPGMQRFRTEAAAAAPQRSQSPLRGMPETTQPDKQCGQVAAAAAAQPPASHGPERSQSPAASDCSSSSSSASLPSSGRSSLGSHQLPRGYISIPVIHEQNVTRPAAQPSFHQAQKTHYPAQQGEYQTHQPVYHKIQGDDWEPRPLRAASPFRSSVQGASSREGSPARSSTPLHSPSPIRVHTVVDRPQPMTHRETAPVSQPENKPESKPGPVGPELPPGHIPIQVIRKEVDSKPVSQKPPPPSEKVEVKVPPAPVPCPPPSPGPSAVP

SEQ ID NO: 283356 - DNA, 978 bp, Artificial Sequence
  derived and/or modified sequence
atgcaggagaccccaagcagcgccaatggcccaagccgagagggaagccgcctgcctcccgcccgagagggccacccagtttatcctcagctacgaccgggctacattccgattcccgtattacatgagggtgctgagaacagacaggtgcaccccttccatgtgtaccctcaacctggcatgcagcgattccgcacagaggccgccgctgccgcgcctcaacggtcacagtccccattgagggggatgcccgagactacccagccagataaacaatgcggtcaggttgccgcagccgccgccgcacaacccccagcctcacatggccctgagaggagtcaaagccccgccgccagtgattgcagtagttcttctagctcggcaagccttccctcttccggacggtcgtcacttggaagccatcagctgccaaggggctatatcagcattcccgtgatacatgagcagaacgtgacaagacccgcggcccagccaagctttcatcaggcacagaaaacccactacccagctcaacaaggtgaataccagactcatcaacccgtttatcataaaatacagggggacgattgggagccccgtcctctgagggccgcatcacccttcaggtcttctgtccaaggtgcttcctcaagggagggcagtcccgcgcgctcctctactccacttcacagcccttcaccgattcgagtgcacaccgtagttgatcgcccccagccaatgacacaccgtgagaccgctccagtgagccagcccgagaacaaaccggagagcaaaccaggccctgtaggtcccgagctgcctccgggtcatatcccaatccaggttattcgcaaggaagtcgactctaaaccagtctcacagaaaccccccccaccttccgagaaagtggaagtgaaagtgcctccagcacccgtgccctgcccaccgccttcgcctgggccatctgcagtcccctag

SEQ ID NO: 283357 - DNA, 978 bp, Artificial Sequence
  derived and/or modified sequence
atgcaggagacccccagcagcgccaacggccccagccgggagggcagccggctgcccccagcccgggagggccaccctgtgtacccccagctgcggcccggctacatccccatccctgtgctgcacgagggcgctgagaaccggcaggtgcaccccttccacgtgtacccccagcccggcatgcagcgcttcagaacagaggccgctgctgctgccccccagaggagccagagccccctgcggggcatgcctgagaccacccagcctgacaagcagtgtggccaggtggccgctgctgctgctgcccagcccccagccagccacggccctgagaggagccagagccctgctgccagtgactgcagcagcagcagcagcagcgccagcctgcccagcagcggccgcagcagcctgggcagccaccagctgccccggggctacatcagcatccctgtgatccacgagcagaatgtgaccaggcctgctgcccagcccagcttccaccaggcccagaagacccactacccagcccagcagggcgagtaccagacccaccagcctgtgtaccacaagatccagggagatgactgggagccccggcccctgcgggccgccagccccttccgcagctctgtgcagggcgccagcagccgggagggcagccctgcccggagcagcacccccctgcacagccccagccccatccgggtgcacacagtggtggaccggccccagcccatgacccaccgggagacagcccctgtgtcccagcctgagaacaagccagagagcaagccaggccctgtgggccctgagctgcccccaggccacatccccatccaggtgatcaggaaggaggtggacagcaagcctgtgtcccagaagcccccaccacccagcgagaaggtggaggtgaaggtgcccccagcccctgtgccctgccccccacccagccctggccccagcgctgtgccctag

SEQ ID NO: 283358 - DNA, 978 bp, Artificial Sequence
  derived and/or modified sequence
atgcaggagacccccagcagcgccaacggccccagccgggagggctctcgcctacccccagcaagagaaggtcatccagtatacccccaactgagacccggctatatcccaattcccgtgttgcatgagggcgccgaaaacagacaagtgcatcctttccacgtttatccacaaccaggaatgcagcggtttcggactgaggcagcagccgcagccccgcagagaagccagtcacccttgcgtggtatgcccgagactacacaacccgacaaacaatgtggccaggtggctgccgccgctgctgcccagccacccgctagccacggtccagagagaagtcagagccccgccgcatctgactgttcctcatcctcttcctctgcctccttaccaagcagtgggcggtcaagcctcggatctcaccagctgcccagagggtacatttcaatccctgtaatccatgagcaaaacgtcacaaggcctgctgcgcagccttcgtttcatcaggcacagaaaacacactaccccgcacaacagggcgagtatcagacccaccagcccgtgtaccacaagattcagggagacgactgggagccacggcctctgcgcgcagccagccccttccggtcttccgtgcagggtgcatctagtcgcgaagggagcccggcccggtcaagcacccctctgcattcaccaagccccatcagagtgcatacggttgtggaccgcccccagccgatgacgcacagggaaactgccccagtgtctcagcccgaaaataaacccgagagcaaaccggggccggtaggaccagagctgcctcccggccatatacccatccaggtgatcagaaaagaggtcgatagcaagcccgtgagccaaaaacccccaccgccttcagaaaaggtcgaagtgaaggttccccccgcccccgtgccatgccctcccccaagccccggccctagcgctgtcccgtag

SEQ ID NO: 283359 - DNA, 978 bp, Artificial Sequence
  derived and/or modified sequence
atgcaggaaacgccctcgtcagctaatggaccgtcccgcgaagggtcaagactgcccccagcccgtgaaggccaccctgtgtaccctcagctgagaccaggctatatcccaatcccagtgctacacgagggggcagaaaataggcaggtgcacccatttcacgtctaccctcagcccggaatgcagcggtttaggaccgaggccgcagctgctgcccctcagcgatcacagtcgcctttacggggtatgccagagaccacccagccggataaacagtgtgggcaggtggccgctgcggctgccgctcaaccacctgcctcccacggaccagagcgcagccagagtcccgctgcatccgactgtagctctagtagctcttccgccagcctgccatcgtccggacgcagttccctgggctctcaccaattgcctagggggtatatcagcatccctgtgatccacgaacagaacgttactcgcccagcggcacaaccatcgttccaccaggcacagaaaactcactatcctgctcaacagggggaataccagactcatcagcctgtttatcacaaaatccaaggggacgactgggagcccaggcccctccgcgcagcttcaccctttagaagcagcgtccaaggggcttcctctcgagagggttctcctgcaagatccagcactccgttgcattccccctctcccattcgggttcatacagtagttgatagaccacagccaatgacacaccgcgagacagcacccgtcagtcaaccagaaaataagccggagtccaagcccggtcctgtaggccctgaactcccaccgggtcacatccccattcaagtgatcaggaaggaggtcgatagcaagccagtatctcagaagcccccacctcccagcgagaaggtggaagtgaaggtgcctcccgctccggtaccttgccccccaccttctccaggtcctagcgctgttccatag

SEQ ID NO: 283360 - DNA, 1146 bp, Artificial Sequence
  derived and/or modified sequence
tcatgtggcacatgtgataccatgtgaggtatctggtgttactaagtcgtcacgtatttcgatgaagggtccacaggctcagaaaagatggaacgagtgactgtggagaagggtagaacatgggcctgcccagagcgcgaaggcagatacagaagagctgcccgtgaaggatgcaggagactccatcctctgccaatggcccttcccgggagggctctaggctgccgcctgctagggaaggccaccctgtgtacccccagctccgaccaggctacattcccattcctgtgctccatgaaggcgctgagaaccggcaggtgcaccctttccatgtctatccccagcctgggatgcagcgattccgaactgaggcggcagcagcggctcctcagaggtcccagtcacctctgcggggcatgccagaaaccactcagccagataaacagtgtggacaggtggcagcggcggcggcagcccagcccccagcctcccacggacctgagcggtcccagtctccagctgcctctgactgctcatcctcatcctcctcggccagcctgccttcctccggcaggagcagcctgggcagtcaccagctcccgcgggggtacatctccattccggtgatacacgagcagaacgttacccggccagcagcccagccctccttccaccaagcccagaagacgcactacccagcgcagcagggggagtaccagacccaccagcctgtgtaccacaagatccagggggatgactgggagccccggcccctgcgggcggcatccccgttcaggtcatctgtccagggtgcatcgagccgggagggctcaccagccaggagcagcacgccactccactccccctcgcccatccgtgtgcacaccgtggtcgacaggcctcagcccatgacccatcgagaaactgcacctgtttcccagcctgaaaacaaaccagaaagtaagccaggcccagttggaccagaactccctcctggacacatcccaattcaagtgatccgcaaagaggtggattctaaacctgtttcccagaagcccccacctccctctgagaaggtagaggtgaaagttccccctgctccagttccttgtcctcctcccagccctggcccttctgctgtcccct

SEQ ID NO: 283361 - DNA, 978 bp, Artificial Sequence
  derived and/or modified sequence
atgcaggagacccccagcagcgccaacggccccagcagagagggcagcagactgccccccgccagagagggccaccccgtgtacccccagctgagacccggctacatccccatccccgtgctgcacgagggcgccgagaacagacaggtgcaccccttccacgtgtacccccagcccggcatgcagagattcagaaccgaggccgccgccgccgccccccagagaagccagagccccctgagaggcatgcccgagaccacccagcccgacaagcagtgcggccaggtggccgccgccgccgccgcccagccccccgccagccacggccccgagagaagccagagccccgccgccagcgactgcagcagcagcagcagcagcgccagcctgcccagcagcggcagaagcagcctgggcagccaccagctgcccagaggctacatcagcatccccgtgatccacgagcagaacgtgaccagacccgccgcccagcccagcttccaccaggcccagaagacccactaccccgcccagcagggcgagtaccagacccaccagcccgtgtaccacaagatccagggcgacgactgggagcccagacccctgagagccgccagccccttcagaagcagcgtgcagggcgccagcagcagagagggcagccccgccagaagcagcacccccctgcacagccccagccccatcagagtgcacaccgtggtggacagaccccagcccatgacccacagagagaccgcccccgtgagccagcccgagaacaagcccgagagcaagcccggccccgtgggccccgagctgccccccggccacatccccatccaggtgatcagaaaggaggtggacagcaagcccgtgagccagaagccccccccccccagcgagaaggtggaggtgaaggtgccccccgcccccgtgccctgccccccccccagccccggccccagcgccgtgccctag

SEQ ID NO: 283362 - protein, 1133 aa, Artificial Sequence
  derived and/or modified sequence
MLAYCVQDATVVDVEKRRNPSKHYVYIINVTWSDSTSQTIYRRYSKFFDLQMQLLDKFPIEGGQKDPKQRIIPFLPGKILFRRSHIRDVAVKRLKPIDEYCRALVRLPPHISQCDEVFRFFEARPEDVNPPKEDYGSSKRKSVWLSSWAESPKKDVTGADATAEPMILEQYVVVSNYKKQENSELSLQAGEVVDVIEKNESGWWFVSTSEEQGWVPATYLEAQNGTRDDSDINTSKTGEVSKRRKAHLRRLDRRWTLGGMVNRQHSREEKYVTVQPYTSQSKDEIGFEKGVTVEVIRKNLEGWWYIRYLGKEGWAPASYLKKAKDDLPTRKKNLAGPVEIIGNIMEISNLLNKKASGDKETPPAEGEGHEAPIAKKEISLPILCNASNGSAVGVPDRTVSRLAQGSPAVARIAPQRAQISSPNLRTRPPPRRESSLGFQLPKPPEPPSVEVEYYTIAEFQSCISDGISFRGGQKAEVIDKNSGGWWYVQIGEKEGWAPASYIDKRKKPNLSRRTSTLTRPKVPPPAPPSKPKEAEEGPTGASESQDSPRKLKYEEPEYDIPAFGFDSEPELSEEPVEDRASGERRPAQPHRPSPASSLQRARFKVGESSEDVALEEETIYENEGFRPYAEDTLSARGSSGDSDSPGSSSLSLTRKNSPKSGSPKSSSLLKLKAEKNAQAEMGKNHSSASFSSSITINTTCCSSSSSSSSSLSKTSGDLKPRSASDAGIRGTPKVRAKKDADANAGLTSCPRAKPSVRPKPFLNRAESQSQEKMDISTLRRQLRPTGQLRGGLKGSKSEDSELPPQTASEAPSEGSRRSSSDLITLPATTPPCPTKKEWEGPATSYMTCSAYQKVQDSEISFPAGVEVQVLEKQESGWWYVRFGELEGWAPSHYLVLDENEQPDPSGKELDTVPAKGRQNEGKSDSLEKIERRVQALNTVNQSKKATPPIPSKPPGGFGKTSGTPAVKMRNGVRQVAVRPQSVFVSPPPKDNNLSCALRRNESLTATDGLRGVRRNSSFSTARSAAAEAKGRLAERAASQGSDSPLLPAQRNSIPVSPVRPKPIEKSQFIHNNLKDVYVSIADYEGDEETAGFQEGVSMEVLERNPNGWWYCQILDGVKPFKGWVPSNYLEKKN

SEQ ID NO: 283363 - DNA, 3402 bp, Artificial Sequence
  derived and/or modified sequence
atgctggcctactgcgtgcaggacgccaccgtggtggacgtggagaagagaagaaaccccagcaagcactacgtgtacatcatcaacgtgacctggagcgacagcaccagccagaccatctacagaagatacagcaagttcttcgacctgcagatgcagctgctggacaagttccccatcgagggcggccagaaggaccccaagcagagaatcatccccttcctgcccggcaagatcctgttcagaagaagccacatcagagacgtggccgtgaagagactgaagcccatcgacgagtactgcagagccctggtgagactgcccccccacatcagccagtgcgacgaggtgttcagattcttcgaggccagacccgaggacgtgaacccccccaaggaggactacggcagcagcaagagaaagagcgtgtggctgagcagctgggccgagagccccaagaaggacgtgaccggcgccgacgccaccgccgagcccatgatcctggagcagtacgtggtggtgagcaactacaagaagcaggagaacagcgagctgagcctgcaggccggcgaggtggtggacgtgatcgagaagaacgagagcggctggtggttcgtgagcaccagcgaggagcagggctgggtgcccgccacctacctggaggcccagaacggcaccagagacgacagcgacatcaacaccagcaagaccggcgaggtgagcaagagaagaaaggcccacctgagaagactggacagaagatggaccctgggcggcatggtgaacagacagcacagcagagaggagaagtacgtgaccgtgcagccctacaccagccagagcaaggacgagatcggcttcgagaagggcgtgaccgtggaggtgatcagaaagaacctggagggctggtggtacatcagatacctgggcaaggagggctgggcccccgccagctacctgaagaaggccaaggacgacctgcccaccagaaagaagaacctggccggccccgtggagatcatcggcaacatcatggagatcagcaacctgctgaacaagaaggccagcggcgacaaggagaccccccccgccgagggcgagggccacgaggcccccatcgccaagaaggagatcagcctgcccatcctgtgcaacgccagcaacggcagcgccgtgggcgtgcccgacagaaccgtgagcagactggcccagggcagccccgccgtggccagaatcgccccccagagagcccagatcagcagccccaacctgagaaccagacccccccccagaagagagagcagcctgggcttccagctgcccaagccccccgagccccccagcgtggaggtggagtactacaccatcgccgagttccagagctgcatcagcgacggcatcagcttcagaggcggccagaaggccgaggtgatcgacaagaacagcggcggctggtggtacgtgcagatcggcgagaaggagggctgggcccccgccagctacatcgacaagagaaagaagcccaacctgagcagaagaaccagcaccctgaccagacccaaggtgcccccccccgccccccccagcaagcccaaggaggccgaggagggccccaccggcgccagcgagagccaggacagccccagaaagctgaagtacgaggagcccgagtacgacatccccgccttcggcttcgacagcgagcccgagctgagcgaggagcccgtggaggacagagccagcggcgagagaagacccgcccagccccacagacccagccccgccagcagcctgcagagagccagattcaaggtgggcgagagcagcgaggacgtggccctggaggaggagaccatctacgagaacgagggcttcagaccctacgccgaggacaccctgagcgccagaggcagcagcggcgacagcgacagccccggcagcagcagcctgagcctgaccagaaagaacagccccaagagcggcagccccaagagcagcagcctgctgaagctgaaggccgagaagaacgcccaggccgagatgggcaagaaccacagcagcgccagcttcagcagcagcatcaccatcaacaccacctgctgcagcagcagcagcagcagcagcagcagcctgagcaagaccagcggcgacctgaagcccagaagcgccagcgacgccggcatcagaggcacccccaaggtgagagccaagaaggacgccgacgccaacgccggcctgaccagctgccccagagccaagcccagcgtgagacccaagcccttcctgaacagagccgagagccagagccaggagaagatggacatcagcaccctgagaagacagctgagacccaccggccagctgagaggcggcctgaagggcagcaagagcgaggacagcgagctgcccccccagaccgccagcgaggcccccagcgagggcagcagaagaagcagcagcgacctgatcaccctgcccgccaccacccccccctgccccaccaagaaggagtgggagggccccgccaccagctacatgacctgcagcgcctaccagaaggtgcaggacagcgagatcagcttccccgccggcgtggaggtgcaggtgctggagaagcaggagagcggctggtggtacgtgagattcggcgagctggagggctgggcccccagccactacctggtgctggacgagaacgagcagcccgaccccagcggcaaggagctggacaccgtgcccgccaagggcagacagaacgagggcaagagcgacagcctggagaagatcgagagaagagtgcaggccctgaacaccgtgaaccagagcaagaaggccaccccccccatccccagcaagccccccggcggcttcggcaagaccagcggcacccccgccgtgaagatgagaaacggcgtgagacaggtggccgtgagaccccagagcgtgttcgtgagccccccccccaaggacaacaacctgagctgcgccctgagaagaaacgagagcctgaccgccaccgacggcctgagaggcgtgagaagaaacagcagcttcagcaccgccagaagcgccgccgccgaggccaagggcagactggccgagagagccgccagccagggcagcgacagccccctgctgcccgcccagagaaacagcatccccgtgagccccgtgagacccaagcccatcgagaagagccagttcatccacaacaacctgaaggacgtgtacgtgagcatcgccgactacgagggcgacgaggagaccgccggcttccaggagggcgtgagcatggaggtgctggagagaaaccccaacggctggtggtactgccagatcctggacggcgtgaagcccttcaagggctgggtgcccagcaactacctggagaagaagaactag

SEQ ID NO: 283364 - DNA, 3402 bp, Artificial Sequence
  derived and/or modified sequence
atgctagcatattgtgttcaggacgccaccgtggtggacgtcgaaaaacggaggaatccaagcaagcactacgtctacatcattaacgttacgtggtcagattccacttcccagaccatttatcggagatacagcaagtttttcgacctgcagatgcaactgctggataaatttccgatagaaggtggccagaaggatccgaagcagagaattatcccatttctgccaggtaagatcctattccggcgcagccatatacgggatgtcgccgtgaaacggctcaagcctattgatgaatattgtagagctttggtcaggctgccacctcatatctcccaatgtgacgaggtgtttcggtttttcgaagcccgcccggaagacgtcaaccctccgaaggaggactacggctcgtcaaaacggaaatcagtctggttgtcgtcatgggccgagtcccctaagaaggatgtgactggggccgatgccacggccgagccgatgatattggagcagtacgtcgtagttagcaactacaaaaaacaagaaaacagtgaactatctctgcaggccggcgaggtcgtcgacgtgatcgaaaagaatgagagtggttggtggttcgttagcaccagcgaagagcagggctgggtgccagccacttacctcgaagcccagaatggaactagagatgactcagatatcaacacatctaagaccggcgaagtgagcaaacgacgcaaagctcatctgcgcaggcttgaccgccgctggaccctgggtggcatggtaaaccgacagcattctagggaggaaaaatatgtgaccgtccagccatatactagccagtccaaagatgagatcgggtttgaaaagggcgttactgtggaagttattagaaaaaatctagagggatggtggtacattcggtatctgggcaaggaggggtgggcccccgcctcgtacctgaagaaggcaaaggatgacctcccaacccggaaaaaaaacctggctggaccagttgagataattggaaatattatggagatctcgaaccttctgaacaaaaaagccagcggtgataaggagacaccacccgctgagggggagggtcacgaggcccctatcgccaaaaaagagattagtttacctattctgtgtaacgcctcgaacggctcagccgtcggggtgccagatagaaccgtgagccgcctcgcccagggctcacccgcggtcgcaaggatagctcctcagcgagctcaaatctccagccccaaccttcgtacaagacctccaccccgtcgcgaatcatccctgggcttccagctgccaaagccaccagaaccaccctctgtcgaggtagaatactatacgattgctgagttccagtcttgcattagcgatgggatctctttccgcggtggacagaaggctgaagtgatcgataagaatagtggcggatggtggtatgtccagattggcgagaaagaaggatgggcgcctgcctcctatatcgataaacgcaaaaagcctaatctgtctagaaggacaagtaccctgacaagaccaaaagttcccccccccgcgcctcccagcaagcctaaggaggctgaagagggccctaccggggcctccgaaagtcaagactcacctagaaagctgaaatacgaagagcctgagtacgatattcccgccttcgggttcgactctgagcccgaactcagtgaggagcccgtggaagaccgggcctccggcgaaagacgcccagcccagcctcaccggccttcacccgcctcttccttacaacgcgcccggttcaaggtaggtgaatcgtctgaggacgttgccttggaagaggagacaatctatgaaaatgaaggattcagaccctatgctgaggataccctgtctgctcgtggctcctctggcgactccgacagccctggaagttcttccctcagcttgacccgtaagaatagcccgaaaagcggcagcccaaagagctcctctctcttaaagctgaaggctgaaaagaatgcccaggctgagatgggaaaaaatcactcatcagcgtcattttcatcaagtattactattaacacaacatgctgcagtagtagctcctcaagcagcagctcgctgtctaagaccagcggcgatctcaagccgcgctcagcctctgatgctggcatccgggggacgcccaaggtcagagctaaaaaagacgctgatgcaaacgccggcttaacctcctgccccagagctaagcccagtgtgaggcctaagcccttcctgaatagggcagagagccaatcacaggagaaaatggatatcagtacacttcggagacagcttagacctactggccagcttcgcggcggactgaagggctcgaaatctgaagattctgaactcccaccccagactgcgagtgaggctccctccgaggggagtaggcgaagctcatcggacctaatcactctccctgctacaacacccccttgtcctaccaagaaggagtgggaaggtcccgcaacttcctatatgacctgtagcgcgtatcaaaaggtgcaagatagcgagatctcctttcctgcgggggtagaggtacaagttttagagaagcaggagtctggctggtggtacgtgcggttcggcgagttagagggttgggcccccagtcattatctcgtgctcgacgagaatgagcaaccagacccctccggtaaagaactggatactgtcccagctaaggggcggcagaatgaagggaagagtgattccctagaaaaaatcgagcgtcgagtgcaagcactcaacactgttaaccagtcaaagaaagctaccccccctataccttccaagccaccgggtggatttggaaagaccagcggtactcccgctgtcaagatgaggaacggtgtacgccaggttgctgtcagaccacagtcagtgttcgtgtccccacccccaaaggacaacaatctttcctgcgccctgcggagaaacgaatcccttaccgccactgacggtctgcggggggttcgccgaaacagttcattctccaccgcacgatctgctgccgctgaagctaagggaaggctcgccgagagggcagcctcccagggcagcgatagcccactactgccagctcaacgcaactccatccccgtgtcacctgtcagaccaaagccaatcgaaaagtcacagttcatccataacaacctgaaagatgtgtatgtttctattgcagactatgaaggcgacgaagaaactgctggatttcaggaaggcgtctcaatggaggtcttggagagaaatcccaatgggtggtggtattgccagatcttagacggcgttaaaccttttaagggttgggttccaagcaattacctggaaaaaaagaactag

SEQ ID NO: 283365 - DNA, 3402 bp, Artificial Sequence
  derived and/or modified sequence
atgctggcctactgtgtgcaggatgccaccgtggtggatgtggagaagagaagaaaccccagcaagcactacgtgtacatcatcaacgtgacctggagcgacagcaccagccagaccatctaccgccgctacagcaagttctttgacctgcagatgcagctgctggacaagttccccatcgagggcggccagaaggaccccaagcagaggatcatccccttcctgcccgggaagatcctcttccgccgcagccacatcagagatgtggccgtgaagaggctgaagcccattgatgagtactgccgggccctggtgcggctgcccccccacatcagccagtgtgatgaggtgttccgcttctttgaggcccggccagaagatgtgaacccccccaaggaggactatggcagcagcaagaggaagtctgtgtggctgagctcctgggccgagagccccaagaaggatgtgactggagcagatgccacagctgagcccatgatcctggagcagtatgtggtggtgagcaactacaagaagcaggagaacagcgagctgagcctgcaggccggggaggtggtggatgtgattgagaagaatgaaagtggctggtggtttgtgtccaccagcgaggagcagggctgggtgcctgccacctacctggaggcccagaatggcaccagagatgacagcgacatcaacaccagcaagacaggagaggtgtccaagaggaggaaggcccacctgcggcggctggaccggcgctggaccctgggcggcatggtgaaccggcagcacagccgggaggagaagtatgtgacagtgcagccctacaccagccagagcaaggatgaaattggatttgagaagggcgtgacagtggaggtgatcaggaagaacctggagggctggtggtacatccgctacctgggcaaggagggctgggccccagccagctacctgaagaaggccaaggatgacctgcccaccaggaagaagaacctggccggccctgtggagatcatcggcaacatcatggagatcagcaacctgctgaacaagaaggccagcggggacaaggagaccccacctgctgagggggagggccacgaggcccccatcgccaagaaggagatcagcctgcccatcctgtgcaatgccagcaatggcagcgctgtgggcgtgcctgacagaacagtgtcccggctggcccagggcagccctgctgtggcccgcatcgccccccagagggcccagatcagcagccccaacctgcggacccggcccccaccaagaagagagagcagcctgggcttccagctgcccaagcccccagagccccccagcgtggaggtggagtactacaccatcgccgagttccagagctgcatcagtgatggcatctccttccggggcggccagaaggccgaggtgattgacaagaacagcggcggctggtggtacgtgcagatcggggagaaggagggctgggccccagccagctacatcgacaagaggaagaagcccaacctgagcaggaggaccagcaccctgacccggcccaaggtgcccccaccagccccacccagcaagcccaaggaggccgaggagggccccactggagccagcgagagccaggacagccccaggaagctgaagtatgaggagccagaatatgacatcccagcctttggatttgattctgagcctgagctgtctgaggagcctgtggaggaccgggccagcggggagcggcggcctgcccagccccaccggcccagccctgccagcagcctgcagagggcccgcttcaaggtgggggagagcagtgaagatgtggccctggaggaggagaccatctatgaaaatgaaggcttccggccctatgcagaggacaccctgagcgcccggggcagcagcggggacagcgacagccctggcagcagcagcctgagcctgaccaggaagaacagccccaagagcggcagccccaagagcagcagcctgctgaagctgaaggccgagaagaatgcccaggccgagatgggcaagaaccacagcagcgccagcttcagcagcagcatcaccatcaacaccacctgctgcagcagcagcagcagcagcagcagcagcctgagcaagaccagcggggacctgaagcccaggtctgccagtgatgctggcatccggggcacccccaaggtgcgggccaagaaggatgctgatgccaatgccggcctgaccagctgcccccgggccaagcccagcgtgcggcccaagcccttcctgaacagagctgagagccagagccaggagaagatggacatcagcaccctgcggcggcagctgcggcccaccggccagctgcggggcggcctgaagggcagcaagtctgaggacagcgagctgcccccccagacagccagcgaggcccccagcgagggcagccgccgcagcagcagtgacctgatcaccctgcctgccaccaccccaccctgccccaccaagaaggagtgggagggccctgccaccagctacatgacctgcagcgcctaccagaaggtgcaggacagcgagatctccttccctgctggggtggaggtgcaggtgctggagaagcaggagagcggctggtggtacgtgcgctttggagagctggagggctgggcccccagccactacctggtgctggatgaaaatgagcagcctgaccccagcggcaaggagctggacacagtgcctgccaagggccggcagaatgaaggcaagagtgacagcctggagaagattgaaagaagagtgcaggccctgaacacagtgaaccagagcaagaaggccaccccacccatccccagcaagcccccaggcggctttgggaagaccagcggcaccccagctgtgaagatgagaaatggagtgcggcaggtggccgtgcggccccagagcgtgtttgtgagccccccacccaaggacaacaacctgagctgtgccctgcggagaaatgaaagcctgacagccacagatggcctgcggggcgtgagaagaaacagcagcttcagcacagcccggtctgctgctgctgaggccaagggccgcctggccgagcgggccgccagccagggcagtgacagccccctgctgcctgcccagaggaacagcatccctgtgtcccctgtgcggcccaagcccatcgagaagagccagttcatccacaacaacctgaaggatgtgtatgtgtccattgctgactatgaaggagatgaggagacagctggcttccaggagggcgtgtccatggaggtgctggagaggaaccccaacggctggtggtactgccagatcctggatggagtgaagcccttcaagggctgggtgcccagcaactacctggagaagaagaactag

SEQ ID NO: 283366 - DNA, 3402 bp, Artificial Sequence
  derived and/or modified sequence
atgctggcctactgcgtgcaggacgccaccgtggtggacgtggagaagaggcgcaatcccagtaagcactatgtttacatcatcaatgtgacctggagcgacagcacgtctcagacaatttatagaaggtatagcaaattttttgatttacagatgcagctgctcgataaatttcctatcgaaggggggcaaaaggatcccaaacagagaataattcccttcctcccaggtaagatcctattccggcggtcccatatcagggacgtcgcagtgaagcgtctcaagcccatagacgagtactgtcgcgccctcgtacgtctaccccctcatatctcccaatgcgatgaagtgttccgcttctttgaggccagaccagaggacgtcaaccctcccaaggaggattacggttcatctaaaagaaagagcgtttggctgagttcctgggccgaatctccaaagaaggatgtgaccggggctgacgccacagctgagcccatgattctcgagcaatacgtagtggtctcaaactacaagaagcaagagaattctgaactgagcctccaagcaggtgaggttgtggatgtcattgagaagaatgaaagtgggtggtggtttgtttcaacatccgaggagcaagggtgggtgcctgccacatacctggaagcgcaaaatggaactagggacgacagcgatatcaatacgtccaaaaccggggaagtttccaaaagaagaaaagctcacctgcgaagactggatagacgatggacactggggggtatggtgaaccgccaacatagcagagaagaaaagtacgtcacagtccaaccatacacttcacagtcaaaagacgagatcgggtttgaaaaaggggttaccgtagaggtcattagaaagaacctggagggttggtggtatataagataccttggaaaagagggctgggcacctgcgagttatctgaaaaaagcaaaggatgacttaccgacccgtaagaaaaatctagccggtcccgtggagattatcggtaatatcatggaaatctctaacttgctgaacaagaaagcatcaggggataaggaaacacctcccgccgagggcgaggggcacgaggcacccattgcgaaaaaggaaatcagtctgcccatcttgtgtaacgcctcgaatggttcggcagtcggggtccctgatagaaccgtgtcacgactggcccagggaagccccgctgttgcacgcatcgctcctcagcgagctcagatttcctctccgaacctacgcacccgcccacctcctcgtcgtgagtcttcattggggtttcagctgcctaaaccacccgaacctccaagcgtcgaagtggaatactatacaattgccgagtttcagtcctgcatatctgatggcatatcgttcaggggcggtcagaaggcagaagtgatcgacaagaactctgggggatggtggtacgtacaaataggtgaaaaagagggctgggcccctgcctcttacatcgataagcggaagaagccaaacctcagccgacggacaagtactctaacacggccgaaggtgccgcctcctgctccaccctccaagcccaaagaggctgaggagggacccacgggagcctcagagtctcaagattcgccccgaaaacttaaatatgaggaaccggaatacgacatcccagcctttggtttcgacagcgaaccagagttgtctgaggagccagtggaggacagggcctccggcgagaggaggcctgcccaacctcaccggccttccccagctagctcactgcagcgggctagattcaaggtaggcgaatctagtgaggacgtcgccctcgaagaagaaaccatctacgaaaacgaggggttccgcccctacgctgaagacactttgagcgctcggggcagttctggagattccgacagtcctggcagtagcagcctatctttaactagaaaaaattccccgaagagcggatcacctaagagttccagcctgctcaaactcaaagctgaaaagaatgctcaggcagagatgggtaagaatcacagctccgccagttttagctcttctatcactattaatacaacttgctgctcatcttcttcgtctagcagctcatctttgtcaaaaacttcgggtgacctaaagcctcgcagcgccagcgatgccggcatccgcggtacccccaaggtgcgggccaagaaagacgccgatgccaatgctggactgacttcctgcccccgtgctaaaccgtctgtgaggccaaagccattccttaatagggctgaatctcagtctcaggaaaaaatggacattagcacgctgcgtaggcagcttcgccctactgggcaactgcgcggcggactgaaaggctccaaatccgaagatagtgaattacctcctcagacggcctccgaggcaccctcagagggcagcagacggtcaagtagtgacctaattacactgccagccactacaccaccctgtcctactaaaaaagaatgggagggacctgccacatcttacatgacctgtagtgcatatcagaaagtgcaggatagcgagatttcttttccagctggcgtcgaagttcaggtgctcgaaaaacaggaaagtggatggtggtacgtgaggttcggggaactggagggctgggccccaagccactatctggtgctggatgaaaatgaacagcccgacccttccggaaaggaactggacacggtgcccgcgaaaggacgccagaatgagggcaaaagtgattcactggaaaaaatcgagaggagggtacaggcacttaacacggtgaaccagagtaaaaaggccaccccaccaataccctccaaaccccctggggggttcggcaagacctccggcacgcccgccgtgaaaatgagaaatggggttaggcaggtggccgtccggccccagtctgttttcgttagccctccaccaaaggacaataacctcagctgtgccctgcgacgtaacgagtccctcacagccaccgacggcctgcgaggagtgaggaggaattcaagctttagcacagctcgtagcgcggctgcagaggctaagggtagactggctgaacgggccgcatctcagggttctgactcaccactgctgcctgcacagcgaaacagcattcctgtctcaccagtaagacccaaacccatcgaaaagtcccagtttatccataacaacctgaaagacgtatacgtgagcatcgctgattacgagggcgatgaggagactgctggattccaggagggggtgagcatggaagtgcttgagcgcaacccaaacggttggtggtattgtcagattctggatggcgtgaaaccatttaaaggctgggtcccctccaactacctagaaaaaaaaaattag

SEQ ID NO: 283367 - DNA, 3402 bp, Artificial Sequence
  derived and/or modified sequence
atgctggcgtattgcgtgcaggatgctactgtggttgacgtggagaagcgcagaaatccgagcaagcattatgtatacatcatcaacgtgacttggtctgactctacttcccagacaatttacaggagatattcaaaattttttgacctacagatgcagctcctggataagtttcccattgaggggggtcagaaggaccccaagcagagaattattcctttcctcccagggaaaatcctctttcggcgaagtcacataagagacgtggcagtgaaaagattaaagcctatcgacgaatattgcagggcattggtcagactgccgccacacatcagccagtgtgatgaagtttttcggtttttcgaagctcgcccagaggacgtcaacccacccaaagaagactacggttcctcgaaacgaaaatcagtgtggcttagttcttgggccgaatctcctaaaaaggatgtaacaggagcagatgccaccgccgaacccatgatcctggaacagtacgtcgttgtttccaattacaaaaagcaagaaaactctgagctaagccttcaggcaggagaagtggtagacgttattgagaagaacgagtccgggtggtggttcgttagcacaagtgaggagcagggctgggtgcctgctacctacctagaggcccagaatgggacccgcgatgactctgacattaatacatctaagacaggcgaggtgtccaagcgtcgcaaggcccatcttcggagattagaccgcagatggactttggggggaatggtcaatcggcagcacagcagagaagagaaatacgtcactgtgcagccttacacatcccagagcaaggacgaaattggcttcgagaagggggtcaccgtggaagtgatacgaaaaaatcttgaggggtggtggtacatcaggtatctaggcaaagaaggttgggctcccgcaagttacctaaagaaggccaaggatgatcttcccaccaggaagaaaaatctggcaggaccggttgagatcataggcaacataatggagatctccaaccttctcaataaaaaagcaagcggcgacaaagagacccctccggctgagggtgagggacacgaggctcctattgccaaaaaagaaatctcactgccaatcctatgtaatgcttccaatgggagcgctgtgggtgtcccagataggactgtatcaaggttggcccaaggtagtcctgcagtggctaggatcgcccctcagagggcacagatctccagcccaaacttgcgaacgcgtccgccaccgcgtagggagtcttccctagggttccagttaccgaagcctcccgaaccaccctctgttgaagtcgaatattatactatagccgagtttcagagctgcatttcggatggaatttcattcaggggaggccagaaagccgaagtgattgacaagaactcgggaggatggtggtacgtgcagatcggcgagaaggagggctgggcgccagccagctatatcgacaagagaaagaagcccaatctttcccgacggacatccacattaacacggccaaaagtgccaccaccagccccaccatctaagcctaaggaggctgaggaggggccaacaggcgcttccgagtcccaggacagcccacggaaactgaaatatgaggaacctgaatatgatatccctgctttcggctttgactccgaacctgaactgtcagaagagcccgtagaagatcgcgctagcggcgagcggagacctgcacagccccatagaccttcccccgcatcctcattacagcgcgcacgcttcaaagtgggcgagagctcagaagacgtggcactggaggaagaaactatatatgagaatgaaggcttcaggccctatgcagaggatacactatccgctcgtggaagtagtggtgattccgattcacctggctcctcttccctctccctcactagaaaaaattcccccaagtcgggaagtcctaaatcaagcagtctgttgaaactgaaggccgaaaagaatgctcaggcagagatgggtaaaaatcattcctctgcctcgttcagtagtagcattaccattaatacgacatgttgttcatcttctagttcatcctcctcctccctgagtaagacctccggcgatctgaaacccaggtcagcttctgatgcgggaattcgaggtacccccaaggtgcgtgcgaagaaagacgcagatgccaatgcgggtctgacaagttgtcccagggcgaaacccagtgtgcgccctaagccgtttctgaatagggctgaatcccagtcccaggagaaaatggatattagcaccctgcgcaggcaactgcgcccaacagggcagctgaggggtggtctgaaaggcagcaaaagcgaagactccgagttgccaccccagacggcttccgaggccccttcagaaggcagccgacgcagctccagtgacctaatcacactgcccgctacaacacccccttgccccaccaagaaagaatgggaaggaccagccacatcatatatgacatgcagcgcatatcagaaagtacaggactccgagatatcattccctgccggagttgaggtccaagtcctggagaagcaggaatccggctggtggtacgttcgattcggggagctggagggttgggctccctctcactacctggtgctggatgagaacgaacaaccggaccccagtggaaaagagctggacaccgttcccgctaaggggagacagaatgagggaaaaagtgatagcttggagaaaatcgagagacgtgtgcaggcactgaacacagtcaatcagtctaaaaaggcaaccccacccattccctccaaaccacctgggggttttggcaagacctcaggcactcccgcagttaagatgagaaacggcgtccgtcaggtcgctgttcgtccccaatccgtgttcgtttccccaccacctaaggacaataatctcagttgtgccctgcgaagaaacgaatctctcaccgccactgatggcctgagaggcgtgcgtaggaactctagcttttcaaccgccagatctgctgccgctgaagctaaggggagactggccgagcgggctgcttcccaggggagtgattctcctctccttcccgcacagcggaactctataccagttagccctgtgcggccaaagccaatcgaaaagtcacagtttattcacaataacctgaaagatgtttatgtgtcaatagcagattacgaaggagatgaggagactgctggcttccaggaaggcgtctctatggaggtgctcgaacggaaccccaatggctggtggtactgccaaatcctggacggggttaagcccttcaaaggttgggttccgagcaattatttggaaaagaaaaactag

SEQ ID NO: 283368 - DNA, 11468 bp, Artificial Sequence
  derived and/or modified sequence
gcgagcgggcgagcgcagcgcggcggccgcgcgggagtgaaggggcgcgcggcaggccggcggggagtcccccggggcgcacggagcccgcgcgccctccgggaccctcccccgtccctgggccggacctgtgggcgccgggagtccgggcagcgttcggcgcgccgggccggggtggcgggcggccccgggaccccggcagctggagaaggagccggagcccggccgggatgagaaggtgacgccgccgggggcgccactcgctttgtgggggaagatgctcgcctactgcgtgcaggatgccaccgtggtggacgtggagaagcggaggaacccctccaagcactacgtatacataatcaatgtgacctggtctgactccacctcccagactatctaccggaggtacagcaagttctttgacctgcagatgcagcttttggataagtttcccattgaaggtggccagaaggaccccaagcaaaggatcatccccttcctcccaggcaagatcctcttccgcagaagccacatccgggacgtagctgtgaagagactgaagcccatcgatgaatactgccgggcacttgtccggctgcccccccacatctcacagtgtgacgaagtcttccggttcttcgaggctcgacccgaggatgtcaaccctccaaaagaggactatggcagttccaagaggaaatcagtgtggctgtccagctgggctgagtcgcccaagaaggacgtgacaggtgccgacgccaccgccgagcccatgatcctggaacagtacgtggtggtgtccaactataagaagcaggagaactcggagctgagcctccaggccggggaggtggtggatgtcatcgagaagaacgagagcggctggtggttcgtgagcacttctgaggagcagggctgggtccctgccacctacctggaggcccagaatggtactcgggatgactccgacatcaacacctctaagactggagaagtgtccaagagacgcaaggcccatctgcggcgcctggatcgccggtggaccctgggcgggatggtcaacaggcagcacagccgagaggagaagtatgtcaccgtgcagccttacaccagccaaagcaaggacgagattggctttgagaagggcgtcacagtggaggtgatccggaagaatctggaaggctggtggtatatcagatacctgggcaaagagggctgggcgccagcatcctacctgaagaaggccaaggatgacctgccaacccggaagaagaacctggccggcccagtggagatcattgggaacatcatggagatcagcaacctgctgaacaagaaggcgtctggggacaaggaaactccaccagccgaaggcgagggccatgaggcccccattgccaagaaggagatcagcctgcccatcctctgcaatgcctccaatggcagtgccgtgggcgttcctgacaggactgtctccaggctggcccagggctctccagctgtggccaggattgcccctcagcgggcccagatcagctccccgaacctacggacaagacctccaccacgcagagaatccagcctggggttccaactgccaaagccaccagagcccccttctgttgaggtggagtactacaccattgccgaattccagtcgtgcatttccgatggcatcagctttcggggtggacagaaggcagaggtcattgataagaactcaggtggctggtggtacgtgcagatcggtgagaaggagggctgggcccccgcatcatacatcgataagcgcaagaagcccaacctgagccgccgcacaagcacgctgacccggcccaaggtgcccccgccagcaccccccagcaagcccaaggaggccgaggagggccctacgggggccagtgagagccaggactccccgcggaagctcaagtatgaggagcctgagtatgacatccctgcattcggctttgactcagagcctgagctgagcgaggagcccgtggaggacagagcctcaggggagaggcggcctgcccagccccaccggccctcgccggcctcttctctgcagcgggcccgcttcaaggtgggtgagtcttcagaggatgtggccctggaagaggagaccatctatgagaatgagggcttccggccatatgcagaggacaccctgtcagccagaggctcctccggggacagcgactccccaggcagctcctcgctgtccctgaccaggaaaaactcccccaaatcaggctcccccaagtcatcatcactcctaaagctcaaggcagagaagaatgcccaggcagaaatggggaagaaccactcctcagcctccttttcctcatccatcaccatcaacaccacttgctgctcctcctcttcctcctcctcctcttccttgtccaaaaccagtggcgacctgaagccccgctctgcttcggacgcaggcatccgcggcactcccaaggtcagggcaaagaaggatgctgatgcgaacgctgggctgacctcctgtccccgggccaagccatcggtccggcccaagccattcctaaaccgagcagagtcgcagagccaagagaagatggacatcagcactttacggcgccagctgagacccacaggccagctccgtggagggctcaagggctccaagagtgaggattcggagctgcccccgcagacggcctccgaggctcccagtgaggggtctaggagaagctcatccgacctcatcaccctcccagccaccactcccccatgtcccaccaagaaggaatgggaagggccagccacctcgtacatgacatgcagcgcctaccagaaggtccaggactcggagatcagcttccccgcgggcgtggaggtgcaggtgctggagaagcaggagagcgggtggtggtatgtgaggtttggggagctggagggctgggccccttcccactatttggtgctggatgagaacgagcaacctgacccctctggcaaagagctggacacagtgcccgccaagggcaggcagaacgaaggcaaatcagacagcctggagaagatcgagaggcgcgtccaagcactgaacaccgtcaaccagagcaagaaggccacgccccccatcccctccaaacctcccgggggcttcggcaagacctcaggcactccagcggtgaagatgaggaacggagtgcggcaggtggcggtcaggccccagtcggtgtttgtgtccccgccacccaaggacaacaacctgtcctgcgccctgcggaggaatgagtcactcacggccactgatggcctccgaggcgtccgacggaactcctcctttagcactgctcgctccgctgccgccgaggccaagggccgcctggccgaacgggctgccagccagggttcagactcacccctactgcccgcccagcgcaacagcatacccgtgtcccctgtgcgccccaagcccatcgagaagtctcagttcatccacaataacctcaaagatgtgtacgtctctatcgcagactacgagggggatgaggagacagcaggcttccaggagggggtgtccatggaggttctggagaggaaccctaatggctggtggtactgccagatcctggatggtgtgaagcccttcaaaggctgggtgccttccaactaccttgagaaaaagaactagcagagggcctgggctcttccagcctcagtgtgcctctctggccgcccactggatgagcggtgagacgaacaaaagggaaaggaaaaaatgggggtggggggtggggggtggacaacattcaacactgcagaatgggtgacctcaaagatgccccctgtccaagccatcccacagctggaaggtaggggatgggggtgcccacactgagtgaggaagggaatggaccagggagtcccaggcctgggacccagagccaagaaagctgagatatcctgtgcaccatagggacttcaccaatggattacatgccatctgggacaggccatgtgggagaccccagttgtgcctttgctacagatctggaaaagacaaggtcatgggggcctccagtgtcctgcccctgcttggcccagttttgattgctggcatcttgccaccccaggtatccctggtattgtcctaagctgtatttgtgaattgtgctggtttcctgggcattgccacgcctaccacaggtgggtacattagaagccaccactggctttcaggcttgggggtgtcttctgagctcaagcctgcttctgggccaggccattgtcactgttagttgaagaaaaagcagttcccaggtgccagcaaagaccatctttcataactgtcactgtcttggccttgagaagagagcccgctctccgtggggcaccccatggaggacacagtaccagagtttacagagagggtgggcgaagccaccggtctcttcctaatctgcacagactattttgggtatttctgggcgggcagttcctttgcatgtttcgggagaggtttgttgatttggggcttatatgtcaggcctttggtttgcgtcttattttaggggttgtttgggggcctgggtggtcggcctcacatgggaaggggatgggtagtggatggggtttctgttgtatcttgtgggcgggtgattttgcttttgtttttgtttcacattcttccccctccacaagccaaagtcgtttcatttggtttccactgtgtggactgtgctggagcttggcgcctgccagaaaaatttggggctaggcaagccccaggttgcagacatggtgaagcagagaaactgttcttctggttcctgcacaacctcagaggggcaaaaaccctccccaggaaggaggagggtgttcaggagccagacttttggagagaaggcagctcccagcctgctgggtgaccgccattctgcgtgtgttccccagctgggcagggctggaagccttacgtatgaagcatggagaagcagccattgtccccactatgggcagaggggggacccggctggccccttgggtcagactggagccaacaccgccagccaccccctctggcctgctggcaatgccacaggtgcccaagaagatggaggatccctgtgccaggagccaacctggtcttcccgagggtcagtgccccagtgaagacagaagcgagagaataaagttccctgtaggtcctctgtcacctttgggttgtgtttttcaattgttgacatttcagaggggaccctccagaagcccagccggcttcccccaaggactcccccttcgctgggagtggatttccacacgtgcctttgatttcggacagattgggcctcacagccaccgattcagctgccagggtccctggactgggggttggtgttttctatagaggaggaaaggccctccctcaccctgctccccacccaggcagggcagcatgggacccagtgtctcagtgccttcaaaacccacccccacccctaccctaccccaccacaccccatcccagaggccttgcctgggcaaccctaagcccctgtccctcgccatacactgatgcctggcagctagagcaaatggctcgtgttctttgtcgaaggcctgtggtgagattgttttgtttccttttgttttgtgagtttgtttaaaattgaaattagttattttcttctgctggacagtattaaatagagcaggatgttgagttaatctgctagattgcagtactaatggtagtggtttagtgtcttcatgttaatattatttgtacttatttgaacaataatgataaagaagtggttcattattttttaattaatgcactttaaataaggtagaatggaaaaaacccagagagcaaagtgcattacttaaagatgcagtatatacttttctcatttttaaacagcacatatttattaagagaaaaaaagtaatttatgactatttaaaataaaatttaaaagtagagtgactgtcaggtaaagaaccttcaatgtagctatcttccagggggagggccctgcagcctcgctcctcagatgtctgcactgagccagttcagtcactagtgcgccagccaggccaggagggagtgcagagcatgtctgccaagcacagagcatctcagttggactggaccacagtgctcccgagagcctgcctttcctgcccttccccaccacctgcactgccccccacattctcccagccccccccaaggaccccctctccttgacccccagtgctgtaagtaatagagtcattaaaatgcaggactgaaagagacctcagaggtctctatcccatcccttcctgttactgcggcccaaggacaggaaacaacttttccaaaatcccacagctagttaatgacagatctccccactacattaatcccgtgctcctcctcactgccattatagtttattgtgtggtcatgtttacattgtgacatccagccccaaggatggctgggagttgctcaggcatccaggaaaagtggggaatgctgccatctggtgacagcatgtagatttgggcagtgaacagggattgccatgccccagtcttcgcacctcgccccctcaccccctaactcacagcacaaaccctgcaaacccaaagagaatattaatacttgaagcaagaagggtgcatgccagtccttctccgacatggccagggggtaccaggccttgtgcgcctggcctcctagccctagccagggcgagagggcctttcccttgagctactgagctgctttgtgatgctgaaggatactgccggcagcaggcagaggagggagggggcctagggctctgacccatctggaggaaaaccagatcggactaaaaaaggaaaaagaaaaacaaaatctccgcagtgtccaaacctagtttcccatgagttgcgactgaaaatgtgaaacgacactgtattgctgtatactgcaactttaaccataatgagcccttctgaggtcattattgaggttcatataatgcccgaagatgcagcatttggtgctttgttttcctttccgtttcaagacctttttcttttattgcaaggggaaaaaaatgtcatctccccccacctcatccctctttgtgacagcagacctggctgtgttgcccctctcctcctcactattctcaccaggccatgggactttgggggcagtgagagagagctggaaaggggcaaccctgagcagcaggtgtgccccatgccctgtgggtttcccctatgtccaatgactgtagacgggctgtcttgccaggcctcagccccgtctaccctaagcctggccccaaaggtttctctttcttcctccttgattttccatcttgacgaaggcattatatagaatcattttaatcactttcagatgttagagcagcgtattttacaggcatttatatccattgctttcctcagcaaggcatgttactacttttatcatctaaggaaaaaagacaagggaattccagtcaggcattattttcctattactagtgtttgcagaataggtgtaggactatttaagtttagaccttggtttggtagttcttgtttttaataaggggaaaaagataaaataacccctatttttcctgttattgtatttaactaatatattatttctttaaggttactcacttcccctacccctccaaataccttgcattctcaatcaaaaatggaaacaatctgagagacaggaaaagtgcaatattaccaagatggatgccagggctcattggggacaatggagggaataccagtggcgctcagagagcaagaggcagggagcggggtgctgaaggaatcctagctgtggaacaggtgggtgggttggtggagtttgatcttgtggcgttctcctctcccccttctttgggaagatgataggggtccctgccagatccacccagaagaaagggattcaggcatggggcccttgacctctaggccccagtccctggagcagaggcaggccctcgggagctgttccttgttttgatttctgttgtggtgcagccagctgctcagagagacctggcctaaaaatgactcccagcagccctctctcaccccagtgtcctgatatttgggctgtgatccttctggtgtatgtttgaatctttctaaaactgggtgccctcagttcagtttctaggcaggaagcctagaagtcaccagatctttttgggggatgtgagaaccttgagccgcgcacaccctggtgagacaccaattcccacaagcctgcagcagggcctggggctgagcctgggctgcccattcatctcagcgacttcagcctgagaagtgagccctgcctgggctccacacccagagagtccatacaaattctgctccgggaagagtcggggggtctattcaagtttctctgcagacaaaacttcccacaacaggtaccaatctggcctccttcctcagcaccggtagagaaagcaacagaatgggaagtttcctctgggttggagcctcagagctctgcccctcaaggtgacagggacgtccctgtggcttgttccctccacctccagtactgtatgcttgctacttcaaccccctatttggtgaatttctgcacagacacagatctctgtgcctggaatgggactgtgccctgtgcgggtctctcccttggcgtatatccatctagatatttagtctttgagaatctcaaagcagagctctctgggaagagaactgtccacattgctaaataattaagattccctcacttttttgagggccatgtgttgtgagagagagagagagagagagagtgtgtgtgtgtgtgtgtgtgtgtgtgtgtctgtgtatgcaagtgttggtaacttcccacttgaactaaataacatggggttagagaaaaaaaaataccaggcaagctgtctccattgaacaagtccttggcaatgggcaggtcccaagggactcacagcttctggcagcaagtgtgtcattcacacacatcattctggctggagagtgcaatgtgtcatttttttttctttttgtaattattttattaagtatttagttggaaatttcacactggcattaacaggtctagcataagtggcctaggcagtcatcccaggctccaaaatgaagatgtgcaaaagagatgccactgggaatagaaacactgagttggttcagttaggtcatcccctgcagacgtgtcatcgagcaggctgactcccacccctcagccatgccatgggtatgagaagccccttataatgaaagctgccagccctttcgtccttgtttcagagggtgggtcaggtggttggggtgagaacttgctcacggtgcacccaacaagacctgcaggtgcatataagtttagtcccaactgcagggccagaccaaacacttcctgggaagtgtgtggagggctgtgctagaccttcctgagtttctggctaaatcatcagccctgtttggtgcagtctcatgtctctgtggttcccaagctgcatgatcagagccagtgagaagacaggatcagtgacccacagctttggggaaaaacagccccactgttaacttccctcctgcaaacctgggtccccaggccataaggtgggcacactggtgcttacagactgggtggagagccctaccttccaaggtcttgatcccagcctgcctataaggttgggattagcatgcaatcccccttccccaatcctgtctttttaaaatctcaagtttgcacttaaccttgacaacagcaccctctcctactccagtcctagaactcagtggccttagagaatggggtcccctgcactgaaggtccccgccttgctcccagttccatcctggccaataggctgcgcctcaagaggtgaaagagaaaaaagggagggagggaggaagaattatttagaacaaaaggatggctcgagcacgttagaggcaagtgagaggcacgttggtgagaagagcatgtgcatgtttggggtagctggggcctactgtcccttcattagggaaggaggcttccagaagcggatgtcttctagaaagaaaaattgtgtgaaggctgaaaaggggcttggagttttgtctttgttgattagaaagaaggaagaagtcagctctgagtgtttcaggaagaagagagcaggtagaaagggaatttagtgatttaacacccaagggtccagccatagcaggttggaaaatcctccaaatttggccacagaaactggctaggaaaaaactgccactcattgggccacacgctgggtccccatcagttctcaatgaatggtcattgatttacttagcagagagaagtcaccagccacaaaccaatctttgagtttgcaggccctgattccagaatatatgcatccagctcccgggttctcagctggttttgcccacttccctttgactgtccaatccaaagccagtctctcaagttgtatggctcaaagagcagtgaccacaatgggtcatacagtagggacccacctccacaaattagaaccagagttcagactccattgggcacatctgggaggaaggcaacctcctttgtcgtcttgttggtaccagtcattctcaagtatctctgacacctgtggtggttcagtttgctgagcctgccacctggtatgaattagactgggtgtgatgaacattcatccatggatataccctaccattttgcgttgccttataaccaaggcacactccccataagagtttactgcagagaaagaacagcaaaacagccaccctccttgaatttacaactcattatctgcaacaggttttctttaaatccaagacacaggatgggaaatgggtttccccaccaggtactcagaggtctgcaggaagtgactcccgggcaaggcagacttcagtaatccctgaagcgtgagcatgtggactgcatggctgggtggggactggtggatgtctctggagctccagaaccttggagaattcctcatggaattcccctcccagctcttagtgggctctgtggggtcaggaggagcccttcctccaggttttccttctttcctcctcagcagagaaactggagaaaggacattaaactcagtgcagtcgatttgagtgctgaaatatttccagaatcaatggtggtgctaaactatctccatgtttctagcatttttaatagtggagttggtttgtttttaatctcatcacaaaaatgcagtgcccttggggaagggaccagccccttggcctgccactttccaggtgtcctttatcactttgacgggactctttggtctgcagaaaatgctctgtcttggcatgcttctagactgtaagatttgggttttgttttgtattttatgtttacatgcatcttatatttccctgaaaactaaataaagttttgggcctttttaaccgaa

SEQ ID NO: 283369 - protein, 369 aa, Artificial Sequence
  derived and/or modified sequence
MSICCCFFFRDYGSSKRKSGADATAEPMILEQYVVVSNYKKQENSELSLQAGEVVDVIEKNESGWWFVSTSEEQGWVPATYLEAQNGTRDDSDINTSKTGEVSKRRKAHLRRLDRRWTLGGMVNRQHSREEKYVTVQPYTSQSKDEIGFEKGVTVEVIRKNLEGWWYIRYLGKEGWAPASYLKKAKDDLPTRKKNLAGPVEIIGNIMEISNLLNKKASGDKETPPAEGEGHEAPIAKKEISLPILCNASNGSAVGVPDRTVSRLAQGSPAVARIAPQRAQISSPNLRTRPPPRRESSLTESRCRQAGVQWHDLGSLQSPHPRFKRFSCLSLLSSWDHRHMPPHPANFLIFLIETGFHHVGQDGLHLLTS

SEQ ID NO: 283370 - protein, 965 aa, Artificial Sequence
  derived and/or modified sequence
MPVTATGKILFRRSHIRDVAVKRLKPIDEYCRALVRLPPHISQCDEVFRFFEARPEDVNPPKEDYGSSKRKSGADATAEPMILEQYVVVSNYKKQENSELSLQAGEVVDVIEKNESGWWFVSTSEEQGWVPATYLEAQNGTRDDSDINTSKTGEVSKRRKAHLRRLDRRWTLGGMVNRQHSREEKYVTVQPYTSQSKDEIGFEKGVTVEVIRKNLEGWWYIRYLGKEGWAPASYLKKAKDDLPTRKKNLAGPVEIIGNIMEISNLLNKKASGDKETPPAEGEGHEAPIAKKEISLPILCNASNGSAVGVPDRTVSRLAQGSPAVARIAPQRAQISSPNLRTRPPPRRESSLGFQLPKPPEPPSVEVEYYTIAEFQSCISDGISFRGGQKAEVIDKNSGGWWYVQIGEKEGWAPASYIDKRKKPNLSRRTSTLTRPKVPPPAPPSKPKEAEEGPTGASESQDSPRKLKYEEPEYDIPAFGFDSEPELSEEPVEDRASGERRPAQPHRPSPASSLQRARFKVGESSEDVALEEETIYENEGFRPYAEDTLSARGSSGDSDSPGSSSLSLTRKNSPKSGSPKSSSLLKLKAEKNAQAEMGKNHSSASFSSSITINTTCCSSSSSSSSSLSKTSGDLKPRSASDAGIRGTPKVRAKKDADANAGLTSCPRAKPSVRPKPFLNRAESQSQEKMDISTLRRQLRPTGQLRGGLKGSKSEDSELPPQTASEAPSEGSRRSSSDLITLPATTPPCPTKKEWEGPATSYMTCSAYQKVQDSEISFPAGVEVQVLEKQESGWWYVRFGELEGWAPSHYLVLDENEQPDPSGKELDTVPAKGRQNEGKSDSLEKIERRVQALNTVNQSKKATPPIPSKPPGGFGKTSGTPAVKMRNGVRQVAVRPIEKSQFIHNNLKDVYVSIADYEGDEETAGFQEGVSMEVLERNPNGWWYCQILDGVKPFKGWVPSNYLEKKN

SEQ ID NO: 283371 - DNA, 1110 bp, Artificial Sequence
  derived and/or modified sequence
atgagcatctgctgctgcttcttcttcagagactacggcagcagcaagagaaagagcggcgccgacgccaccgccgagcccatgatcctggagcagtacgtggtggtgagcaactacaagaagcaggagaacagcgagctgagcctgcaggccggcgaggtggtggacgtgatcgagaagaacgagagcggctggtggttcgtgagcaccagcgaggagcagggctgggtgcccgccacctacctggaggcccagaacggcaccagagacgacagcgacatcaacaccagcaagaccggcgaggtgagcaagagaagaaaggcccacctgagaagactggacagaagatggaccctgggcggcatggtgaacagacagcacagcagagaggagaagtacgtgaccgtgcagccctacaccagccagagcaaggacgagatcggcttcgagaagggcgtgaccgtggaggtgatcagaaagaacctggagggctggtggtacatcagatacctgggcaaggagggctgggcccccgccagctacctgaagaaggccaaggacgacctgcccaccagaaagaagaacctggccggccccgtggagatcatcggcaacatcatggagatcagcaacctgctgaacaagaaggccagcggcgacaaggagaccccccccgccgagggcgagggccacgaggcccccatcgccaagaaggagatcagcctgcccatcctgtgcaacgccagcaacggcagcgccgtgggcgtgcccgacagaaccgtgagcagactggcccagggcagccccgccgtggccagaatcgccccccagagagcccagatcagcagccccaacctgagaaccagacccccccccagaagagagagcagcctgaccgagagcagatgcagacaggccggcgtgcagtggcacgacctgggcagcctgcagagcccccaccccagattcaagagattcagctgcctgagcctgctgagcagctgggaccacagacacatgcccccccaccccgccaacttcctgatcttcctgatcgagaccggcttccaccacgtgggccaggacggcctgcacctgctgaccagctag

SEQ ID NO: 283372 - DNA, 2898 bp, Artificial Sequence
  derived and/or modified sequence
atgcccgtgaccgccaccggcaagatcctgttcagaagaagccacatcagagacgtggccgtgaagagactgaagcccatcgacgagtactgcagagccctggtgagactgcccccccacatcagccagtgcgacgaggtgttcagattcttcgaggccagacccgaggacgtgaacccccccaaggaggactacggcagcagcaagagaaagagcggcgccgacgccaccgccgagcccatgatcctggagcagtacgtggtggtgagcaactacaagaagcaggagaacagcgagctgagcctgcaggccggcgaggtggtggacgtgatcgagaagaacgagagcggctggtggttcgtgagcaccagcgaggagcagggctgggtgcccgccacctacctggaggcccagaacggcaccagagacgacagcgacatcaacaccagcaagaccggcgaggtgagcaagagaagaaaggcccacctgagaagactggacagaagatggaccctgggcggcatggtgaacagacagcacagcagagaggagaagtacgtgaccgtgcagccctacaccagccagagcaaggacgagatcggcttcgagaagggcgtgaccgtggaggtgatcagaaagaacctggagggctggtggtacatcagatacctgggcaaggagggctgggcccccgccagctacctgaagaaggccaaggacgacctgcccaccagaaagaagaacctggccggccccgtggagatcatcggcaacatcatggagatcagcaacctgctgaacaagaaggccagcggcgacaaggagaccccccccgccgagggcgagggccacgaggcccccatcgccaagaaggagatcagcctgcccatcctgtgcaacgccagcaacggcagcgccgtgggcgtgcccgacagaaccgtgagcagactggcccagggcagccccgccgtggccagaatcgccccccagagagcccagatcagcagccccaacctgagaaccagacccccccccagaagagagagcagcctgggcttccagctgcccaagccccccgagccccccagcgtggaggtggagtactacaccatcgccgagttccagagctgcatcagcgacggcatcagcttcagaggcggccagaaggccgaggtgatcgacaagaacagcggcggctggtggtacgtgcagatcggcgagaaggagggctgggcccccgccagctacatcgacaagagaaagaagcccaacctgagcagaagaaccagcaccctgaccagacccaaggtgcccccccccgccccccccagcaagcccaaggaggccgaggagggccccaccggcgccagcgagagccaggacagccccagaaagctgaagtacgaggagcccgagtacgacatccccgccttcggcttcgacagcgagcccgagctgagcgaggagcccgtggaggacagagccagcggcgagagaagacccgcccagccccacagacccagccccgccagcagcctgcagagagccagattcaaggtgggcgagagcagcgaggacgtggccctggaggaggagaccatctacgagaacgagggcttcagaccctacgccgaggacaccctgagcgccagaggcagcagcggcgacagcgacagccccggcagcagcagcctgagcctgaccagaaagaacagccccaagagcggcagccccaagagcagcagcctgctgaagctgaaggccgagaagaacgcccaggccgagatgggcaagaaccacagcagcgccagcttcagcagcagcatcaccatcaacaccacctgctgcagcagcagcagcagcagcagcagcagcctgagcaagaccagcggcgacctgaagcccagaagcgccagcgacgccggcatcagaggcacccccaaggtgagagccaagaaggacgccgacgccaacgccggcctgaccagctgccccagagccaagcccagcgtgagacccaagcccttcctgaacagagccgagagccagagccaggagaagatggacatcagcaccctgagaagacagctgagacccaccggccagctgagaggcggcctgaagggcagcaagagcgaggacagcgagctgcccccccagaccgccagcgaggcccccagcgagggcagcagaagaagcagcagcgacctgatcaccctgcccgccaccacccccccctgccccaccaagaaggagtgggagggccccgccaccagctacatgacctgcagcgcctaccagaaggtgcaggacagcgagatcagcttccccgccggcgtggaggtgcaggtgctggagaagcaggagagcggctggtggtacgtgagattcggcgagctggagggctgggcccccagccactacctggtgctggacgagaacgagcagcccgaccccagcggcaaggagctggacaccgtgcccgccaagggcagacagaacgagggcaagagcgacagcctggagaagatcgagagaagagtgcaggccctgaacaccgtgaaccagagcaagaaggccaccccccccatccccagcaagccccccggcggcttcggcaagaccagcggcacccccgccgtgaagatgagaaacggcgtgagacaggtggccgtgagacccatcgagaagagccagttcatccacaacaacctgaaggacgtgtacgtgagcatcgccgactacgagggcgacgaggagaccgccggcttccaggagggcgtgagcatggaggtgctggagagaaaccccaacggctggtggtactgccagatcctggacggcgtgaagcccttcaagggctgggtgcccagcaactacctggagaagaagaactag

SEQ ID NO: 283373 - DNA, 1110 bp, Artificial Sequence
  derived and/or modified sequence
atgagcatctgctgctgctttttcttcagggactacgggtctagtaagcgtaaaagcggcgctgacgccaccgcagaacctatgatcctcgagcaatatgtggttgttagtaattacaaaaagcaggaaaactctgagctttccttgcaggccggggaggtggtcgatgttatcgagaagaatgagtccggatggtggtttgtgtctacaagcgaggaacagggatgggtcccggccacatatctcgaagcccagaacggaaccagagacgacagcgatataaatacgtctaagaccggtgaagtatctaaaagacgaaaggcccacctccggagactcgaccgcagatggacactgggtggcatggtcaacaggcaacattctcgagaggagaagtacgtgaccgttcagccctacaccagtcagtcaaaagacgaaatcggtttcgaaaaaggagtgacagttgaggtcatccggaagaatctggaagggtggtggtacattcgataccttggaaaggaagggtgggccccagccagttacctcaaaaaagctaaggacgacctgccaactcggaagaagaacctggccggtcctgtagagataataggcaatatcatggaaatttcaaatctactcaacaaaaaggcatctggtgataaagagacccctcctgctgaaggcgaaggccacgaagcgcctatcgccaaaaaagaaataagccttccaatattgtgcaacgctagcaatggatctgcggttggtgttccggacaggaccgttagccgattagcccaggggtctcccgcggtagctcgtatcgcgcctcagagagcccagatctcttctcccaacctgcgaactagaccacctcctaggagagaaagctccttgacagagagcaggtgtaggcaagctggcgtgcagtggcacgatctgggtagtctgcagtcaccacacccccgtttcaaacgatttagttgcctctcgctgctctcatcatgggatcacaggcacatgccaccgcaccctgccaatttcttgatttttctgattgagacagggttccaccacgtgggccaggacggcctacacctactgacctcctag

SEQ ID NO: 283374 - DNA, 2898 bp, Artificial Sequence
  derived and/or modified sequence
atgcccgtgactgctactgggaagatactttttagacgttcgcatattcgtgacgttgctgtgaaaaggctaaaacccatagacgaatattgccgagcactcgtgaggctgccccctcatatttctcagtgtgacgaagtgtttcgctttttcgaagccagacctgaggatgtgaaccccccaaaagaggactatggtagctcaaaaaggaagtctggcgccgacgctacagctgaacctatgattttggagcagtacgtcgtagtgtccaactacaagaagcaggagaactccgagctctcactgcaagctggggaagtcgtggacgtgattgaaaaaaacgagagcggctggtggtttgtgtccactagcgaggagcaggggtgggtgcccgcaacctacttagaggcccaaaatggtacacgcgatgacagtgacatcaatacaagcaagacaggcgaggtcagtaaaagacggaaggcccatttgaggcgactcgaccgcaggtggacactcggcggcatggtgaatcggcagcactcccgcgaggagaaatatgttaccgtgcagccttacacatctcagagtaaggatgagattggattcgaaaagggtgtcaccgttgaggtgattcggaaaaaccttgagggctggtggtacatcaggtatctagggaaggaaggatgggcccccgccagctatctgaagaaggcaaaggacgatctcccaaccaggaagaaaaacctcgccggccctgtagagattattggtaacatcatggaaatctctaatctcttgaacaagaaggccagtggcgataaggaaacgcctcccgcagagggcgaaggccacgaggcgcccattgcaaaaaaggagatttccctgcctattctctgcaatgcttcaaacgggtccgccgtgggcgtccctgaccgaacagtctcccggctggcacaggggagtcctgccgtagcacgcatcgccccacagcgagcccagattagttcgccaaatctgcgcacaagaccccctccgcggcgggaatcttccttaggcttccagcttcccaagcctccggagcccccatccgtggaggtggaatattacactattgccgaatttcaatcttgtatcagcgacggcatttcattcaggggaggtcagaaggcagaggtgatagacaagaatagtggcgggtggtggtatgtgcagatcggagagaaggagggctgggcacctgcctcatatatcgacaagagaaagaaacctaacctttcacgacgcactagcactcttactcgacccaaggtgccaccacccgcaccgccatctaaaccgaaagaggccgaagagggacccacaggggcttcggaatcgcaagacagccctcgaaagctcaaatacgaagagcctgaatacgatatcccagcttttggttttgacagtgagccagagttgtccgaggaacccgtagaggatagagcaagtggggagaggcggccagcgcagccccaccgcccatctcccgcaagctctttacagcgagcacggtttaaagtcggggagtcgtcggaggacgtggcactggaggaggaaaccatctatgagaacgagggattccggccatatgccgaagacaccctgagcgctcgaggttcttccggggactccgacagccccggttccagttctctgagtcttactcggaaaaattccccaaaaagcggctcccctaagagcagcagcctcctcaagctcaaagctgaaaagaatgcacaggctgagatggggaagaatcactcaagcgcctccttcagcagttccattacaatcaacaccacttgttgctcatccagcagctccagttccagctccctgtcaaaaacctctggtgatctgaagccccgatccgctagcgatgctggtatccggggtacgccaaaagtgagagctaaaaaggacgcagatgccaacgccggcctcaccagctgtcctcgcgccaaaccaagcgtgcggccaaagccgttcttgaatcgggcagaatcgcaatcacaggaaaagatggatatcagtacattgcgaaggcagcttaggcctacaggccaactgcgaggtggcttgaaaggctccaagtcagaagacagcgaactgccacctcagaccgcaagcgaagcgccttctgagggttctagacgttcatcatctgatttgatcactcttccagccacgacacccccctgccccactaaaaaagagtgggagggaccagcgacatcatatatgacatgttccgcttatcagaaagtccaagattcagagatatcatttcctgcaggagtggaagttcaagtgcttgaaaaacaggagagtggatggtggtacgtgaggttcggagagctggagggctgggctccatcacattacctggttctggacgagaatgaacaacccgaccctagcgggaaggaactggataccgttcccgcaaaaggacgccagaacgagggcaagtctgatagcctcgagaaaattgagcgtcgcgtccaagctctgaatactgtgaatcagagcaagaaggctaccccccccatcccttcaaaaccacccgggggttttggaaaaacctcaggaacacccgctgttaaaatgcgtaacggcgtgcggcaagtggcagtccgtcccatagaaaaaagccagttcattcataataacctgaaagatgtgtatgttagcatcgcagattacgaaggtgatgaggagacagcgggttttcaggagggtgtgtcaatggaagtgctggagcgaaatcccaacggctggtggtattgtcagatccttgacggagtgaagccctttaaggggtgggtgccttccaactacctcgaaaaaaagaattag

SEQ ID NO: 283375 - DNA, 1110 bp, Artificial Sequence
  derived and/or modified sequence
atgagcatctgctgctgcttcttcttccgggactatggcagcagcaagaggaagtctggagcagatgccacagctgagcccatgatcctggagcagtatgtggtggtgagcaactacaagaagcaggagaacagcgagctgagcctgcaggccggggaggtggtggatgtgattgagaagaatgaaagtggctggtggtttgtgtccaccagcgaggagcagggctgggtgcctgccacctacctggaggcccagaatggcaccagagatgacagcgacatcaacaccagcaagacaggagaggtgtccaagaggaggaaggcccacctgcggcggctggaccggcgctggaccctgggcggcatggtgaaccggcagcacagccgggaggagaagtatgtgacagtgcagccctacaccagccagagcaaggatgaaattggatttgagaagggcgtgacagtggaggtgatcaggaagaacctggagggctggtggtacatccgctacctgggcaaggagggctgggccccagccagctacctgaagaaggccaaggatgacctgcccaccaggaagaagaacctggccggccctgtggagatcatcggcaacatcatggagatcagcaacctgctgaacaagaaggccagcggggacaaggagaccccacctgctgagggggagggccacgaggcccccatcgccaagaaggagatcagcctgcccatcctgtgcaatgccagcaatggcagcgctgtgggcgtgcctgacagaacagtgtcccggctggcccagggcagccctgctgtggcccgcatcgccccccagagggcccagatcagcagccccaacctgcggacccggcccccaccaagaagagagagcagcctgacagagagccgctgccggcaggccggcgtgcagtggcatgacctgggcagcctgcagagcccccacccccgcttcaagcgcttcagctgcctgagcctgctgagctcctgggaccaccgccacatgccaccccacccagccaacttcctgatcttcctgattgagaccggcttccaccacgtgggccaggacggcctgcacctgctgaccagctag

SEQ ID NO: 283376 - DNA, 2898 bp, Artificial Sequence
  derived and/or modified sequence
atgcctgtgacagccaccgggaagatcctcttccgccgcagccacatcagagatgtggccgtgaagaggctgaagcccattgatgagtactgccgggccctggtgcggctgcccccccacatcagccagtgtgatgaggtgttccgcttctttgaggcccggccagaagatgtgaacccccccaaggaggactatggcagcagcaagaggaagagcggggctgatgccacagctgagcccatgatcctggagcagtatgtggtggtgagcaactacaagaagcaggagaacagcgagctgagcctgcaggccggggaggtggtggatgtgattgagaagaatgaaagtggctggtggtttgtgtccaccagcgaggagcagggctgggtgcctgccacctacctggaggcccagaatggcaccagagatgacagcgacatcaacaccagcaagacaggagaggtgtccaagaggaggaaggcccacctgcggcggctggaccggcgctggaccctgggcggcatggtgaaccggcagcacagccgggaggagaagtatgtgacagtgcagccctacaccagccagagcaaggatgagatcggctttgagaagggcgtgacagtggaggtgatcaggaagaacctggagggctggtggtacatccgctacctgggcaaggagggctgggccccagccagctacctgaagaaggccaaggatgacctgcccaccaggaagaagaacctggccggccctgtggagatcatcggcaacatcatggagatcagcaacctgctgaacaagaaggccagcggggacaaggagaccccacctgctgagggggagggccacgaggcccccatcgccaagaaggagatcagcctgcccatcctgtgcaatgccagcaatggatctgctgtgggcgtgcctgacagaacagtgtcccggctggcccagggcagccctgctgtggccagaattgccccccagagggcccagatcagcagccccaacctgcggacccggcccccaccccggcgggagagcagcctgggcttccagctgcccaagcccccagagcccccatctgtggaggtggagtactacaccatcgccgagttccagagctgcatcagtgatggcatctccttccggggcggccagaaggccgaggtgattgacaagaacagcggcggctggtggtacgtgcagattggagagaaggagggctgggccccagccagctacatcgacaagaggaagaagcccaacctgagcaggaggaccagcaccctgacccggcccaaggtgcccccaccagccccacccagcaagcccaaggaggccgaggagggccccaccggggccagcgagagccaggacagccccaggaagctgaagtatgaggagccagaatatgacatcccagccttcggctttgacagcgagcctgagctgtctgaggagcctgtggaggaccgggccagcggggagaggaggcctgcccagccccaccggcccagccctgccagcagcctgcagagggcccgcttcaaggtgggggagagcagtgaagatgtggccctggaggaggagaccatctatgaaaatgaaggcttccggccctatgcagaggacaccctgagcgcccggggcagcagcggggacagcgacagccctggcagcagcagcctgagcctgaccaggaagaacagccccaagagcggcagccccaagagcagcagcctgctgaagctgaaggccgagaagaatgcccaggccgagatgggcaagaaccacagcagcgccagcttcagcagcagcatcaccatcaacaccacctgctgcagcagcagcagcagcagcagcagcagcctgagcaagaccagcggggacctgaagcccaggtctgccagtgatgctggcatccggggcacccccaaggtgcgggccaagaaggatgctgatgccaatgccggcctgaccagctgcccccgggccaagcccagcgtgcggcccaagcccttcctgaacagagctgagagccagagccaggagaagatggacatcagcaccctgcggcggcagctgcggcccaccggccagctgcggggcggcctgaagggcagcaagtcagaagattctgagctgcccccccagacagccagcgaggcccccagcgagggcagcagaagaagcagcagtgacctgatcaccctgcctgccaccaccccaccctgccccaccaagaaggagtgggagggccctgccaccagctacatgacctgcagcgcctaccagaaggtgcaggacagcgagatctccttccctgctggggtggaggtgcaggtgctggagaagcaggagagcggctggtggtacgtgcgctttggagagctggagggctgggcccccagccactacctggtgctggatgaaaatgagcagcctgaccccagcggcaaggagctggacacagtgcctgccaagggccggcagaatgaaggcaagagtgacagcctggagaagattgaaagaagagtgcaggccctgaacacagtgaaccagagcaagaaggccaccccacccatccccagcaagcccccaggcggctttgggaagaccagcggcaccccagctgtgaagatgagaaatggagtgcggcaggtggccgtgcggcccatcgagaagagccagttcatccacaacaacctgaaggatgtgtatgtgtccattgctgactatgaaggagatgaggagacagctggcttccaggagggcgtgtccatggaggtgctggagaggaaccccaacggctggtggtactgccagatcctggatggagtgaagcccttcaagggctgggtgcccagcaactacctggagaagaagaactag

SEQ ID NO: 283377 - DNA, 1110 bp, Artificial Sequence
  derived and/or modified sequence
atgagcatctgctgctgcttcttcttccgggactacggcagcagcaaaaggaaatccggggccgatgccactgctgagccaatgatcttagagcagtacgtggttgtgagtaactataaaaagcaggaaaattctgaactctccctgcaggccggcgaagtggtagacgtgatcgagaagaatgagagtgggtggtggtttgtctctacatccgaagagcagggatgggtaccagcaacctatttagaggcccaaaacggcaccagggatgatagcgacatcaacacctctaaaacaggcgaggtgtccaaacggcgaaaggcccacctgcgcagactggatagacgctggacactaggggggatggtgaatcggcaacactccagagaagaaaagtacgttactgtccagccatatacctctcagtctaaggacgaaattgggtttgagaaaggtgtgaccgtcgaggtcatcagaaagaatctcgagggctggtggtatatcaggtacctgggaaaagaaggttgggccccggcttcatatctgaagaaggccaaggacgacctcccaacaagaaaaaagaacctcgccggcccggtggagatcattggaaacattatggagatcagcaatctgctgaataagaaggcaagcggggacaaggagacaccccccgctgagggagagggccatgaagctccaatcgctaagaaagagatttcattaccaatcctttgtaacgcatccaatggctctgctgttggagtaccagacaggacagtgtcacggcttgcccaggggtccccagccgtggctaggattgcccctcagagagcccagattagctctccaaatctccgaacacgccctccaccgcggcgcgaatcctccctcacggagtccagatgccggcaggcgggggtgcagtggcatgacttgggctctcttcagtctccacatcctcgattcaaaagatttagctgtctatccctcctgtcttcctgggatcaccgccacatgccaccgcacccagccaactttctgatttttttgattgaaaccggctttcaccacgtagggcaggacgggctgcatttgctgacctcttag

SEQ ID NO: 283378 - DNA, 2898 bp, Artificial Sequence
  derived and/or modified sequence
atgcccgtgaccgccaccggcaagatcctgttccggcggagccacatccgagacgtggccgtcaagaggctgaagcccatagacgaatattgccgggcactggtccggctccccccccatataagccagtgcgatgaggtgttcaggttcttcgaggctcgccctgaagacgtcaacccccccaaagaggattacgggagttccaagcggaaaagcggagctgatgcaaccgcggagccgatgatcctggagcagtacgtggtggtctccaactataaaaagcaggagaactccgaactttcgctccaggccggggaggtggtggatgtgattgagaaaaatgagagcggctggtggtttgtctccacatccgaggaacagggatgggtcccagccacgtatctggaagcccaaaacggtacacgagacgattctgatataaacacttccaaaacaggtgaagtctcaaagcggaggaaggcccaccttagacgacttgatcgacgctggaccctcggagggatggtgaacagacagcacagcagagaggaaaaatatgtcaccgtgcagccgtatacttcacagagcaaggacgaaatcgggtttgagaagggagttaccgtggaggtcattcgtaagaaccttgaggggtggtggtacatccggtacttggggaaagagggatgggctcctgcctcttatctgaaaaaggccaaggacgacctgcccacacgaaagaagaacttggcaggccccgttgaaattatcggcaacattatggagatcagtaatctgttgaacaaaaaggcgtcaggcgataaggagacaccccctgctgaaggggaaggtcacgaagctcccatcgccaaaaaggaaatctccctgcccattctctgtaacgctagcaacggatcagccgtgggtgtgccagacagaactgtctcacgactggcccagggtagccccgcagttgcacggatagcgccgcagcgggcccagatctctagtcccaatttacggacccgaccgccgcctcggcgagaatcgtctttaggattccagctgcccaaacctcctgagccaccatctgtcgaagtcgagtactacactatcgccgagttccaatcttgcattagcgatggaatctcatttaggggcggacagaaggccgaggtgatcgacaagaacagcgggggctggtggtatgtgcagatcggtgagaaagagggctgggcccctgctagttatatagacaagcgcaagaaacccaacctttcgcgccggacctcaacactgactcggccaaaagtgccaccacccgcccctcccagtaaaccaaaagaggccgaagaggggccaaccggggcgtccgaatctcaggactcccccaggaaactcaaatatgaagaacccgagtacgatattcccgcttttggattcgattcagaacccgagctcagcgaagagcccgttgaggatcgcgctagtggagagcgaagacccgcccagccacatagaccaagtcccgcgtcatcactacagcgagcacggtttaaggtgggcgaatcttccgaggatgtggccctggaagaagaaactatttatgaaaatgaggggtttaggccctatgccgaggacaccctatccgcgcgtggaagctctggagatagcgattccccagggagctcttctctctcgctaactcggaagaattccccaaaaagtggctctcccaagtcatccagtctgttaaagttaaaagcagagaagaacgcccaggccgagatgggtaagaaccacagctcggcatctttttcatctagtatcaccataaatacaacatgctgtagcagcagctcaagctccagtagctccctgtctaagacaagcggcgatctaaagcccaggtctgcgagcgacgctggaatccggggaaccccaaaagtcagagctaagaaggatgctgatgctaacgctggcctgacttcctgccccagggcgaaaccaagcgtcagacccaagccgttcctgaaccgagccgagagtcagagccaggaaaaaatggacattagcacgctgagacgccagctcaggcccaccgggcagctcaggggcggcttaaagggtagtaaaagcgaagattccgagctcccaccccagactgcgtccgaagctccgtcagaaggctcaagacgcagcagttccgatttgattacccttcctgcgaccacccccccctgtcctaccaaaaaagaatgggagggcccagcaacctcatacatgacatgcagcgcatatcaaaaggtgcaggactctgaaatcagctttcccgcaggtgtggaagtgcaagttctggaaaagcaggaaagcgggtggtggtatgtgaggtttggcgaacttgagggttgggccccaagccactatctggtacttgatgaaaatgagcagcccgacccgtctgggaaagagcttgacaccgtgcctgctaaagggcggcagaatgaggggaaatctgattcactggagaaaattgaaagacgggtccaggctttgaacactgtgaaccaatccaagaaggctacgcccccaattccatctaagcctcccggaggtttcggtaaaacgtccgggaccccagccgttaaaatgcgcaatggggttcgtcaggtggcggttaggcccatcgaaaaatcccagttcatccacaataatcttaaggacgtctacgtgtccatcgctgactacgagggcgatgaagaaacggccgggtttcaagagggagtttctatggaagtgctggagcggaatcccaatgggtggtggtattgccagattctggatggagtgaagccgttcaagggatgggttccaagtaactatctggagaagaagaactag

SEQ ID NO: 283379 - DNA, 1110 bp, Artificial Sequence
  derived and/or modified sequence
atgagcatatgttgttgctttttctttcgagactacggttctagcaaaaggaagagcggggctgatgcaaccgctgaaccaatgatcctggagcagtatgtggtggtcagcaactacaagaagcaagagaatagcgagctgtctttgcaggccggagaggtggtcgacgttatcgagaagaatgagagtggatggtggttcgtttcaacgtccgaggagcaaggctgggtgcccgcaacttatttggaagcacagaacgggacgagggacgattccgatatcaacactagtaaaactggtgaagtttctaagcgcagaaaagctcacctgagaaggctcgaccggcgttggaccctgggcggaatggtcaatcggcagcacagtcgcgaggagaagtacgtcaccgtccaaccatatacatctcagtcaaaggatgaaattggcttcgagaagggcgttaccgttgaggtcattagaaagaacttggaaggatggtggtatattagatatcttggcaaggaagggtgggcccctgcttcctatctgaagaaggcgaaggacgacctcccaactagaaagaaaaaccttgcgggtcccgtggagattattgggaatattatggaaatttccaatttgcttaataaaaaggcttctggcgataaggaaaccccaccggctgaaggagaggggcatgaggctccaattgccaagaaggaaatttctctgccaattctttgcaatgctagcaacggaagtgccgtaggcgtgcctgaccgcacagtgtcaaggcttgctcagggatcccctgccgtcgctagaatcgcccctcagagggctcagatctccagtccaaacttgcggactagaccacctcccagacgcgagtcatccctcaccgaaagtagatgtaggcaggcaggggtgcagtggcatgacctcggctctctccagagtccccacccacgattcaaaaggtttagttgtctctcactgttgagcagctgggaccaccggcacatgccaccccacccagcaaatttcctgatttttttaattgagactggcttccaccacgtaggtcaagacgggctgcacctgctgacatcctag

SEQ ID NO: 283380 - DNA, 2898 bp, Artificial Sequence
  derived and/or modified sequence
atgcccgtcactgcgaccggtaagattctgttcaggcggtcccatatcagggatgtggccgtgaaacggctgaaaccaatcgatgagtactgcagagcactagtgcgattgcccccacatatctcgcagtgcgatgaggttttccggttctttgaagccaggcctgaggacgtgaacccgcctaaggaggattatggaagttccaaacgcaagtccggcgcagacgctactgctgagcctatgattctcgagcaatatgtggtggtgagcaactacaaaaagcaggaaaactcagagctctccttgcaggctggggaggtcgtggatgttatagagaaaaacgagtcaggatggtggttcgtgagcaccagcgaggaacagggttgggttccagccacgtatctggaagcacagaatgggacgagggacgattccgatatcaacacctccaaaacgggagaagttagcaagagaaggaaggcacacctcaggcgactggatcgaaggtggaccctgggaggtatggtgaaccgccagcacagtcgcgaagagaagtacgtaacagtgcagccctacacctctcagtctaaggatgaaatcggctttgagaaaggcgtcacagtggaagtgatcaggaagaacctggaaggctggtggtacattcgttacctcggaaaggagggctgggcccctgccagttacctgaagaaagcaaaggacgacctccccacccgcaagaaaaacctggcagggccagtggaaattatcggtaatattatggaaatctccaatctgctgaacaagaaagctagcggcgacaaagagacaccacctgcagaaggggaagggcatgaggctcctatagccaagaaggagatcagcctccctatcctgtgcaatgcaagtaacggtagtgccgtgggcgtgcctgatcgtaccgtcagcaggctggcacagggaagccctgctgttgcacgaatcgcaccacagcgggcacagatctcgagccccaatttgagaacccgccctccccctcgacgggagtcatcattgggctttcagctcccaaagccccctgaacctccctccgttgaggttgagtattacaccatcgccgaattccagagctgtatcagtgatgggataagtttccgaggtgggcagaaggctgaagtgatagataagaactccggcggatggtggtatgtccagattggcgaaaaagaaggatgggcccctgcctcttacattgataagcggaagaagccgaatctatcacggaggacatctacattgacacggcctaaggtcccacctcctgcgcctccttcaaagccgaaggaagcagaggagggccctacgggtgcttccgagtctcaggactctccgcgaaagttgaagtacgaggagcctgagtatgacatccctgcgtttggcttcgattctgagccagaactttcggaggagccagtggaggaccgtgcaagtggggaacggaggccggctcagccacaccgcccttcccctgcttcctcactgcagagagctagattcaaggtaggcgaatcctcggaagatgtggccctggaggaagagactatctacgagaatgaagggttccgtccttacgcagaggatacattaagtgcccgaggatcctccggagactctgactccccagggtcttcctcactgtccttgacgcggaagaacagtcctaaatcgggctcccctaaaagttctagtcttctgaagttgaaagcggagaagaatgcccaggcggaaatggggaagaaccacagcagcgcctccttcagtagctcaatcactatcaacactacttgctgcagtagctcatcaagctcctcttcgtctctcagtaagaccagtggggacttgaagccacgttccgcaagtgacgcgggtatcaggggaacacctaaggtgcgtgccaaaaaggacgcagacgccaacgccggactgaccagctgccccagggcgaaaccctcagttcgaccaaaacctttcctgaacagggccgaatctcaaagccaggaaaagatggatataagtacattgagaaggcagcttcggcctaccggacagcttcgcggaggcctgaaagggtcgaaatctgaggactccgaactgcccccacagaccgcctccgaagccccatcagaaggcagcagaagaagctcttccgacctgatcactcttcctgcaacgacacccccttgcccgaccaagaaagagtgggaaggcccagctacatcttatatgacctgcagcgcataccagaaagtccaggacagcgaaatcagttttcctgcgggagtggaggtgcaggtgttagagaagcaggaatcaggctggtggtatgtgaggtttggcgaactcgaaggctgggctcctagccattatcttgtcctggatgaaaatgaacagccagatccctctggtaaggagctggacactgtacccgctaagggcaggcaaaatgaagggaagtcagattctctcgagaagatcgaacggagagtccaggctctgaacaccgtcaaccaaagcaaaaaggctacgccgcctatcccctccaaacctccagggggattcggtaaaacatccggaacccccgcagtgaagatgaggaacggcgtgcgccaggtcgccgttcgccctatcgaaaagtcacagttcattcataacaatctcaaagatgtgtatgtgtcgatcgccgactacgagggcgacgaggagacggccggattccaggagggcgtaagcatggaggtgcttgagagaaacccaaacgggtggtggtattgccagatcttagatggggttaagccctttaaaggatgggtgccttctaactatctcgaaaagaaaaactag

SEQ ID NO: 283381 - DNA, 1393 bp, Artificial Sequence
  derived and/or modified sequence
acatgagcagcggcaccggggaccgaccgcagccagcccgagggcgcccctgcagctgcagccccgcgctcgcgcccggccctaaccatgtctatctgttgttgcttctttttcagggactatggcagttccaagaggaaatcaggtgccgacgccaccgccgagcccatgatcctggaacagtacgtggtggtgtccaactataagaagcaggagaactcggagctgagcctccaggccggggaggtggtggatgtcatcgagaagaacgagagcggctggtggttcgtgagcacttctgaggagcagggctgggtccctgccacctacctggaggcccagaatggtactcgggatgactccgacatcaacacctctaagactggagaagtgtccaagagacgcaaggcccatctgcggcgcctggatcgccggtggaccctgggcgggatggtcaacaggcagcacagccgagaggagaagtatgtcaccgtgcagccttacaccagccaaagcaaggacgagattggctttgagaagggcgtcacagtggaggtgatccggaagaatctggaaggctggtggtatatcagatacctgggcaaagagggctgggcgccagcatcctacctgaagaaggccaaggatgacctgccaacccggaagaagaacctggccggcccagtggagatcattgggaacatcatggagatcagcaacctgctgaacaagaaggcgtctggggacaaggaaactccaccagccgaaggcgagggccatgaggcccccattgccaagaaggagatcagcctgcccatcctctgcaatgcctccaatggcagtgccgtgggcgttcctgacaggactgtctccaggctggcccagggctctccagctgtggccaggattgcccctcagcgggcccagatcagctccccgaacctacggacaagacctccaccacgcagagaatccagcctgacggagtctcgctgtcgccaggctggagtgcagtggcacgacctcggctcactacaatctccacatcccaggttcaagagattctcctgcctcagcctcctgagtagttgggatcataggcacatgccaccacacccagctaattttttaatatttttaatagagacggggtttcaccatgttggccaagatggtctccatctcctcacctcgtgatctgccagcctcggctcccaaagtgctgggattgctggggtgagccgctgcgcccggccttcctctcctttttaacaatcctcgcctccctctttccctccttccttctctcctcccttcaacaaatccttaccaaggacctaccaggcatcaggccccgtgcagacagaaagctagagacagcccctgacttcaa

SEQ ID NO: 283382 - DNA, 3359 bp, Artificial Sequence
  derived and/or modified sequence
gacaccacaaggactgggagtggaagatgccttctccagggggaaattaggtagactgaggcaacagatgcccgttacagctacaggcaagatcctcttccgcagaagccacatccgggacgtagctgtgaagagactgaagcccatcgatgaatactgccgggcacttgtccggctgcccccccacatctcacagtgtgacgaagtcttccggttcttcgaggctcgacccgaggatgtcaaccctccaaaagaggactatggcagttccaagaggaaatcaggtgccgacgccaccgccgagcccatgatcctggaacagtacgtggtggtgtccaactataagaagcaggagaactcggagctgagcctccaggccggggaggtggtggatgtcatcgagaagaacgagagcggctggtggttcgtgagcacttctgaggagcagggctgggtccctgccacctacctggaggcccagaatggtactcgggatgactccgacatcaacacctctaagactggagaagtgtccaagagacgcaaggcccatctgcggcgcctggatcgccggtggaccctgggcgggatggtcaacaggcagcacagccgagaggagaagtatgtcaccgtgcagccttacaccagccaaagcaaggacgagattggctttgagaagggcgtcacagtggaggtgatccggaagaatctggaaggctggtggtatatcagatacctgggcaaagagggctgggcgccagcatcctacctgaagaaggccaaggatgacctgccaacccggaagaagaacctggccggcccagtggagatcattgggaacatcatggagatcagcaacctgctgaacaagaaggcgtctggggacaaggaaactccaccagccgaaggcgagggccatgaggcccccattgccaagaaggagatcagcctgcccatcctctgcaatgcctccaatggcagtgccgtgggcgttcctgacaggactgtctccaggctggcccagggctctccagctgtggccaggattgcccctcagcgggcccagatcagctccccgaacctacggacaagacctccaccacgcagagaatccagcctggggttccaactgccaaagccaccagagcccccttctgttgaggtggagtactacaccattgccgaattccagtcgtgcatttccgatggcatcagctttcggggtggacagaaggcagaggtcattgataagaactcaggtggctggtggtacgtgcagatcggtgagaaggagggctgggcccccgcatcatacatcgataagcgcaagaagcccaacctgagccgccgcacaagcacgctgacccggcccaaggtgcccccgccagcaccccccagcaagcccaaggaggccgaggagggccctacgggggccagtgagagccaggactccccgcggaagctcaagtatgaggagcctgagtatgacatccctgcattcggctttgactcagagcctgagctgagcgaggagcccgtggaggacagagcctcaggggagaggcggcctgcccagccccaccggccctcgccggcctcttctctgcagcgggcccgcttcaaggtgggtgagtcttcagaggatgtggccctggaagaggagaccatctatgagaatgagggcttccggccatatgcagaggacaccctgtcagccagaggctcctccggggacagcgactccccaggcagctcctcgctgtccctgaccaggaaaaactcccccaaatcaggctcccccaagtcatcatcactcctaaagctcaaggcagagaagaatgcccaggcagaaatggggaagaaccactcctcagcctccttttcctcatccatcaccatcaacaccacttgctgctcctcctcttcctcctcctcctcttccttgtccaaaaccagtggcgacctgaagccccgctctgcttcggacgcaggcatccgcggcactcccaaggtcagggcaaagaaggatgctgatgcgaacgctgggctgacctcctgtccccgggccaagccatcggtccggcccaagccattcctaaaccgagcagagtcgcagagccaagagaagatggacatcagcactttacggcgccagctgagacccacaggccagctccgtggagggctcaagggctccaagagtgaggattcggagctgcccccgcagacggcctccgaggctcccagtgaggggtctaggagaagctcatccgacctcatcaccctcccagccaccactcccccatgtcccaccaagaaggaatgggaagggccagccacctcgtacatgacatgcagcgcctaccagaaggtccaggactcggagatcagcttccccgcgggcgtggaggtgcaggtgctggagaagcaggagagcgggtggtggtatgtgaggtttggggagctggagggctgggccccttcccactatttggtgctggatgagaacgagcaacctgacccctctggcaaagagctggacacagtgcccgccaagggcaggcagaacgaaggcaaatcagacagcctggagaagatcgagaggcgcgtccaagcactgaacaccgtcaaccagagcaagaaggccacgccccccatcccctccaaacctcccgggggcttcggcaagacctcaggcactccagcggtgaagatgaggaacggagtgcggcaggtggcggtcaggcccatcgagaagtctcagttcatccacaataacctcaaagatgtgtacgtctctatcgcagactacgagggggatgaggagacagcaggcttccaggagggggtgtccatggaggttctggagaggaaccctaatggctggtggtactgccagatcctggatggtgtgaagcccttcaaaggctgggtgccttccaactaccttgagaaaaagaactagcagagggcctgggctcttccagcctcagtgtgcctctctggccgcccactggatgagcggtatccctggtattgtcctaagctgtatttgtgaattgtgctggtttcctgggcattgccacgcctaccacagctgggcagggctggaagccttacgtatgaagcatggagaagcagccattgtccccactatgggcagaggggggacccggctggccccttgggtcagactggagccaacaccgccagccaccccctctggcctgctggcaatgccacaggtgcccaagaagatggaggatccctgtgccaggagccaacctggtcttcccgagggtcagtgccccagtgaagacagaagcgagagaataaagttccctgtaggtcctctgtca

SEQ ID NO: 283383 - DNA, 3039 bp, Artificial Sequence
  derived and/or modified sequence
gagaagctctctcccgctctctcctctccctctcccgcccgagggagcagggctgccttttctctcgggtgccgacgccaccgccgagcccatgatcctggaacagtacgtggtggtgtccaactataagaagcaggagaactcggagctgagcctccaggccggggaggtggtggatgtcatcgagaagaacgagagcggctggtggttcgtgagcacttctgaggagcagggctgggtccctgccacctacctggaggcccagaatggtactcgggatgactccgacatcaacacctctaagactggagaagtgtccaagagacgcaaggcccatctgcggcgcctggatcgccggtggaccctgggcgggatggtcaacaggcagcacagccgagaggagaagtatgtcaccgtgcagccttacaccagccaaagcaaggacgagattggctttgagaagggcgtcacagtggaggtgatccggaagaatctggaaggctggtggtatatcagatacctgggcaaagagggctgggcgccagcatcctacctgaagaaggccaaggatgacctgccaacccggaagaagaacctggccggcccagtggagatcattgggaacatcatggagatcagcaacctgctgaacaagaaggcgtctggggacaaggaaactccaccagccgaaggcgagggccatgaggcccccattgccaagaaggagatcagcctgcccatcctctgcaatgcctccaatggcagtgccgtgggcgttcctgacaggactgtctccaggctggcccagggctctccagctgtggccaggattgcccctcagcgggcccagatcagctccccgaacctacggacaagacctccaccacgcagagaatccagcctggggttccaactgccaaagccaccagagcccccttctgttgaggtggagtactacaccattgccgaattccagtcgtgcatttccgatggcatcagctttcggggtggacagaaggcagaggtcattgataagaactcaggtggctggtggtacgtgcagatcggtgagaaggagggctgggcccccgcatcatacatcgataagcgcaagaagcccaacctgagccgccgcacaagcacgctgacccggcccaaggtgcccccgccagcaccccccagcaagcccaaggaggccgaggagggccctacgggggccagtgagagccaggactccccgcggaagctcaagtatgaggagcctgagtatgacatccctgcattcggctttgactcagagcctgagctgagcgaggagcccgtggaggacagagcctcaggggagaggcggcctgcccagccccaccggccctcgccggcctcttctctgcagcgggcccgcttcaaggtgggtgagtcttcagaggatgtggccctggaagaggagaccatctatgagaatgagggcttccggccatatgcagaggacaccctgtcagccagaggctcctccggggacagcgactccccaggcagctcctcgctgtccctgaccaggaaaaactcccccaaatcaggctcccccaagtcatcatcactcctaaagctcaaggcagagaagaatgcccaggcagaaatggggaagaaccactcctcagcctccttttcctcatccatcaccatcaacaccacttgctgctcctcctcttcctcctcctcctcttccttgtccaaaaccagtggcgacctgaagccccgctctgcttcggacgcaggcatccgcggcactcccaaggtcagggcaaagaaggatgctgatgcgaacgctgggctgacctcctgtccccgggccaagccatcggtccggcccaagccattcctaaaccgagcagagtcgcagagccaagagaagatggacatcagcactttacggcgccagctgagacccacaggccagctccgtggagggctcaagggctccaagagtgaggattcggagctgcccccgcagacggcctccgaggctcccagtgaggggtctaggagaagctcatccgacctcatcaccctcccagccaccactcccccatgtcccaccaagaaggaatgggaagggccagccacctcgtacatgacatgcagcgcctaccagaaggtccaggactcggagatcagcttccccgcgggcgtggaggtgcaggtgctggagaagcaggagagcgggtggtggtatgtgaggtttggggagctggagggctgggccccttcccactatttggtgctggatgagaacgagcaacctgacccctctggcaaagagctggacacagtgcccgccaagggcaggcagaacgaaggcaaatcagacagcctggagaagatcgagaggcgcgtccaagcactgaacaccgtcaaccagagcaagaaggccacgccccccatcccctccaaacctcccgggggcttcggcaagacctcaggcactccagcggtgaagatgaggaacggagtgcggcaggtggcggtcaggccccagtcggtgtttgtgtccccgccacccaaggacaacaacctgtcctgcgccctgcggaggaatgagtcactcacggccactgatggcctccgaggcgtccgacggaactcctcctttagcactgctcgctccgctgccgccgaggccaagggccgcctggccgaacgggctgccagccagggttcagactcacccctactgcccgcccagcgcaacagcatacccgtgtcccctgtgcgccccaagcccatcgagaagtctcagttcatccacaataacctcaaagatgtgtacgtctctatcgcagactacgagggggatgaggagacagcaggcttccaggagggggtgtccatggaggttctggagaggaaccctaatggctggtggtactgccagatcctggatggtgtgaagcccttcaaaggctgggtgccttccaactaccttgagaaaaagaactagcagagggcctgggctcttccagcctcagtgtgcctctctgg

SEQ ID NO: 283384 - protein, 1000 aa, Artificial Sequence
  derived and/or modified sequence
MNGSFLLRLLFPVASILPETVLLRGADATAEPMILEQYVVVSNYKKQENSELSLQAGEVVDVIEKNESGWWFVSTSEEQGWVPATYLEAQNGTRDDSDINTSKTGEVSKRRKAHLRRLDRRWTLGGMVNRQHSREEKYVTVQPYTSQSKDEIGFEKGVTVEVIRKNLEGWWYIRYLGKEGWAPASYLKKAKDDLPTRKKNLAGPVEIIGNIMEISNLLNKKASGDKETPPAEGEGHEAPIAKKEISLPILCNASNGSAVGVPDRTVSRLAQGSPAVARIAPQRAQISSPNLRTRPPPRRESSLGFQLPKPPEPPSVEVEYYTIAEFQSCISDGISFRGGQKAEVIDKNSGGWWYVQIGEKEGWAPASYIDKRKKPNLSRRTSTLTRPKVPPPAPPSKPKEAEEGPTGASESQDSPRKLKYEEPEYDIPAFGFDSEPELSEEPVEDRASGERRPAQPHRPSPASSLQRARFKVGESSEDVALEEETIYENEGFRPYAEDTLSARGSSGDSDSPGSSSLSLTRKNSPKSGSPKSSSLLKLKAEKNAQAEMGKNHSSASFSSSITINTTCCSSSSSSSSSLSKTSGDLKPRSASDAGIRGTPKVRAKKDADANAGLTSCPRAKPSVRPKPFLNRAESQSQEKMDISTLRRQLRPTGQLRGGLKGSKSEDSELPPQTASEAPSEGSRRSSSDLITLPATTPPCPTKKEWEGPATSYMTCSAYQKVQDSEISFPAGVEVQVLEKQESGWWYVRFGELEGWAPSHYLVLDENEQPDPSGKELDTVPAKGRQNEGKSDSLEKIERRVQALNTVNQSKKATPPIPSKPPGGFGKTSGTPAVKMRNGVRQVAVRPQSVFVSPPPKDNNLSCALRRNESLTATDGLRGVRRNSSFSTARSAAAEAKGRLAERAASQGSDSPLLPAQRNSIPVSPVRPKPIEKSQFIHNNLKDVYVSIADYEGDEETAGFQEGVSMEVLERNPNGWWYCQILDGVKPFKGWVPSNYLEKKN

SEQ ID NO: 283385 - DNA, 3003 bp, Artificial Sequence
  derived and/or modified sequence
atgaacggcagcttcctgctgagactgctgttccccgtggccagcatcctgcccgagaccgtgctgctgagaggcgccgacgccaccgccgagcccatgatcctggagcagtacgtggtggtgagcaactacaagaagcaggagaacagcgagctgagcctgcaggccggcgaggtggtggacgtgatcgagaagaacgagagcggctggtggttcgtgagcaccagcgaggagcagggctgggtgcccgccacctacctggaggcccagaacggcaccagagacgacagcgacatcaacaccagcaagaccggcgaggtgagcaagagaagaaaggcccacctgagaagactggacagaagatggaccctgggcggcatggtgaacagacagcacagcagagaggagaagtacgtgaccgtgcagccctacaccagccagagcaaggacgagatcggcttcgagaagggcgtgaccgtggaggtgatcagaaagaacctggagggctggtggtacatcagatacctgggcaaggagggctgggcccccgccagctacctgaagaaggccaaggacgacctgcccaccagaaagaagaacctggccggccccgtggagatcatcggcaacatcatggagatcagcaacctgctgaacaagaaggccagcggcgacaaggagaccccccccgccgagggcgagggccacgaggcccccatcgccaagaaggagatcagcctgcccatcctgtgcaacgccagcaacggcagcgccgtgggcgtgcccgacagaaccgtgagcagactggcccagggcagccccgccgtggccagaatcgccccccagagagcccagatcagcagccccaacctgagaaccagacccccccccagaagagagagcagcctgggcttccagctgcccaagccccccgagccccccagcgtggaggtggagtactacaccatcgccgagttccagagctgcatcagcgacggcatcagcttcagaggcggccagaaggccgaggtgatcgacaagaacagcggcggctggtggtacgtgcagatcggcgagaaggagggctgggcccccgccagctacatcgacaagagaaagaagcccaacctgagcagaagaaccagcaccctgaccagacccaaggtgcccccccccgccccccccagcaagcccaaggaggccgaggagggccccaccggcgccagcgagagccaggacagccccagaaagctgaagtacgaggagcccgagtacgacatccccgccttcggcttcgacagcgagcccgagctgagcgaggagcccgtggaggacagagccagcggcgagagaagacccgcccagccccacagacccagccccgccagcagcctgcagagagccagattcaaggtgggcgagagcagcgaggacgtggccctggaggaggagaccatctacgagaacgagggcttcagaccctacgccgaggacaccctgagcgccagaggcagcagcggcgacagcgacagccccggcagcagcagcctgagcctgaccagaaagaacagccccaagagcggcagccccaagagcagcagcctgctgaagctgaaggccgagaagaacgcccaggccgagatgggcaagaaccacagcagcgccagcttcagcagcagcatcaccatcaacaccacctgctgcagcagcagcagcagcagcagcagcagcctgagcaagaccagcggcgacctgaagcccagaagcgccagcgacgccggcatcagaggcacccccaaggtgagagccaagaaggacgccgacgccaacgccggcctgaccagctgccccagagccaagcccagcgtgagacccaagcccttcctgaacagagccgagagccagagccaggagaagatggacatcagcaccctgagaagacagctgagacccaccggccagctgagaggcggcctgaagggcagcaagagcgaggacagcgagctgcccccccagaccgccagcgaggcccccagcgagggcagcagaagaagcagcagcgacctgatcaccctgcccgccaccacccccccctgccccaccaagaaggagtgggagggccccgccaccagctacatgacctgcagcgcctaccagaaggtgcaggacagcgagatcagcttccccgccggcgtggaggtgcaggtgctggagaagcaggagagcggctggtggtacgtgagattcggcgagctggagggctgggcccccagccactacctggtgctggacgagaacgagcagcccgaccccagcggcaaggagctggacaccgtgcccgccaagggcagacagaacgagggcaagagcgacagcctggagaagatcgagagaagagtgcaggccctgaacaccgtgaaccagagcaagaaggccaccccccccatccccagcaagccccccggcggcttcggcaagaccagcggcacccccgccgtgaagatgagaaacggcgtgagacaggtggccgtgagaccccagagcgtgttcgtgagccccccccccaaggacaacaacctgagctgcgccctgagaagaaacgagagcctgaccgccaccgacggcctgagaggcgtgagaagaaacagcagcttcagcaccgccagaagcgccgccgccgaggccaagggcagactggccgagagagccgccagccagggcagcgacagccccctgctgcccgcccagagaaacagcatccccgtgagccccgtgagacccaagcccatcgagaagagccagttcatccacaacaacctgaaggacgtgtacgtgagcatcgccgactacgagggcgacgaggagaccgccggcttccaggagggcgtgagcatggaggtgctggagagaaaccccaacggctggtggtactgccagatcctggacggcgtgaagcccttcaagggctgggtgcccagcaactacctggagaagaagaactag

SEQ ID NO: 283386 - DNA, 3003 bp, Artificial Sequence
  derived and/or modified sequence
atgaatggcagcttcctcctgagattactattcccagtggcctctattttgcctgaaaccgtgctgctccgcggggcggacgcaactgccgaacccatgatcttagagcagtatgtggttgtgtccaactacaaaaagcaggaaaatagtgaactctcactacaggccggcgaggtggtcgatgtgattgagaagaatgaatccgggtggtggtttgtttctaccagtgaggaacaagggtgggtgccggccacataccttgaggctcagaacggcacgcgcgacgattccgacatcaacacctccaagacgggagaagtgagcaaaaggcggaaagctcatctgaggcggctggataggagatggacattgggaggcatggtcaacaggcaacacagcagagaagaaaaatacgtgaccgttcaaccctacaccagtcaaagtaaggacgagatcggcttcgagaagggcgtaaccgtggaagtaatcagaaagaacctcgaaggatggtggtacatcagatacctcggcaaggaagggtgggcacccgccagttacctgaagaaagccaaagatgatctccctaccaggaaaaaaaacctggccggaccggttgagattataggcaacatcatggaaatctcgaatttactgaataagaaagcctccggagataaggaaaccccgccggcagagggggagggtcacgaagcaccaattgccaagaaggagattagcctccccattttgtgcaatgctagtaatgggtcggcagtcggggtgccagacaggactgtgagtcgcctcgcccagggttcaccagccgtcgcccgcatcgccccacaaagagcacaaattagcagtccaaaccttaggacacgaccccctcctaggagggagagctcactaggctttcagctgcctaagccaccggagcctccctccgtggaggtcgaatactacaccattgccgagtttcagtcatgcatctctgatggcatctcctttagaggaggtcagaaggctgaggtaattgacaaaaatagcggtggttggtggtacgtccaaatcggggaaaaagaagggtgggcaccagcttcgtacattgataaaagaaagaaaccaaacctgtcaaggagaacttcaacattgacaagaccaaaggtaccgcccccggcaccaccatctaaacccaaagaagctgaggagggtccaacgggagctagcgagagccaagacagtcccagaaaattaaaatacgaggaacctgaatacgacattcctgccttcgggttcgactctgagccggagctgtcagaagagcccgtggaagatagagcttctggcgaacggaggcctgcccagccacaccggccgtcaccagcgagttcactccagagagctcgcttcaaagtaggtgaaagcagtgaagatgtggccctcgaggaggagaccatatacgaaaacgaaggatttcggccgtacgctgaagacacccttagcgccagggggagttcaggcgattcggattctcctggatcttcttccctttctctcaccagaaagaacagccctaaatccgggagccctaaatcttcatcactccttaaactgaaagcagagaagaacgcacaggctgagatgggaaagaatcattcatccgcatcattctcttcctccattactattaacactacgtgttgctctagttcttcttcttcgtcttcatccctcagcaaaacctccggagatctgaaaccaaggtccgcctcagacgcgggcattcgcggaacacctaaagtccgggctaagaaggatgctgatgccaacgctggcctcaccagctgtccccgagccaaaccctccgtgagaccaaagccatttctgaatcgtgccgagtcacagagtcaggagaaaatggacatctccacactgcgccggcagctccgtccgactggccagctgagggggggattgaaagggagtaagagtgaggatagcgagttacctccacagacagcctcagaagctcctagcgaggggagcagaagaagcagctcagatcttattacactgcccgctacgaccccaccctgtcctacgaaaaaggaatgggaaggccctgccacaagctacatgacgtgtagcgcttaccagaaggtccaggattcagaaatctcctttccagcaggcgtggaagtgcaggtgctcgagaagcaggagtctggctggtggtacgtgagattcggcgaactcgagggctgggccccatcccattatctagtcctggacgagaacgagcaaccagaccctagcggcaaggaactcgatacagtgccagctaagggccggcagaacgagggcaagtcagactcgctggagaaaattgaaagacgcgtgcaagcactgaataccgtgaaccagagcaaaaaagcaactcctccaatcccaagcaagccaccaggcgggttcgggaagacaagcgggacaccagccgtgaagatgcgcaatggggtcaggcaagtggctgttagaccgcagtcagttttcgtaagtcctccacccaaggacaataacctgagttgcgctctgcgacgaaatgaaagcctgactgccactgatgggctgagaggggtgagacgaaactcttcattttctactgctcggagcgcagctgcagaagccaagggcaggctcgctgagcgggcggccagccaagggagtgacagcccactcctgcctgctcaacggaatagtatacctgtgtcccctgtaaggcccaaaccgattgaaaagtcacaatttatccacaacaacctaaaagacgtgtacgtgtcgatagccgactacgagggggacgaggaaacagctggatttcaggagggagtctccatggaggttctggaaagaaatcccaacggatggtggtactgccagatcctcgatggggttaaaccattcaaagggtgggttccttccaattacttggagaagaaaaattag

SEQ ID NO: 283387 - DNA, 3003 bp, Artificial Sequence
  derived and/or modified sequence
atgaatggcagcttcctgctgcggctgctcttccctgtggccagcatcctgcctgagaccgtgctgctgcggggagcagatgccacagctgagcccatgatcctggagcagtatgtggtggtgagcaactacaagaagcaggagaacagcgagctgagcctgcaggccggggaggtggtggatgtgattgagaagaatgaaagtggctggtggtttgtgtccaccagcgaggagcagggctgggtgcctgccacctacctggaggcccagaatggcaccagagatgacagcgacatcaacaccagcaagacaggagaggtgtccaagaggaggaaggcccacctgcggcggctggaccggcgctggaccctgggcggcatggtgaaccggcagcacagccgggaggagaagtatgtgacagtgcagccctacaccagccagagcaaggatgagatcggctttgagaagggcgtgacagtggaggtgatcaggaagaacctggagggctggtggtacatccgctacctgggcaaggagggctgggccccagccagctacctgaagaaggccaaggatgacctgcccaccaggaagaagaacctggccggccctgtggagatcatcggcaacatcatggagatcagcaacctgctgaacaagaaggccagcggggacaaggagaccccacctgctgagggggagggccacgaggcccccatcgccaagaaggagatcagcctgcccatcctgtgcaatgccagcaatggatctgctgtgggcgtgcctgacagaacagtgtcccggctggcccagggcagccctgctgtggccagaattgccccccagagggcccagatcagcagccccaacctgcggacccggcccccaccccggcgggagagcagcctgggcttccagctgcccaagcccccagagcccccatctgtggaggtggagtactacaccatcgccgagttccagagctgcatcagtgatggcatctccttccggggcggccagaaggccgaggtgattgacaagaacagcggcggctggtggtacgtgcagattggagagaaggagggctgggccccagccagctacatcgacaagaggaagaagcccaacctgagcaggaggaccagcaccctgacccggcccaaggtgcccccaccagccccacccagcaagcccaaggaggccgaggagggccccaccggggccagcgagagccaggacagccccaggaagctgaagtatgaggagccagaatatgacatcccagccttcggctttgacagcgagcctgagctgtctgaggagcctgtggaggaccgggccagcggggagaggaggcctgcccagccccaccggcccagccctgccagcagcctgcagagggcccgcttcaaggtgggggagagcagtgaagatgtggccctggaggaggagaccatctatgaaaatgaaggcttccggccctatgcagaggacaccctgagcgcccggggcagcagcggggacagcgacagccctggcagcagcagcctgagcctgaccaggaagaacagccccaagagcggcagccccaagagcagcagcctgctgaagctgaaggccgagaagaatgcccaggccgagatgggcaagaaccacagcagcgccagcttcagcagcagcatcaccatcaacaccacctgctgcagcagcagcagcagcagcagcagcagcctgagcaagaccagcggggacctgaagcccaggtctgccagtgatgctggcatccggggcacccccaaggtgcgggccaagaaggatgctgatgccaatgccggcctgaccagctgcccccgggccaagcccagcgtgcggcccaagcccttcctgaacagagctgagagccagagccaggagaagatggacatcagcaccctgcggcggcagctgcggcccaccggccagctgcggggcggcctgaagggcagcaagtcagaagattctgagctgcccccccagacagccagcgaggcccccagcgagggcagcagaagaagcagcagtgacctgatcaccctgcctgccaccaccccaccctgccccaccaagaaggagtgggagggccctgccaccagctacatgacctgcagcgcctaccagaaggtgcaggacagcgagatctccttccctgctggggtggaggtgcaggtgctggagaagcaggagagcggctggtggtacgtgcgctttggagagctggagggctgggcccccagccactacctggtgctggatgaaaatgagcagcctgaccccagcggcaaggagctggacacagtgcctgccaagggccggcagaatgaaggcaagagtgacagcctggagaagattgaaagaagagtgcaggccctgaacacagtgaaccagagcaagaaggccaccccacccatccccagcaagcccccaggcggctttgggaagaccagcggcaccccagctgtgaagatgagaaatggagtgcggcaggtggccgtgcggccccagagcgtgtttgtgtccccaccacccaaggacaacaacctgagctgtgccctgcggagaaatgaaagcctgacagccacagatggcctgcggggcgtgagaagaaacagcagcttcagcacagcccggtctgctgctgctgaggccaagggccgcctggccgagagagctgccagccagggcagtgacagccccctgctgcctgcccagagaaattccatccctgtgtcccctgtgcggcccaagcccatcgagaagagccagttcatccacaacaacctgaaggatgtgtatgtgtccattgctgactatgaaggagatgaggagacagctggcttccaggagggcgtgtccatggaggtgctggagaggaaccccaacggctggtggtactgccagatcctggatggagtgaagcccttcaagggctgggtgcccagcaactacctggagaagaagaactag

SEQ ID NO: 283388 - DNA, 3003 bp, Artificial Sequence
  derived and/or modified sequence
atgaacggcagcttcctgctgcggctgctgttccccgtggccagcatcttgcctgaaacggtgttgctacgcggcgccgacgccactgcagagccaatgattttggagcagtatgtggtcgtgagcaactataagaagcaggaaaattctgaactgtccctgcaggcgggagaagttgtggatgtaattgaaaaaaatgagagtgggtggtggttcgtgtctacaagcgaagaacaaggctgggtccccgctacctatttagaggctcagaatgggactcgggatgactcagatatcaatacatcaaagactggcgaagtctcgaagcgcaggaaagcccaccttagaagactggatcggaggtggaccctcggcggtatggtcaatcgccagcatagtagggaagaaaagtacgtgactgtgcaaccttacacctcccagagcaaagatgaaataggcttcgagaagggcgttacagttgaagtgataagaaagaatctggaaggatggtggtacatccgttatctgggcaaagaaggctgggctcccgcctcatacttgaagaaagctaaggatgaccttcctacccggaagaagaatctcgccggcccggtcgagatcatcggtaacatcatggaaatcagcaatctgctgaataagaaggcaagtggcgacaaggaaactccgcccgctgaaggagaaggccacgaagcccccatagccaaaaaggaaattagcttaccgatcctatgcaacgcttccaacgggagcgccgtcggtgtcccggataggactgtctcaaggctcgcccagggaagtccggccgtggctagaatcgcgccccaaagagctcagatctcctccccaaacctgcgcacacggcccccaccaagacgggagagttctctcggtttccagctgccgaagccaccagagcccccttcagtggaagtagagtactatactatagccgaattccaaagttgcatctccgatgggatcagtttcaggggcggccagaaggccgaggtgattgacaaaaattccggaggctggtggtacgtgcaaattggcgaaaaagagggatgggcgccagctagctatatagacaagagaaagaaaccaaacttatcacgccgcaccagcacccttacaagaccaaaggtgcctccgcctgcccccccatcaaagccaaaagaagccgaagaaggtccaacaggagcttccgagagccaggactcccccagaaagttgaagtacgaagagccagagtacgacattcccgcctttggattcgatagcgaacccgaactctctgaggagcctgtggaggacagagccagtggcgaacggagaccagcccagcctcacagacctagcccagcaagctccctccagcgcgcccggtttaaggtgggagagagttcggaggatgtggctctggaagaagagacgatttacgagaatgaagggtttaggccctacgctgaggacaccctgagtgcccgggggtctagcggggattctgattcgcctggatcatcttctttgtcgctgacccggaagaacagcccaaaaagtggctctccaaagagcagcagccttttgaaactgaaagcagaaaagaacgcccaggccgagatggggaagaaccatagcagcgcttccttctcttctagcattaccattaacactacctgctgcagtagtagctccagctcgtcttcctcactttccaaaacctccggcgacctgaaaccaaggagcgcatcagatgccggcattagaggcactccaaaagttcgcgccaagaaagatgccgacgctaatgcaggattaactagctgtccacgcgccaagccttctgtgcggcctaaacccttcctcaaccgagccgagagccaatcacaagaaaagatggatatttctactctgcggaggcagctcaggcccacaggccagctgcgcgggggtctgaagggttcaaaaagcgaagactcagagcttcctccacagacagcctccgaggcaccgagtgagggaagccggcggagtagctccgacctgataactctgccagctacgactcctccttgccctacaaagaaggaatgggaagggccagctactagttatatgacttgtagcgcatatcagaaagtacaggacagcgaaataagttttccggccggtgtggaagtccaggtactcgagaagcaggaatccggttggtggtacgtccggtttggtgaattagaggggtgggcccctagtcattatctcgtgctggacgagaacgagcagccagatccgagcggcaaggagctggacaccgtgccagctaaaggccggcagaacgagggtaaaagcgattctcttgaaaagatcgagagaagagtccaggcgcttaatactgttaatcagtccaaaaaggctaccccccccatcccttccaagccgcccggcggcttcgggaagaccagcggcacaccagccgtgaaaatgagaaacggtgtgcggcaggtagctgtccggccccagtccgtgtttgtgagccctccgcctaaggataataatctgtcctgtgcactacgccgcaatgagtccttgacagccactgatgggctccgcggagtgcggcgcaactcctctttctctacagcacgcagcgcggcggcggaggccaaaggcagactcgcggagcgtgcggcatcccagggttcagattccccactcctgccagcccaacggaacagcattccagtgtcccccgtgcgtcccaagccgatcgagaaaagtcagttcatccataacaatctcaaggacgtctatgtgtccatcgccgactacgaaggggacgaggaaactgccggtttccaggaaggggtgtctatggaagtgctggagcgaaaccctaatggctggtggtactgtcagatactggatggcgtcaaacccttcaagggctgggtccccagcaattacctcgagaaaaagaattag

SEQ ID NO: 283389 - DNA, 3003 bp, Artificial Sequence
  derived and/or modified sequence
atgaacggttcattcctgttgcggttgctatttcccgtcgctagtatcctgcccgagaccgtgctgcttagaggggcagacgcaactgccgagccaatgatattggaacagtatgtcgtggtgtccaactataagaaacaggaaaactctgaactttctctgcaagccggagaggtggtagatgtgattgaaaagaatgagagcggctggtggttcgtgagcactagcgaagagcagggatgggtgccagcaacatacctggaagctcagaatggcactagagatgatagtgatattaatacctctaagacgggcgaggtatcaaagagaaggaaagctcacctgcgcaggttggacagaagatggacgctggggggaatggtgaatcggcagcattctagggaagagaagtacgtgaccgtgcagccctacacatcgcagagcaaagacgaaattgggtttgaaaagggagtcacggtcgaagttattagaaaaaatttggaagggtggtggtacatcagatatctaggaaaggaagggtgggcccctgcgtcctacctcaagaaagcaaaggacgacttacctacacgaaagaaaaacctcgctggacctgtggagattatcggcaacatcatggagattagcaatcttctgaacaagaaggccagcggcgataaagagacgcctcctgctgagggtgaaggacacgaggccccaatcgccaaaaaagaaatttccttgcctattttgtgtaatgcctcgaatggctcagccgttggcgtgcctgacagaacagtgagtcgcctggcgcagggctcgccggcagtcgccaggatcgcgccacagcgcgctcagatctctagtccgaatctccgaactcgcccacctcctagaagggaaagcagcctaggttttcagttgccgaaaccacccgaaccgccttctgtggaggtcgaatactataccatcgctgaattccagagttgcatttcagacggaatttcttttcgaggtggccaaaaggccgaggtaatcgacaagaactcggggggttggtggtatgtgcagattggcgaaaaagagggatgggccccagcgtcatacattgataagcgaaaaaagccgaatctttccagacgcacatccacactgacccggccaaaggttccccctccagccccaccaagcaaacccaaggaggctgaggagggcccaaccggagcaagtgagtcccaggacagtcctaggaagctcaaatatgaagaacccgagtatgatatacccgctttcgggttcgactctgaaccagaactgtcagaggaaccagtcgaggacagagcatcgggagagcgtcggcctgcacagcctcacagaccctcgccagccagctcactccaacgcgctcgctttaaagttggagagtctagcgaggatgtggcactcgaggaagagacaatctatgagaatgaggggtttagaccatacgctgaggacacgctctctgctagaggaagcagcggagattcagactcgcccggaagttcatcactgtcgctgacacgtaagaactcccctaagagcggctcgccaaagtcatccagtctgctcaagctaaaggctgagaaaaacgcccaggcggaaatgggcaagaatcatagcagtgcgagcttctcttcatctataactatcaataccacatgctgttctagtagctcctcttccagcagctctcttagtaagacctccggagatctgaaaccccgaagcgcaagcgacgcaggaattcgcggtaccccaaaggtgagggccaaaaaagacgcggatgccaatgccggattaacttcttgcccacgagctaaaccatcagtgcgccctaaacccttcctcaaccgagccgagagtcagtctcaggaaaaaatggacatcagtaccctccgtagacagctcaggccaactgggcagttgcgtggtggactaaagggcagcaagtcggaagatagcgagctacctcctcagacagcttcagaggccccttcggagggctcaagacgatcctcttctgacctgatcacattgcctgcaaccacgcctccttgccccacaaagaaagaatgggagggacccgctactagctacatgacttgctccgcatatcagaaagtccaggactccgagatatcttttcctgccggtgttgaagtccaggtgctggaaaaacaagagtcgggctggtggtacgtgcgtttcggagagctcgagggatgggctccttcacattacttggttctggacgagaacgaacagcccgacccatctggcaaagaactggataccgtgcccgcaaaaggacggcaaaatgaggggaagagcgactcactcgagaagatcgaaagaagggtgcaggccctgaacacggtaaaccagtccaagaaggcaacaccccctatcccttctaagccccctggcggtttcgggaaaacaagtggcacccctgctgttaagatgcgcaatggcgttcgacaggttgcagtacggccacagagtgtgtttgtcagccccccacccaaggataataatctgtcctgtgcactgcgaaggaacgaatcgctcacagccacagatggcctccggggagtgagaaggaattcttcattcagtaccgcgaggtccgccgcagctgaggccaagggccgactagcggaacgggcagcctctcagggaagtgacagtcccctcctgcccgcacagcggaattccatcccagttagcccggtgaggcccaagccaatcgaaaagtcccagttcatccataacaacttgaaagatgtctatgtatccatcgcagattacgagggagacgaggagactgccggatttcaggaaggtgtctccatggaggtgctggagaggaatcccaacggttggtggtattgccagatcttggacggcgtgaaacccttcaaggggtgggtccccagtaactatctggagaaaaagaactag

SEQ ID NO: 283390 - DNA, 3117 bp, Artificial Sequence
  derived and/or modified sequence
agacattacacatgaacgggtcgttcctgctccggctcctgtttcctgtagcgtccatcctgccagagactgtactgcttaggggtgccgacgccaccgccgagcccatgatcctggaacagtacgtggtggtgtccaactataagaagcaggagaactcggagctgagcctccaggccggggaggtggtggatgtcatcgagaagaacgagagcggctggtggttcgtgagcacttctgaggagcagggctgggtccctgccacctacctggaggcccagaatggtactcgggatgactccgacatcaacacctctaagactggagaagtgtccaagagacgcaaggcccatctgcggcgcctggatcgccggtggaccctgggcgggatggtcaacaggcagcacagccgagaggagaagtatgtcaccgtgcagccttacaccagccaaagcaaggacgagattggctttgagaagggcgtcacagtggaggtgatccggaagaatctggaaggctggtggtatatcagatacctgggcaaagagggctgggcgccagcatcctacctgaagaaggccaaggatgacctgccaacccggaagaagaacctggccggcccagtggagatcattgggaacatcatggagatcagcaacctgctgaacaagaaggcgtctggggacaaggaaactccaccagccgaaggcgagggccatgaggcccccattgccaagaaggagatcagcctgcccatcctctgcaatgcctccaatggcagtgccgtgggcgttcctgacaggactgtctccaggctggcccagggctctccagctgtggccaggattgcccctcagcgggcccagatcagctccccgaacctacggacaagacctccaccacgcagagaatccagcctggggttccaactgccaaagccaccagagcccccttctgttgaggtggagtactacaccattgccgaattccagtcgtgcatttccgatggcatcagctttcggggtggacagaaggcagaggtcattgataagaactcaggtggctggtggtacgtgcagatcggtgagaaggagggctgggcccccgcatcatacatcgataagcgcaagaagcccaacctgagccgccgcacaagcacgctgacccggcccaaggtgcccccgccagcaccccccagcaagcccaaggaggccgaggagggccctacgggggccagtgagagccaggactccccgcggaagctcaagtatgaggagcctgagtatgacatccctgcattcggctttgactcagagcctgagctgagcgaggagcccgtggaggacagagcctcaggggagaggcggcctgcccagccccaccggccctcgccggcctcttctctgcagcgggcccgcttcaaggtgggtgagtcttcagaggatgtggccctggaagaggagaccatctatgagaatgagggcttccggccatatgcagaggacaccctgtcagccagaggctcctccggggacagcgactccccaggcagctcctcgctgtccctgaccaggaaaaactcccccaaatcaggctcccccaagtcatcatcactcctaaagctcaaggcagagaagaatgcccaggcagaaatggggaagaaccactcctcagcctccttttcctcatccatcaccatcaacaccacttgctgctcctcctcttcctcctcctcctcttccttgtccaaaaccagtggcgacctgaagccccgctctgcttcggacgcaggcatccgcggcactcccaaggtcagggcaaagaaggatgctgatgcgaacgctgggctgacctcctgtccccgggccaagccatcggtccggcccaagccattcctaaaccgagcagagtcgcagagccaagagaagatggacatcagcactttacggcgccagctgagacccacaggccagctccgtggagggctcaagggctccaagagtgaggattcggagctgcccccgcagacggcctccgaggctcccagtgaggggtctaggagaagctcatccgacctcatcaccctcccagccaccactcccccatgtcccaccaagaaggaatgggaagggccagccacctcgtacatgacatgcagcgcctaccagaaggtccaggactcggagatcagcttccccgcgggcgtggaggtgcaggtgctggagaagcaggagagcgggtggtggtatgtgaggtttggggagctggagggctgggccccttcccactatttggtgctggatgagaacgagcaacctgacccctctggcaaagagctggacacagtgcccgccaagggcaggcagaacgaaggcaaatcagacagcctggagaagatcgagaggcgcgtccaagcactgaacaccgtcaaccagagcaagaaggccacgccccccatcccctccaaacctcccgggggcttcggcaagacctcaggcactccagcggtgaagatgaggaacggagtgcggcaggtggcggtcaggccccagtcggtgtttgtgtccccgccacccaaggacaacaacctgtcctgcgccctgcggaggaatgagtcactcacggccactgatggcctccgaggcgtccgacggaactcctcctttagcactgctcgctccgctgccgccgaggccaagggccgcctggccgaacgggctgccagccagggttcagactcacccctactgcccgcccagcgcaacagcatacccgtgtcccctgtgcgccccaagcccatcgagaagtctcagttcatccacaataacctcaaagatgtgtacgtctctatcgcagactacgagggggatgaggagacagcaggcttccaggagggggtgtccatggaggttctggagaggaaccctaatggctggtggtactgccagatcctggatggtgtgaagcccttcaaaggctgggtgccttccaactaccttgagaaaaagaactagcagagggcctgggctcttccagcctcagtgtgcctctctggccgcccactggatgagcggtgagacgaacaaaagggaaaggaaaaaatgggggtggggggtg

SEQ ID NO: 283391 - protein, 968 aa, Artificial Sequence
  derived and/or modified sequence
MILEQYVVVSNYKKQENSELSLQAGEVVDVIEKNESGWWFVSTSEEQGWVPATYLEAQNGTRDDSDINTSKTGEVSKRRKAHLRRLDRRWTLGGMVNRQHSREEKYVTVQPYTSQSKDEIGFEKGVTVEVIRKNLEGWWYIRYLGKEGWAPASYLKKAKDDLPTRKKNLAGPVEIIGNIMEISNLLNKKASGDKETPPAEGEGHEAPIAKKEISLPILCNASNGSAVGVPDRTVSRLAQGSPAVARIAPQRAQISSPNLRTRPPPRRESSLGFQLPKPPEPPSVEVEYYTIAEFQSCISDGISFRGGQKAEVIDKNSGGWWYVQIGEKEGWAPASYIDKRKKPNLSRRTSTLTRPKVPPPAPPSKPKEAEEGPTGASESQDSPRKLKYEEPEYDIPAFGFDSEPELSEEPVEDRASGERRPAQPHRPSPASSLQRARFKVGESSEDVALEEETIYENEGFRPYAEDTLSARGSSGDSDSPGSSSLSLTRKNSPKSGSPKSSSLLKLKAEKNAQAEMGKNHSSASFSSSITINTTCCSSSSSSSSSLSKTSGDLKPRSASDAGIRGTPKVRAKKDADANAGLTSCPRAKPSVRPKPFLNRAESQSQEKMDISTLRRQLRPTGQLRGGLKGSKSEDSELPPQTASEAPSEGSRRSSSDLITLPATTPPCPTKKEWEGPATSYMTCSAYQKVQDSEISFPAGVEVQVLEKQESGWWYVRFGELEGWAPSHYLVLDENEQPDPSGKELDTVPAKGRQNEGKSDSLEKIERRVQALNTVNQSKKATPPIPSKPPGGFGKTSGTPAVKMRNGVRQVAVRPQSVFVSPPPKDNNLSCALRRNESLTATDGLRGVRRNSSFSTARSAAAEAKGRLAERAASQGSDSPLLPAQRNSIPVSPVRPKPIEKSQFIHNNLKDVYVSIADYEGDEETAGFQEGVSMEVLERNPNGWWYCQILDGVKPFKGWVPSNYLEKKN

SEQ ID NO: 283392 - DNA, 2907 bp, Artificial Sequence
  derived and/or modified sequence
atgatcctggagcagtacgtggtggtgagcaactacaagaagcaggagaacagcgagctgagcctgcaggccggcgaggtggtggacgtgatcgagaagaacgagagcggctggtggttcgtgagcaccagcgaggagcagggctgggtgcccgccacctacctggaggcccagaacggcaccagagacgacagcgacatcaacaccagcaagaccggcgaggtgagcaagagaagaaaggcccacctgagaagactggacagaagatggaccctgggcggcatggtgaacagacagcacagcagagaggagaagtacgtgaccgtgcagccctacaccagccagagcaaggacgagatcggcttcgagaagggcgtgaccgtggaggtgatcagaaagaacctggagggctggtggtacatcagatacctgggcaaggagggctgggcccccgccagctacctgaagaaggccaaggacgacctgcccaccagaaagaagaacctggccggccccgtggagatcatcggcaacatcatggagatcagcaacctgctgaacaagaaggccagcggcgacaaggagaccccccccgccgagggcgagggccacgaggcccccatcgccaagaaggagatcagcctgcccatcctgtgcaacgccagcaacggcagcgccgtgggcgtgcccgacagaaccgtgagcagactggcccagggcagccccgccgtggccagaatcgccccccagagagcccagatcagcagccccaacctgagaaccagacccccccccagaagagagagcagcctgggcttccagctgcccaagccccccgagccccccagcgtggaggtggagtactacaccatcgccgagttccagagctgcatcagcgacggcatcagcttcagaggcggccagaaggccgaggtgatcgacaagaacagcggcggctggtggtacgtgcagatcggcgagaaggagggctgggcccccgccagctacatcgacaagagaaagaagcccaacctgagcagaagaaccagcaccctgaccagacccaaggtgcccccccccgccccccccagcaagcccaaggaggccgaggagggccccaccggcgccagcgagagccaggacagccccagaaagctgaagtacgaggagcccgagtacgacatccccgccttcggcttcgacagcgagcccgagctgagcgaggagcccgtggaggacagagccagcggcgagagaagacccgcccagccccacagacccagccccgccagcagcctgcagagagccagattcaaggtgggcgagagcagcgaggacgtggccctggaggaggagaccatctacgagaacgagggcttcagaccctacgccgaggacaccctgagcgccagaggcagcagcggcgacagcgacagccccggcagcagcagcctgagcctgaccagaaagaacagccccaagagcggcagccccaagagcagcagcctgctgaagctgaaggccgagaagaacgcccaggccgagatgggcaagaaccacagcagcgccagcttcagcagcagcatcaccatcaacaccacctgctgcagcagcagcagcagcagcagcagcagcctgagcaagaccagcggcgacctgaagcccagaagcgccagcgacgccggcatcagaggcacccccaaggtgagagccaagaaggacgccgacgccaacgccggcctgaccagctgccccagagccaagcccagcgtgagacccaagcccttcctgaacagagccgagagccagagccaggagaagatggacatcagcaccctgagaagacagctgagacccaccggccagctgagaggcggcctgaagggcagcaagagcgaggacagcgagctgcccccccagaccgccagcgaggcccccagcgagggcagcagaagaagcagcagcgacctgatcaccctgcccgccaccacccccccctgccccaccaagaaggagtgggagggccccgccaccagctacatgacctgcagcgcctaccagaaggtgcaggacagcgagatcagcttccccgccggcgtggaggtgcaggtgctggagaagcaggagagcggctggtggtacgtgagattcggcgagctggagggctgggcccccagccactacctggtgctggacgagaacgagcagcccgaccccagcggcaaggagctggacaccgtgcccgccaagggcagacagaacgagggcaagagcgacagcctggagaagatcgagagaagagtgcaggccctgaacaccgtgaaccagagcaagaaggccaccccccccatccccagcaagccccccggcggcttcggcaagaccagcggcacccccgccgtgaagatgagaaacggcgtgagacaggtggccgtgagaccccagagcgtgttcgtgagccccccccccaaggacaacaacctgagctgcgccctgagaagaaacgagagcctgaccgccaccgacggcctgagaggcgtgagaagaaacagcagcttcagcaccgccagaagcgccgccgccgaggccaagggcagactggccgagagagccgccagccagggcagcgacagccccctgctgcccgcccagagaaacagcatccccgtgagccccgtgagacccaagcccatcgagaagagccagttcatccacaacaacctgaaggacgtgtacgtgagcatcgccgactacgagggcgacgaggagaccgccggcttccaggagggcgtgagcatggaggtgctggagagaaaccccaacggctggtggtactgccagatcctggacggcgtgaagcccttcaagggctgggtgcccagcaactacctggagaagaagaactag

SEQ ID NO: 283393 - DNA, 2907 bp, Artificial Sequence
  derived and/or modified sequence
atgatcttagagcagtatgttgtggtatctaattacaagaagcaggaaaattctgagctgagtttgcaggccggcgaggtggtggatgtaatcgagaaaaacgagagtggatggtggtttgtctctacatccgaagagcagggatgggttcctgccacctacttggaggcccaaaacggcaccagagatgattctgacattaatacctccaagaccggcgaggtgtccaaacggaggaaagcccaccttcggcggcttgacaggcgatggacactgggcggcatggtcaataggcagcactcccgagaggaaaagtatgttactgtccagccgtacacttcccagtccaaggacgagattgggttcgagaaaggtgtgaccgtggaagttattagaaagaacctggagggctggtggtacatcagatacctcgggaaggagggctgggctccggctagctacctcaagaaggcaaaagacgaccttcctacacgtaaaaagaacctggcaggacctgttgaaattattggcaatattatggaaatctcgaacctgctgaacaaaaaagccagtggggacaaggagacccctcccgccgaaggcgaggggcatgaggcaccaatagcaaagaaggagatatcactgccaatcctctgcaatgcaagcaacggcagtgcagtcggagtgcctgatcggaccgtgtctagactcgctcaggggagtcccgctgttgctaggattgcacctcaaagagcccagatatcgtccccgaacctgagaactcggccaccccccagacgggaaagctcactgggattccagttgccaaagccacccgaaccaccttcggtggaggtagaatattataccatcgctgaattccagtcatgtatttctgacggaatatcgttccggggggggcagaaagcggaggtgattgacaagaattcgggtggatggtggtacgtacaaattggggaaaaagagggatgggccccggcaagttatatcgataagcgtaagaagcctaatctttcccggagaacaagcaccctgaccagaccaaaagtccccccccccgctccccccagcaagccgaaagaagcggaagagggacctactggggccagcgaaagtcaggactcacccaggaagctgaaatacgaggagccagagtatgatattcccgcattcggcttcgactccgagccagaactctctgaagagcccgtggaggatcgagccagcggagaacggagaccagctcaaccacatcgcccctcccctgcttcaagcttgcaacgcgcccgcttcaaagttggcgaatctagtgaagatgtggcactggaggaagagaccatctatgaaaacgagggattccgcccttatgccgaggacacactgagtgcgagaggctccagcggcgattcagatagtcccgggtctagcagcctgtcactcaccagaaagaacagtcctaagtccggatcacccaagtccagcagcttattaaaattgaaggccgagaagaatgcccaggctgaaatgggcaaaaatcatagtagcgcgtctttttcatcatcaatcacaatcaataccacatgttgttcgagttcttcctcttcttcctcaagcctgtcaaaaacatctggggacttgaaaccacgcagcgccagtgacgctggtatccgcggaacaccaaaggttcgcgcaaagaaagatgccgatgccaacgctggcctcactagctgccctagggccaagccctcagtacggccaaagccttttttgaacagagccgaatctcagtcccaggagaagatggatatcagtacactccgccggcagctgaggcctactggccaacttcggggtggtctcaagggaagcaaatcggaagacagcgagttgccacctcagactgccagcgaagctccatccgaaggctcacggcggtcatctagcgatctgatcacactccccgcaacaaccccaccatgccccaccaaaaaggagtgggaaggacctgccactagctacatgacatgctcagcatatcaaaaggtgcaggactcagagatcagcttcccagcaggcgtcgaagttcaggtgctcgagaagcaggagtcaggttggtggtacgtcagatttggtgagctcgaggggtgggccccctcacattacctggtgcttgacgaaaacgaacagccagacccctctgggaaggaacttgataccgttccagcaaaggggcgacagaacgagggcaagtctgactccctggagaaaatcgaacgccgggtgcaggcactcaataccgttaaccagagcaaaaaggccacccctcccataccttcgaagcctccaggcggattcggcaagaccagtggtacgcctgctgtaaaaatgcgcaacggcgtaagacaggtcgccgttcggccacaatccgtatttgtgtcacccccacctaaagataataacttgtcttgcgcacttcggagaaacgagtctctcaccgctaccgatggattacgaggcgttagaaggaattcgagtttctcaacggctcggtccgctgccgcggaggcgaaggggcgcctagccgagcgggctgcctcccagggatctgactccccactgctgccagctcaacgtaacagtatacctgtaagtcctgttcggccgaagccgatcgagaagagccagtttatacataacaatctgaaggacgtgtacgtgtcgatagctgactatgagggagacgaggaaaccgccggctttcaagagggggtctctatggaagtattggagagaaatcctaacggatggtggtactgtcagatactcgacggtgtgaaaccattcaaaggctgggtcccaagtaattatctggaaaagaagaactag

SEQ ID NO: 283394 - DNA, 2907 bp, Artificial Sequence
  derived and/or modified sequence
atgatcctggagcagtatgtggtggtgagcaactacaagaagcaggagaacagcgagctgagcctgcaggccggggaggtggtggatgtgattgagaagaatgaaagtggctggtggtttgtgtccaccagcgaggagcagggctgggtgcctgccacctacctggaggcccagaatggcaccagagatgacagcgacatcaacaccagcaagacaggagaggtgtccaagaggaggaaggcccacctgcggcggctggaccggcgctggaccctgggcggcatggtgaaccggcagcacagccgggaggagaagtatgtgacagtgcagccctacaccagccagagcaaggatgagatcggctttgagaagggcgtgacagtggaggtgatcaggaagaacctggagggctggtggtacatccgctacctgggcaaggagggctgggccccagccagctacctgaagaaggccaaggatgacctgcccaccaggaagaagaacctggccggccctgtggagatcatcggcaacatcatggagatcagcaacctgctgaacaagaaggccagcggggacaaggagaccccacctgctgagggggagggccacgaggcccccatcgccaagaaggagatcagcctgcccatcctgtgcaatgccagcaatggatctgctgtgggcgtgcctgacagaacagtgtcccggctggcccagggcagccctgctgtggccagaattgccccccagagggcccagatcagcagccccaacctgcggacccggcccccaccccggcgggagagcagcctgggcttccagctgcccaagcccccagagcccccatctgtggaggtggagtactacaccatcgccgagttccagagctgcatcagtgatggcatctccttccggggcggccagaaggccgaggtgattgacaagaacagcggcggctggtggtacgtgcagattggagagaaggagggctgggccccagccagctacatcgacaagaggaagaagcccaacctgagcaggaggaccagcaccctgacccggcccaaggtgcccccaccagccccacccagcaagcccaaggaggccgaggagggccccaccggggccagcgagagccaggacagccccaggaagctgaagtatgaggagccagaatatgacatcccagccttcggctttgacagcgagcctgagctgtctgaggagcctgtggaggaccgggccagcggggagaggaggcctgcccagccccaccggcccagccctgccagcagcctgcagagggcccgcttcaaggtgggggagagcagtgaagatgtggccctggaggaggagaccatctatgaaaatgaaggcttccggccctatgcagaggacaccctgagcgcccggggcagcagcggggacagcgacagccctggcagcagcagcctgagcctgaccaggaagaacagccccaagagcggcagccccaagagcagcagcctgctgaagctgaaggccgagaagaatgcccaggccgagatgggcaagaaccacagcagcgccagcttcagcagcagcatcaccatcaacaccacctgctgcagcagcagcagcagcagcagcagcagcctgagcaagaccagcggggacctgaagcccaggtctgccagtgatgctggcatccggggcacccccaaggtgcgggccaagaaggatgctgatgccaatgccggcctgaccagctgcccccgggccaagcccagcgtgcggcccaagcccttcctgaacagagctgagagccagagccaggagaagatggacatcagcaccctgcggcggcagctgcggcccaccggccagctgcggggcggcctgaagggcagcaagtcagaagattctgagctgcccccccagacagccagcgaggcccccagcgagggcagcagaagaagcagcagtgacctgatcaccctgcctgccaccaccccaccctgccccaccaagaaggagtgggagggccctgccaccagctacatgacctgcagcgcctaccagaaggtgcaggacagcgagatctccttccctgctggggtggaggtgcaggtgctggagaagcaggagagcggctggtggtacgtgcgctttggagagctggagggctgggcccccagccactacctggtgctggatgaaaatgagcagcctgaccccagcggcaaggagctggacacagtgcctgccaagggccggcagaatgaaggcaagagtgacagcctggagaagattgaaagaagagtgcaggccctgaacacagtgaaccagagcaagaaggccaccccacccatccccagcaagcccccaggcggctttgggaagaccagcggcaccccagctgtgaagatgagaaatggagtgcggcaggtggccgtgcggccccagagcgtgtttgtgtccccaccacccaaggacaacaacctgagctgtgccctgcggagaaatgaaagcctgacagccacagatggcctgcggggcgtgagaagaaacagcagcttcagcacagcccggtctgctgctgctgaggccaagggccgcctggccgagagagctgccagccagggcagtgacagccccctgctgcctgcccagagaaattccatccctgtgtcccctgtgcggcccaagcccatcgagaagagccagttcatccacaacaacctgaaggatgtgtatgtgtccattgctgactatgaaggagatgaggagacagctggcttccaggagggcgtgtccatggaggtgctggagaggaaccccaacggctggtggtactgccagatcctggatggagtgaagcccttcaagggctgggtgcccagcaactacctggagaagaagaactag

SEQ ID NO: 283395 - DNA, 2907 bp, Artificial Sequence
  derived and/or modified sequence
atgatcctggagcagtacgtggtggtgagcaactacaagaagcaggagaactccgaattgagtctgcaggccggcgaagtggtagatgttatcgagaagaacgaatccggatggtggtttgtgagtacatcagaggagcaggggtgggtgccagctacctaccttgaagctcagaacggcaccagggacgatagcgacattaatacaagtaaaacaggggaagtgagcaaacggcgaaaagcgcatcttagacgtctggacagacggtggacgctcggaggaatggtgaataggcagcacagcagggaagaaaaatacgtcaccgttcagccctacactagccaaagtaaggacgagattggatttgagaaaggcgtaacagtggaggtgattcgaaaaaatctggaagggtggtggtacattagatacctcgggaaggagggatgggcccccgcctcttacctaaaaaaggcaaaagacgacctccccacacgcaagaaaaacctcgcgggcccggtggaaattatcgggaacatcatggaaattagcaaccttttgaataaaaaggcttctggggacaaagaaacgcccccagcagaaggcgaaggtcatgaggctcccatagccaaaaaagagatttccttgccgatcctctgtaatgcatcaaatggctcagccgtcggggtgccggaccgcacggtgagccgtttagctcaggggagtcctgccgtggctcgcatagcacctcagcgcgctcagatctcttctcctaacctgaggactcgccccccaccaagacgtgaaagttctcttggtttccaactgcctaagcccccggaaccacctagcgtagaagtggaatattataccatcgctgagtttcagagctgtatttctgatggaatcagctttaggggagggcagaaggcagaggtaatcgataagaattctggaggctggtggtatgtccaaattggagaaaaggagggatgggcccccgcaagttatattgataaacgcaaaaagccaaacctgtctcgccgtacttcgaccttaacccgccctaaggtgcctcctcccgcccccccctcgaagcctaaagaggcggaggaagggccaactggagcttcggagagccaggatagcccacggaaacttaagtacgaggagccagaatatgacattccagcctttggatttgattcagaaccggagttgtctgaagaaccagtagaagatcgcgcttccggagagcgccggccagcacagccgcaccgcccatctccagcgtcttccctccagagagctagattcaaggtgggcgagtcgtccgaggacgtcgctcttgaggaggaaactatctacgagaacgagggatttcgaccttatgctgaagatactttaagcgcgcgggggagcagcggtgatagcgattcacctgggagttcttctctgagcctgacccgaaaaaattcccccaagtctggatccccaaagagcagctctttgctcaagcttaaggcagaaaagaacgcacaggccgaaatgggcaaaaatcattcttctgcatcattctcatcttctattacaataaacacaacttgttgctcgagcagctcctcctcatctagcagcctctctaaaacatctggagatcttaaaccaagatccgccagcgacgccggcatccgtgggacacctaaggttagggcgaaaaaggacgccgatgctaacgcggggcttactagttgcccacgggcgaagccatccgtccggcctaaaccctttctaaatagagcagaatcgcagtctcaggaaaaaatggatatcagcactctacgccggcagttgcgcccgaccggacagctcaggggtggtctcaaggggtctaagtccgaggactccgagctaccacctcagactgcctcagaagctccctccgaggggtctcgtcgaagctcatctgatctgattacgcttccagctacaactccaccctgtccgaccaaaaaggaatgggagggccccgccacaagctatatgacgtgtagtgcctaccagaaggtgcaggatagcgaaatcagtttcccagctggtgtggaagtgcaggtgctggagaagcaggaaagtggctggtggtacgttcgctttggcgaactagaaggatgggccccctctcactacctggttctggatgagaatgaacagccagatcccagtggaaaggagctcgacaccgtgccagcaaagggacgacagaatgaaggcaagtccgattctctcgagaagattgagagacgggtacaagctctgaacacggtgaatcagagcaaaaaagctacgcctcccatcccttcaaaaccacccggggggtttggtaaaacatccggcaccccagcggtcaaaatgagaaacggagtacgtcaggtcgctgtgcggccacagtcagtgttcgtcagtcccccacccaaagacaacaacctgtcttgtgcgctacgaaggaacgagagcttgactgctactgatggcctccgcggggtccgccgcaattcgagcttcagtactgcccgctccgccgcagctgaagccaaggggcggctcgccgagagagctgcctctcagggcagcgatagccccctgctgcccgctcaacgaaatagtattccggtttcccctgttagacccaaaccgatcgagaagagccagtttatccacaacaatctcaaggacgtctatgtatcaatcgcggactacgagggagatgaggagacggccggattccaggaaggcgtttcgatggaggttcttgaaagaaatccaaacggctggtggtactgccagatcttggacggtgtcaagccctttaaaggatgggtgccatccaactacctcgagaagaagaactag

SEQ ID NO: 283396 - DNA, 2907 bp, Artificial Sequence
  derived and/or modified sequence
atgatcctcgaacagtacgtggtggtctctaattataagaaacaggagaattcagagctgtcacttcaggccggagaagtagttgatgtgattgagaaaaatgagtccggatggtggttcgttagcacctctgaagaacagggctgggtgcctgccacctatctggaggctcagaatgggacacgagacgacagtgatattaacacctccaagaccggagaagtttccaagagacggaaggcacacttacggaggctcgatagacgatggactctgggcggaatggtgaaccggcaacattcccgcgaggagaaatacgtgacagtgcagccctataccagccagagcaaagatgaaatcggctttgagaaaggcgtgacggtggaagtgatccggaaaaatttggaggggtggtggtatatccggtatctaggcaaagagggctgggctccggcttcttatctgaaaaaggctaaggacgacctcccaactcgcaagaagaacctggccggtccagtagagatcatcgggaacataatggagattagcaatttgcttaataaaaaggcatcaggcgacaaggaaacccctccagcggagggcgaaggccatgaggccccaatcgccaagaaggagatttccctgcccatactttgtaacgcctccaacggatcagcggttggggtgccagaccgcaccgtaagcagactcgcccaggggtcgccggctgtggcgaggatagccccacaacgggctcagatttccagtcctaacctgcgtactcgaccgcctccgcgaagggaatcctctctgggattccagctgcccaaacctccagagccgccttcagtggaggtggagtattatacaatcgctgagtttcaatcctgcatctcggacgggatctcctttcggggaggacaaaaagccgaagttatcgacaagaacagtgggggttggtggtacgtccagattggggaaaaggaagggtgggcaccagctagctatatcgataagagaaaaaagcccaatttgtcgcggcgaacgagcaccctgacgcgtcccaaagtccctcctccggctcctccctctaagcctaaggaagctgaggaaggacccacgggagcatcagagtcccaagacagccctaggaaacttaaatatgaggagccagaatacgacatacccgcttttggatttgattccgaaccagagctgtcagaggaaccagtggaggaccgggcatcaggcgagaggcgccctgcccagccccatcgcccttcccccgcatcgagtctgcagagagccaggttcaaagtgggggaatcaagcgaagatgtcgcactggaagaggagactatttatgagaatgaggggttccggccatatgcggaggacactctctctgctcgagggtctagcggggactctgactctcctggtagctctagcctgtctctgaccaggaagaactcccccaagtcaggttccccgaagtcatctagcctgttaaagcttaaggctgagaaaaatgcccaggccgagatgggaaaaaatcatagctccgcgtcctttagctcaagcatcacaattaatacaacatgttgttcatctagcagcagctcttctagctccctgtccaagacttccggcgatctcaaacccaggagcgcctccgatgcagggatccggggtaccccgaaggtaagagccaaaaaagatgccgatgccaacgctggactcacatcctgccctagagcgaaacccagcgtccgcccaaaaccatttctgaaccgcgctgaatctcagtctcaagagaagatggacatctcaactctccggaggcagcttagacccacaggacagctgagggggggacttaagggatcaaagtccgaagacagtgagctcccccctcagaccgccagcgaggcaccaagcgaaggcagcagacgcagctcatccgatcttattactcttcctgcaactacaccaccctgccccactaagaaagagtgggaggggcctgccactagctacatgacttgctctgcctatcaaaaggttcaggatagcgagatcagttttcccgctggtgtcgaggtgcaggttctggaaaaacaggaatcgggctggtggtacgtgcggtttggcgagctggagggttgggccccatcccactacctagtactcgatgaaaatgagcagccagacccctctggtaaggagcttgacaccgtgcctgccaagggtaggcagaacgaggggaagtctgatagccttgagaagattgagaggcgcgtgcaagcactgaatacggtcaaccagagtaagaaggccacccctcctatcccatcaaaacctcctggaggctttgggaagaccagcgggactcctgctgttaaaatgcgtaatggtgtacgccaagttgccgtaagacctcagagtgtcttcgtgagtcccccaccgaaagacaataacttgagttgcgcattgaggaggaatgagagcttaactgctactgacggccttcggggagtcaggcggaatagcagcttctccacggcacgttctgccgctgcagaggccaagggcaggctcgcagagagagccgcatcacaggggagcgatagcccactgctgccagcccagagaaatagcatccctgtgtctcccgtacgccctaaacccatcgaaaagtctcaattcattcacaacaatctcaaggatgtctacgttagcatagcagactatgaaggggacgaggaaaccgccggttttcaggaaggagtgagcatggaggtgctagagcgcaatccgaacggctggtggtattgtcagattctggacggagtcaagccttttaagggatgggtgcccagcaactacctagaaaagaaaaactag

SEQ ID NO: 283397 - protein, 421 aa, Artificial Sequence
  derived and/or modified sequence
MRLRKLPDSFFKPPEPKSHSRQASTDAGTAGALTPQHVRAHSSPASLQLGAVSPGTLTPTGVVSGPAATPTAQHLRQSSFEIPDDVPLPAGWEMAKTSSGQRYFLNHIDQTTTWQDPRKAMLSQMNVTAPTSPPVQQNMMNSASGPLPDGWEQAMTQDGEIYYINHKNKTTSWLDPRLDPRFGKAMNQRISQSAPVKQPPPLAPQSPQGGVMGGSNSNQQQQMRLQQLQMEKERLRLKQQELLRQAMRNINPSTANSPKCQELALRSQLPTLEQDGGTQNPVSSPGMSQELRTMTTNSSDPFLNSGTYHSRDESTDSGLSMSSYSVPRTPDDFLNSVDEMDTGDTINQSTLPSQQNRFPDYLEAIPGTNVDLGTLEGDGMNIEGEELMPSLQEALSSDILNDMESVLAATKLDKESFLTWL

SEQ ID NO: 283398 - DNA, 1266 bp, Artificial Sequence
  derived and/or modified sequence
atgagactgagaaagctgcccgacagcttcttcaagccccccgagcccaagagccacagcagacaggccagcaccgacgccggcaccgccggcgccctgaccccccagcacgtgagagcccacagcagccccgccagcctgcagctgggcgccgtgagccccggcaccctgacccccaccggcgtggtgagcggccccgccgccacccccaccgcccagcacctgagacagagcagcttcgagatccccgacgacgtgcccctgcccgccggctgggagatggccaagaccagcagcggccagagatacttcctgaaccacatcgaccagaccaccacctggcaggaccccagaaaggccatgctgagccagatgaacgtgaccgcccccaccagcccccccgtgcagcagaacatgatgaacagcgccagcggccccctgcccgacggctgggagcaggccatgacccaggacggcgagatctactacatcaaccacaagaacaagaccaccagctggctggaccccagactggaccccagattcggcaaggccatgaaccagagaatcagccagagcgcccccgtgaagcagcccccccccctggccccccagagcccccagggcggcgtgatgggcggcagcaacagcaaccagcagcagcagatgagactgcagcagctgcagatggagaaggagagactgagactgaagcagcaggagctgctgagacaggccatgagaaacatcaaccccagcaccgccaacagccccaagtgccaggagctggccctgagaagccagctgcccaccctggagcaggacggcggcacccagaaccccgtgagcagccccggcatgagccaggagctgagaaccatgaccaccaacagcagcgaccccttcctgaacagcggcacctaccacagcagagacgagagcaccgacagcggcctgagcatgagcagctacagcgtgcccagaacccccgacgacttcctgaacagcgtggacgagatggacaccggcgacaccatcaaccagagcaccctgcccagccagcagaacagattccccgactacctggaggccatccccggcaccaacgtggacctgggcaccctggagggcgacggcatgaacatcgagggcgaggagctgatgcccagcctgcaggaggccctgagcagcgacatcctgaacgacatggagagcgtgctggccgccaccaagctggacaaggagagcttcctgacctggctgtag

SEQ ID NO: 283399 - DNA, 1266 bp, Artificial Sequence
  derived and/or modified sequence
atgcggttgagaaaactccccgactcattcttcaaacctccagaaccaaaatctcatagtcgccaggccagcaccgatgcaggcacggctggagcactcaccccccagcacgtgagggctcatagcagccctgcctctttgcagttaggtgccgtgtcacctggaacactgactccaactggcgttgttagcggcccggctgcaacacccacagcgcaacatctgaggcagtcaagtttcgagataccagacgatgttccgctcccagccggatgggagatggctaaaacttcatcaggacaacgctacttcctcaatcacatagaccagactaccacctggcaggatcccaggaaggctatgttatcgcaaatgaacgtgacggctccaacctcgcctcccgtgcagcagaatatgatgaattctgcttccggcccactgcccgatggatgggaacaggctatgacacaggatggggaaatctactacattaatcataaaaataaaaccacgtcctggctagatcccaggttggatcccagatttggcaaggcaatgaaccagaggatatcgcaatccgcgcccgtgaagcaaccacctcctctggcgccccagtcccctcaaggcggggtaatgggaggctctaacagtaaccagcagcagcagatgcgactgcaacagttgcagatggagaaggaacgcctgcgactgaagcaacaggaactactgcgtcaggccatgaggaatatcaatccctctactgccaactcgccgaaatgtcaggaactggcccttagatcacagcttccaacactggagcaagacggagggactcaaaatcctgtctcctctcccggcatgtcgcaagagctccgcaccatgaccaccaattcctcagacccttttctgaatagcggtacttaccacagcagagacgagagcaccgactccggcctgtccatgtctagctactccgttcctagaactcctgacgatttcctcaactctgtcgatgagatggacacaggtgacacaattaaccaaagcacactcccaagccaacaaaaccgctttccggactacctggaagccataccaggaactaacgtcgatctgggcactttggaaggagacgggatgaacatcgagggcgaagaattgatgccctcgctccaggaagcgctgtcttcagacattctcaatgacatggagtctgtcctagcggctaccaagctggacaaggagagcttcttaacttggctgtag

SEQ ID NO: 283400 - DNA, 1266 bp, Artificial Sequence
  derived and/or modified sequence
atgaggctgaggaagctgcctgacagcttcttcaagcccccagagcccaagagccacagccggcaggccagcacagatgctggaacagctggggccctgaccccccagcacgtgcgggcccacagcagccctgccagcctgcagctgggcgctgtgtccccaggcaccctgacccccaccggggtggtgtctggccctgctgccacccccacagcccagcacctgcggcagagcagctttgagatcccagatgatgtgcccctgcctgctggctgggagatggccaagaccagcagcggccagcgctacttcctgaaccacatcgaccagaccaccacctggcaggaccccaggaaggccatgctgagccagatgaatgtgacagcccccaccagcccccctgtgcagcagaacatgatgaacagcgccagcggccccctgcctgatggctgggagcaggccatgacccaggatggagagatctactacatcaaccacaagaacaagaccacctcctggctggacccccggctggaccccaggtttgggaaggccatgaaccagaggatcagccagagcgcccctgtgaagcagcccccacccctggccccccagagcccccagggcggcgtgatgggcggcagcaacagcaaccagcagcagcagatgaggctgcagcagctgcagatggagaaggagcggctgcggctgaagcagcaggagctgctgcggcaggccatgaggaacatcaaccccagcacagccaacagccccaagtgccaggagctggccctgcggagccagctgcccaccctggagcaggacggcggcacccagaaccctgtgagcagccctggcatgagccaggagctgcggaccatgaccaccaacagcagtgaccccttcctgaacagcggcacctaccacagcagagatgagagcacagattctggcctgtccatgagcagctacagcgtgcccaggaccccagatgacttcctgaacagcgtggatgagatggacaccggggacaccatcaaccagagcaccctgcccagccagcagaaccgcttcccagactacctggaggccatccctggcaccaacgtggacctgggcaccctggagggagatggcatgaacatcgagggggaggagctgatgcccagcctgcaggaggccctgagcagtgacatcctgaatgacatggagagcgtgctggccgccaccaagctggacaaggagagcttcctgacctggctgtag

SEQ ID NO: 283401 - DNA, 1266 bp, Artificial Sequence
  derived and/or modified sequence
atgcggctgcggaagctgcccgacagcttcttcaagccccccgagccaaagtcccattcccgccaggcatcaacagatgcggggaccgctggggcacttactccccagcatgtccgcgcacatagttctccagcttctttgcagcttggtgccgtgtcacccggaaccctgacgcctacaggggtggtaagtggtccggcagcgacccccactgcccaacatctgaggcaatcttcatttgagatccccgacgatgtccctctcccggcagggtgggaaatggcaaagacctcaagcgggcagcgatacttcttaaaccacatagatcagaccaccacgtggcaagatccgcggaaagcgatgctctcccaaatgaacgtcaccgccccgactagtccccctgtgcagcagaacatgatgaattccgcaagcgggcctctacctgatggatgggagcaagccatgacacaggatggtgagatttattatatcaatcataagaataagactacgtcctggctggaccccaggctggatccaagattcgggaaggcaatgaaccagaggatcagccaaagcgctcctgtgaagcagccacctcctctggccccacagtctccccaaggcggggtaatggggggctcgaactcaaaccagcagcagcagatgcgcctacagcagcttcagatggagaaagaacgtttgaggctcaagcagcaagaactgctgcggcaggcgatgcgtaatattaatccaagcaccgccaattctccaaaatgtcaggagctggctctgcgcagtcagctcccaaccctcgagcaggatgggggcacacagaaccccgtgtcatcgcccggtatgagccaggaactgaggactatgactaccaactcctcggaccctttcctcaacagcggaacctaccattcaagagatgagtccactgatagcgggttgtccatgagcagctactcagtgcctagaacaccggacgatttcctgaacagcgtggacgagatggataccggtgacacaatcaatcagtccacactcccatcccaacagaaccggttcccagattatctggaggccatcccaggcaccaatgtagatctgggcaccttagaaggggatggtatgaatattgaaggtgaggaactgatgcccagcttacaggaggccctgagttcagacattcttaacgatatggaaagcgtcctggctgcaaccaagctcgataaagagagtttcctcacttggctgtag

SEQ ID NO: 283402 - DNA, 1266 bp, Artificial Sequence
  derived and/or modified sequence
atgcgcctgaggaaattgccagatagctttttcaagccaccagagcccaaatcacattcgcgtcaggccagcactgacgcgggaacagcaggcgctttaacgcctcagcacgtcagggctcactcctctcctgcgagcctccagctgggggcagtttcccccggtactctgacaccaactggcgttgtttcaggcccagctgcaacacctacggcgcagcaccttcgccaatcttcatttgagatcccagacgacgttcccttacctgccggatgggagatggccaagaccagcagcggtcagcgctacttccttaaccacatcgatcagacaacaacatggcaggacccacgaaaagctatgctgagccagatgaacgtgacagcacccacgtctccccctgtgcagcagaacatgatgaactctgcctccggaccgctgcccgacggctgggagcaagcgatgacacaggacggcgaaatatattatattaaccacaagaacaaaacgacatcctggctcgatccccgactcgacccaagatttggcaaggctatgaatcagaggatcagccaaagcgctcccgtgaaacagccaccaccgctggccccacagagccctcaaggtggcgtcatgggtggatccaactccaatcaacaacagcaaatgcgtctgcagcagctgcagatggaaaaagagcgtctgagattgaagcagcaagagctcctccgacaggccatgcgtaatattaacccatccaccgctaatagccctaaatgccaagagcttgcattgaggtcacagctccccaccctggagcaggacggcggaacacaaaacccggtgtcttctccaggaatgagccaggagctgagaacaatgactaccaacagctccgacccctttttgaatagcggtacctatcatagccgggatgagagcaccgactctggactcagcatgagcagttactccgttcccagaacaccagacgacttcctgaattctgtcgatgagatggacacgggagatacgatcaaccagtctactctgccctcgcaacaaaatagattccctgattatctggaggctattccaggcacgaatgtggatctcggcactttggaaggcgacggaatgaacatcgaaggtgaggagctaatgccgtctttgcaggaggccctcagcagtgacattctgaatgacatggagagcgttttagctgcaaccaaacttgacaaggaatcctttctgacatggctttag

SEQ ID NO: 283403 - DNA, 5374 bp, Artificial Sequence
  derived and/or modified sequence
aaagggaggaaggaaggaacaagaaaaggaaataaagagaaaggggaggcggggaaaggcaacgagctgtccggcctccgtcaagggagttggagggaaaaagttctcaggcgccgcaggtccgagtgcctcgcagcccctcccgaggcgcagccgccagaccagtggagccggggcgcagggcgggggcggaggcgccggggcgggggatgcggggccgcggcgcagccccccggccctgagagcgaggacagcgccgcccggcccgcagccgtcgccgcttctccacctcggcccgtggagccggggcgtccgggcgtagccctcgctcgcctgggtcagggggtgcgcgtcgggggaggcagaagccatggatcccgggcagcagccgccgcctcaaccggccccccagggccaagggcagccgccttcgcagcccccgcaggggcagggcccgccgtccggacccgggcaaccggcacccgcggcgacccaggcggcgccgcaggcaccccccgccgggcatcagatcgtgcacgtccgcggggactcggagaccgacctggaggcgctcttcaacgccgtcatgaaccccaagacggccaacgtgccccagaccgtgcccatgaggctccggaagctgcccgactccttcttcaagccgccggagcccaaatcccactcccgacaggccagtactgatgcaggcactgcaggagccctgactccacagcatgttcgagctcattcctctccagcttctctgcagttgggagctgtttctcctgggacactgacccccactggagtagtctctggcccagcagctacacccacagctcagcatcttcgacagtcttcttttgagatacctgatgatgtacctctgccagcaggttgggagatggcaaagacatcttctggtcagagatacttcttaaatcacatcgatcagacaacaacatggcaggaccccaggaaggccatgctgtcccagatgaacgtcacagcccccaccagtccaccagtgcagcagaatatgatgaactcggcttcaggtcctcttcctgatggatgggaacaagccatgactcaggatggagaaatttactatataaaccataagaacaagaccacctcttggctagacccaaggcttgaccctcgttttggtaaagccatgaaccagagaatcagtcagagtgctccagtgaaacagccaccacccctggctccccagagcccacagggaggcgtcatgggtggcagcaactccaaccagcagcaacagatgcgactgcagcaactgcagatggagaaggagaggctgcggctgaaacagcaagaactgcttcggcaggcaatgcggaatatcaatcccagcacagcaaattctccaaaatgtcaggagttagccctgcgtagccagttaccaacactggagcaggatggtgggactcaaaatccagtgtcttctcccgggatgtctcaggaattgagaacaatgacgaccaatagctcagatcctttccttaacagtggcacctatcactctcgagatgagagtacagacagtggactaagcatgagcagctacagtgtccctcgaaccccagatgacttcctgaacagtgtggatgagatggatacaggtgatactatcaaccaaagcaccctgccctcacagcagaaccgtttcccagactaccttgaagccattcctgggacaaatgtggaccttggaacactggaaggagatggaatgaacatagaaggagaggagctgatgccaagtctgcaggaagctttgagttctgacatccttaatgacatggagtctgttttggctgccaccaagctagataaagaaagctttcttacatggttatagagccctcaggcagactgaattctaaatctgtgaaggatctaaggagacacatgcaccggaaatttccataagccagttgcagttttcaggctaatacagaaaaagatgaacaaacgtccagcaagatactttaatcctctattttgctcttccttgtccattgctgctgttaatgtattgctgacctctttcacagttggctctaaagaatcaaaagaaaaaaactttttatttcttttgctattaaaactactgttcattttgggggctgggggaagtgagcctgtttggatgatggatgccattccttttgcccagttaaatgttcaccaatcattttaactaaatactcagacttagaagtcagatgcttcatgtcacagcatttagtttgttcaacagttgtttcttcagcttcctttgtccagtggaaaaacatgatttactggtctgacaagccaaaaatgttatatctgatattaaatacttaatgctgatttgaagagatagctgaaaccaaggctgaagactgttttactttcagtattttcttttcctcctagtgctatcattagtcacataatgaccttgattttattttaggagcttataaggcatgagacaatttccatataaatatattaattattgccacatactctaatatagattttggtggataattttgtgggtgtgcattttgttctgttttgttgggttttttgttttttttgtttttggcagggtcggtgggggggttggttggttggttggttttgtcggaacctaggcaaatgaccatattagtgaatctgttaatagttgtagcttgggatggttattgtagttgttttggtaaaatcttcatttcctggttttttttaccaccttatttaaatctcgattatctgctctctcttttatatacatacacacacccaaacataacatttataatagtgtggtagtggaatgtatccttttttaggtttccctgctttccagttaatttttaaaatggtagcgctttgtatgcatttagaatacatgactagtagtttatatttcactggtagtttaaatctggttggggcagtctgcagatgtttgaagtagtttagtgttctagaaagagctattactgtggatagtgcctaggggagtgctccacgccctctgggcatacggtagatattatctgatgaattggaaaggagcaaaccagaaatggctttattttctcccttggactaatttttaagtctcgattggaattcagtgagtaggttcataatgtgcatgacagaaataagctttatagtggtttaccttcatttagctttggaagttttctttgccttagttttggaagtaaattctagtttgtagttctcatttgtaatgaacacattaacgactagattaaaatattgccttcaagattgttcttacttacaagacttgctcctacttctatgctgaaaattgaccctggatagaatactataaggttttgagttagctggaaaagtgatcagattaataaatgtatattggtagttgaatttagcaaagaaatagagataatcatgattatacctttatttttacaggaagagatgatgtaactagagtatgtgtctacaggagtaataatggtttccaaagagtattttttaaaggaacaaaacgagcatgaattaactcttcaatataagctatgaagtaatagttggttgtgaattaaagtggcaccagctagcacctctgtgttttaagggtctttcaatgtttctagaataagcccttattttcaagggttcataacaggcataaaatctcttctcctggcaaaagctgctatgaaaagcctcagcttgggaagatagatttttttccccccaattacaaaatctaagtattttggcccttcaatttggaggagggcaaaagttggaagtaagaagttttattttaagtactttcagtgctcaaaaaaatgcaatcactgtgttgtatataatagttcataggttgatcactcataataattgactctaaggcttttattaagaaaacagcagaaagattaaatcttgaattaagtctggggggaaatggccactgcagatggagttttagagtagtaatgaaattctacctagaatgcaaaattgggtatatgaattacatagcatgttgttgggattttttttaatgtgcagaagatcaaagctacttggaaggagtgcctataatttgccagtagccacagattaagattatatcttatatatcagcagattagctttagcttagggggagggtgggaaagtttggggggggggttgtgaagatttagggggaccttgatagagaactttataaacttctttctctttaataaagacttgtcttacaccgtgctgccattaaaggcagctgttctagagtttcagtcacctaagtacacccacaaaacaatatgaatatggagatcttcctttacccctcaactttaatttgcccagttatacctcagtgttgtagcagtactgtgatacctggcacagtgctttgatcttacgatgccctctgtactgacctgaaggagacctaagagtcctttccctttttgagtttgaatcatagccttgatgtggtctcttgttttatgtccttgttcctaatgtaaaagtgcttaactgcttcttggttgtattgggtagcattgggataagattttaactgggtattcttgaattgcttttacaataaaccaattttataatctttaaatttatcaactttttacatttgtgttattttcagtcagggcttcttagatctacttatggttgatggagcacattgatttggagtttcagatcttccaaagcactatttgttgtaataacttttctaaatgtagtgcctttaaaggaaaaatgaacacagggaagtgactttgctacaaataatgttgctgtgttaagtattcatattaaatacatgccttctatatggaacatggcagaaagactgaaaaataacagtaattaattgtgtaattcagaattcataccaatcagtgttgaaactcaaacattgcaaaagtgggtggcaatattcagtgcttaacacttttctagcgttggtacatctgagaaatgagtgctcaggtggattttatcctcgcaagcatgttgttataagaattgtgggtgtgcctatcataacaattgttttctgtatcttgaaaaagtattctccacattttaaatgttttatattagagaattctttaatgcacacttgtcaaatatatatatatagtaccaatgttacctttttattttttgttttagatgtaagagcatgctcatatgttaggtacttacataaattgttacattattttttcttatgtaatacctttttgtttgtttatgtggttcaaatatattctttccttaaactctt

SEQ ID NO: 283404 - protein, 991 aa, Artificial Sequence
  derived and/or modified sequence
MADKVRRQRPRRRVCWALVAVLLADLLALSDTLAVMSVDLGSESMKVAIVLNKESRRKTPVIVTLKENERFFGDSAASMAIKNPKATLRYFQHLLGKQADNPHVALYQARFPEHELTFDPQRQTVHFQISSQLQFSPEEVLGMVLNYSRSLAEDFAEQPIKDAVITVPVFFNQAERRAVLQAARMAGLKVLQLINDNTATALSYGVFRRKDINTTAQNIMFYDMGSGSTVCTIVTYQMVKTKEAGMQPQLQIRGVGFDRTLGGLEMELRLRERLAGLFNEQRKGQRAKDVRENPRAMAKLLREANRLKTVLSANADHMAQIEGLMDDVDFKAKVTRVEFEELCADLFERVPGPVQQALQSAEMSLDEIEQVILVGGATRVPRVQEVLLKAVGKEELGKNINADEAAAMGAVYQAAALSKAFKVKPFVVRDAVVYPILVEFTREVEEEPGIHSLKHNKRVLFSRMGPYPQRKVITFNRYSHDFNFHINYGDLGFLGPEDLRVFGSQNLTTVKLKGVGDSFKKYPDYESKGIKAHFNLDESGVLSLDRVESVFETLVEDSAEEESTLTKLGNTISSLFGGGTTPDAKENGTDTVQEEEESPAEGSKDEPGEQVELKEEAEAPVEDGSQPPPPEPKGDATPEGEKATEKENGDKSEAQKPSEKAEAGPEGVAPAPEGEKKQKPARKRRMVEEIGVELVVLDLPDLPEDKLAQSVQKLQDLTLRDLEKQEREKAANSLEAFIFETQDKLYQPEYQEVSTEEQREEISGKLSAASTWLEDEGVGATTVMLKEKLAELRKLCQGLFFRVEERKKWPERLSALDNLLNHSSMFLKGARLIPEMDQIFTEVEMTTLEKVINETWAWKNATLAEQAKLPATEKPVLLSKDIEAKMMALDREVQYLLNKAKFTKPRPRPKDKNGTRAEPPLNASASDQGEKVIPPAGQTEDAEPISEPEKVETAGSEPGDTEPLELGGPGAEPEQKEQSTGQKRPLKNDEL

SEQ ID NO: 283405 - protein, 679 aa, Artificial Sequence
  derived and/or modified sequence
MADKVRRQRPRRRVCWALVAVLLADLLALSDTLAVMSVDLGSESMKVAIVKPGVPMEIVLNKESRRKTPVIVTLKENERFFGDSAASMAIKNPKATLRYFQHLLGKQADNPHVALYQARFPEHELTFDPQRQTVHFQISSQLQFSPEEVLGMVLNYSRSLAEDFAEQPIKDAVITVPVFFNQAERRAVLQAARMAGLKVLQLINDNTATALSYGVFRRKDINTTAQNIMFYDMGSGSTVCTIVTYQMVKTKEAGMQPQLQIRGVGFDRTLGGLEMELRLRERLAGLFNEQRKGQRAKDVRENPRAMAKLLREANRLKTVLSANADHMAQIEGLMDDVDFKAKVTRVEFEELCADLFERVPGPVQQALQSAEMSLDEIEQVILVGGATRVPRVQEVLLKAVGKEELGKNINADEAAAMGAVYQAAALSKAFKVKPFVVRDAVVYPILVEFTREVEEEPGIHSLKHNKRVLFSRMGPYPQRKVITFNRYSHDFNFHINYGDLGFLGPEDLRVFGSQNLTTVKLKGVGDSFKKYPDYESKGIKAHFNLDESGVLSLDRVESVFETLVEDSAEEESTLTKLGNTISSLFGGGTTPDAKENGTDTVQEEEESPAEGSKDEPGEQVELKEEAEAPVEDGSQPPPPEPKGDATPEGEKATEKENGDKSEAQKPTSVCRASVTRFGF

SEQ ID NO: 283406 - protein, 147 aa, Artificial Sequence
  derived and/or modified sequence
MADKVRRQRPRRRVCWALVAVLLADLLALSDTLAVMSVDLGSESMKVAIVKPGVPMEIVLNKESRRKTPVIVTLKENERFFGDSAASMAIKNPKATLRYFQHLLGKQADNPHVALYQARFPEHELTFDPQRQTVHFQISSQLQFSPL

SEQ ID NO: 283407 - protein, 559 aa, Artificial Sequence
  derived and/or modified sequence
MAIKNPKATLRYFQHLLGKQADNPHVALYQARFPEHELTFDPQRQTVHFQISSQLQFSPEEVLGMVLNYSRSLAEDFAEQPIKDAVITVPVFFNQAERRAVLQAARMAGLKVLQLINDNTATALSYGVFRRKDINTTAQNIMFYDMGSGSTVCTIVTYQMVKTKEAGMQPQLQIRGVGFDRTLGGLEMELRLRERLAGLFNEQRKGQRAKDVRENPRAMAKLLREANRLKTVLSANADHMAQIEGLMDDVDFKAKVTRVEFEELCADLFERVPGPVQQALQSAEMSLDEIEQVILVGGATRVPRVQEVLLKAVGKEELGKNINADEAAAMGAVYQAAALSKAFKVKPFVVRDAVVYPILVEFTREVEEEPGIHSLKHNKRVLFSRMGPYPQRKVITFNRYSHDFNFHINYGDLGFLGPEDLRVFGSQNLTTVKLKGVGDSFKKYPDYESKGIKAHFNLDESGVLSLDRVESVFETLVEDSAEEESTLTKLGNTISSLFGGGTTPDAKENGTDTVQMLFLCPARLPQSKQAIDRFHTAVTCMEPPWGRRCRARPAWRLCS

SEQ ID NO: 283408 - DNA, 2976 bp, Artificial Sequence
  derived and/or modified sequence
atggcagacaaggttagaaggcagcgcccacgccggcgagtttgttgggcactagtcgctgtcctcctggcagacctgctggcattgtccgatactctcgccgttatgtcagtcgacttaggaagtgagagcatgaaggtggctatcgtgcttaataaagaatccagacggaagacgcccgtcattgtgaccctgaaagaaaatgaacggttcttcggggattccgccgcgagcatggctatcaagaacccaaaggctacccttcgttactttcaacacctgctgggaaagcaagccgacaaccctcacgtcgctctgtaccaggccaggttccctgagcatgagttgacgttcgaccctcagagacagacggttcacttccagatcagttcccagctgcagttcagtcctgaggaagtgttgggcatggtgcttaactattctcgcagcctcgcagaagatttcgcggagcaacctattaaggatgcggtgataaccgtcccagtcttttttaatcaggctgagcggcgggctgttctgcaagctgccagaatggcgggactgaaggtgcttcagttaataaacgataataccgccaccgccctgtcatacggcgtgttccgacgcaaggatatcaacacgactgcgcagaacatcatgttctacgatatgggttcaggtagcacagtgtgtaccatcgtgacatatcagatggtgaaaaccaaagaggctggcatgcaaccccaactgcagatccgcggcgtggggttcgatcgcacacttggcgggctagagatggagttgcgcttgcgcgagcgtcttgccggcttattcaatgaacagcgtaaaggccagcgcgccaaagacgtgcgtgaaaatcccagagctatggccaagttgcttagagaagccaaccgacttaagaccgtactgagtgctaacgcggatcacatggcccagatagaaggactgatggacgacgtggactttaaggccaaagtcacacgagtggagttcgaggagctctgtgcagacctctttgagagagtccccggccccgtccagcaggccttgcagtccgcagagatgtcacttgatgagatcgaacaagtcatactggttgggggagctactcgagtccctcgggtgcaggaagtgctgctcaaagcggtgggtaaagaggagctgggcaagaacattaacgccgatgaagctgccgcaatgggagcagtctaccaagcagccgccctttctaaggcattcaaggtaaagccttttgtagtgagggacgcagtggtgtatcccatactggtagaatttacaagagaggttgaagaggagcccggaattcatagcctcaaacataataaacgcgtgctcttttcaagaatgggcccttatccgcaaaggaaagtgatcaccttcaatcgctactcacacgacttcaatttccatattaactatggtgatctcggcttcttgggtccagaggacttacgggtgtttggtagtcagaacctcaccaccgtcaaacttaaaggtgtgggggactcttttaaaaagtatcctgattacgaatctaagggcataaaggcccattttaatttggacgaatcaggcgtgcttagcctagatcgcgttgaatcggtgttcgagacgctggtcgaagattccgcggaagaagaatctacacttaccaagctgggaaatacaatatcaagtctctttggcggcggcaccacacccgacgctaaggagaatgggacagataccgtccaggaagaggaagaatctcccgctgagggcagcaaagatgagccaggggaacaggtggaactgaaggaggaagcggaagctcccgtggaagacggtagccagccgcctcctcctgagccaaagggagatgccacccccgagggcgagaaggcaaccgaaaaggagaatggtgacaaatctgaggcgcagaagccttcagaaaaggcagaagcaggccctgagggagtggcccctgctccagagggggagaagaagcagaagcccgcacgcaagcggcgcatggttgaagagattggcgtcgagctggtggtgttggatcttcctgatttgcccgaggataagctggcccaaagcgtgcagaagctccaggatttaaccctgcgggatctcgaaaaacaagaacgggaaaaggcagctaacagtctggaagcattcattttcgaaacccaggacaagctttatcaaccagagtatcaggaggtgagcactgaagaacagcgagaggagatttccggaaagctttctgctgctagcacctggctagaggatgagggggtcggagccacgacggtgatgctgaaggagaaactggcggaattacggaagctctgtcaggggctcttcttccgagtcgaggagagaaagaaatggccagagcggctttccgcgctggataacctgttgaatcactcttccatgttcttaaagggcgctaggctgatcccagagatggatcagatctttacagaggttgagatgactactctcgagaaagtcattaacgagacctgggcctggaagaacgccaccctcgccgaacaggccaagctgccggctaccgaaaagcctgtcctgttgtcaaaagatatcgaagccaaaatgatggcattagacagggaggtgcaatacctgctgaacaaagccaagttcaccaagccccgtcctcgacctaaggacaagaacgggaccagagccgagccacctctaaatgcgtccgctagtgaccaaggagagaaggtaatccctccagcagggcagacagaggatgcagagccaatctcagaacctgaaaaggtagagacggcgggctccgaaccaggcgacactgagcccctcgagctgggaggtccaggggcagaaccagagcagaaggagcagtctactggacagaagaggccactgaagaatgacgagctgtag

SEQ ID NO: 283409 - DNA, 2040 bp, Artificial Sequence
  derived and/or modified sequence
atggcagacaaagtacgacgccagcgcccaaggcgacgcgtgtgctgggccctggtcgcagtcctgctggctgatctgctcgccctttccgacactttagcagtgatgagtgtcgacctggggagcgaaagcatgaaggtggccattgtaaagccaggtgtgcccatggagatcgtgttgaataaggagagcagacgaaaaacgcctgtgatcgtgaccttaaaagagaacgaaaggtttttcggagactccgcagcctccatggcgattaagaacccgaaagcaaccctgcggtattttcagcacctgctgggcaaacaggcagacaatcctcatgttgccctgtaccaagcacgcttccctgagcatgagctaacattcgacccccaacgccagactgtacacttccaaatcagtagccagctgcagttcagtcctgaggaggtgctcgggatggtgttaaactattcccgcagcctggccgaagacttcgctgagcagccaattaaggatgctgtgattacagtgcctgtgttctttaatcaggctgagcggcgcgcagttttgcaagccgctcgaatggctggcttaaaggttctccagctgatcaatgataacacagccaccgcgttgagttacggcgtgttcagacgaaaagacatcaacaccaccgcccagaacatcatgttctacgatatgggtagcggctccacagtgtgcaccatagtgacgtaccagatggtgaaaacaaaagaggccgggatgcagcctcagcttcaaatccggggggtgggattcgataggactcttggaggcttggagatggagctgagactgcgagagagactggccgggttattcaacgaacagagaaagggacaaagagccaaagacgttcgagaaaatccccgcgcaatggcgaagctgttacgtgaggctaatcgacttaagacagtcctctcagctaacgcagatcacatggcccagatcgaggggctgatggatgacgtggacttcaaggccaaggtgactcgggtggaatttgaagaactgtgcgctgacttgtttgagcgggttcctgggccagtgcagcaggcccttcaaagcgcagagatgtcgctcgatgagattgagcaggtgatactcgtgggtggcgccactcgtgtgcctagagttcaggaggtactgctgaaggccgtagggaaagaagagctgggtaagaatattaacgccgatgaagccgccgcgatgggcgctgtgtaccaggccgccgcgttatccaaagcttttaaggtaaagccctttgtggtgcgggacgctgtcgtgtatcccattctggttgagtttactcgcgaggtggaggaagagcctggtatccactcactgaagcataataagagagtactgttttcccgaatggggccatacccccagcgtaaggtgatcacctttaaccggtattcgcatgattttaattttcacatcaattacggagatctggggttccttggcccagaggatctgcgtgtgttcgggagtcaaaatctgacaactgttaagctgaaaggtgtgggcgattcctttaagaagtacccggactacgaatccaaaggaatcaaggctcacttcaacctagacgaaagcggggtgctgtctctggaccgggtagagagtgttttcgagacccttgtggaggactcagccgaggaggaaagtaccctgaccaaactcggtaacacaatatcatctctttttggagggggaaccacccctgatgcgaaagagaatggcactgatacggtgcaagaagaggaagaatccccggcggagggcagcaaagacgagcccggtgaacaggtggagttgaaggaagaggccgaagcacccgtggaggatggcagtcaacccccccctcccgaacccaagggtgatgccacccctgaaggggaaaaggccactgagaaggaaaatggcgacaagagtgaagcacagaagcctacttccgtctgccgagctagcgtgactaggtttgggttttag

SEQ ID NO: 283410 - DNA, 1680 bp, Artificial Sequence
  derived and/or modified sequence
atggcgataaagaatccgaaagccacactaagatatttccaacatctgctcggcaagcaggccgataatccacatgttgccctgtatcaggccagattccctgaacacgagctgacattcgacccacagcggcagaccgtccatttccagataagtagccaacttcagttttcgcctgaggaagtgctggggatggtgcttaactactccagatctttggccgaagacttcgctgaacaacctattaaggacgctgtgatcactgtgccagtgttctttaaccaggcggagagaagggctgtgcttcaggctgcccggatggcaggcctgaaagtgttacagttaattaatgacaacacagcgacggctctctcttatggcgtcttcagaagaaaagacataaacactactgcgcagaatatcatgttttacgacatgggctcaggatctaccgtatgtaccatagttacctatcagatggtcaagacaaaggaagctggtatgcagcctcagctccagatacggggagtggggtttgacaggactttggggggtcttgagatggagctgcgactgcgagaaaggctagctggactgtttaacgagcagcgtaagggccagcgtgccaaagacgtgcgtgaaaaccccagggccatggcgaaactactccgggaagcaaaccggctcaaaactgttttatcagccaacgctgaccatatggcccaaatcgaagggttgatggatgatgttgactttaaggcgaaggtaacaagagtggagtttgaagaactgtgcgccgacctgttcgagcgggtccctgggccggtgcagcaggctctgcaatcggccgagatgtccttggacgagattgagcaggtaattctggtgggaggagcaacacgcgtcccccgggtccaggaagtcctgctgaaagctgttgggaaagaggaactcggaaaaaacattaacgcagatgaagccgctgccatgggtgctgtgtaccaggcagccgctctgagtaaagccttcaaggtgaagccgtttgttgtgagggacgcagtggtgtatcctattttggtcgaattcacccgagaggttgaggaggagccaggtattcatagtttgaaacataacaaacgcgtgctgttttcccgcatgggcccttatccccaacggaaggtgatcacttttaatagatatagtcacgatttcaacttccacatcaactatggcgatctggggttcctcgggccagaggacctgagggtatttggaagccagaatttgaccacagtgaagttgaaaggagtgggagattcgttcaagaagtatcccgattatgagtcaaaggggattaaggcccacttcaatctcgacgaatcaggcgtgcttagcctggacagagtcgagtcagtttttgaaacactggtggaagactcagctgaggaggagagcacactaacaaaactgggcaataccatttcatcactttttggtggggggacgacaccagatgctaaagaaaacggcaccgataccgtccaaatgctattcctctgccccgcaaggctaccgcaatccaagcaggccatagaccgattccacaccgcggtaacatgcatggagcctccatggggaaggcgttgtcgcgctaggccagcctggcgattgtgttcttag

SEQ ID NO: 283411 - DNA, 2464 bp, Artificial Sequence
  derived and/or modified sequence
gtaacagtttgcaaaccgagaggagttgtgaagggcgcgggtggggggcgctgccggcctcgtgggtacgttcgtgccgcgtctgtcccagagctggggccgcaggagcggaggcaagaggggcactatggcagacaaagttaggaggcagaggccgaggaggcgagtctgttgggccttggtggctgtgctcttggcagacctgttggcactgagtgggaatctcggaggaaaacaccggtgatcgtgaccctgaaagaaaatgaaagattctttggagacagtgcagcaagcatggcgattaagaatccaaaggctacgctacgttacttccagcacctcctggggaagcaggcagataacccccatgtagctctttaccaggcccgcttcccggagcacgagctgactttcgacccacagaggcagactgtgcactttcagatcagctcgcagctgcagttctcacctgaggaagtgttgggcatggttctcaattattctcgttctctagctgaagattttgcagagcagcccatcaaggatgcagtgatcaccgtgccagtcttcttcaaccaggccgagcgccgagctgtgctgcaggctgctcgtatggctggcctcaaagtgctgcagctcatcaatgacaacaccgccactgccctcagctatggtgtcttccgccggaaagatattaacaccactgcccagaatatcatgttctatgacatgggctcaggcagcaccgtatgcaccattgtgacctaccagatggtgaagactaaggaagctgggatgcagccacagctgcagatccggggagtaggatttgaccgtaccctggggggcctggagatggagctccggcttcgagaacgcctggctgggcttttcaatgagcagcgcaagggtcagagagcaaaggatgtgcgggagaacccgcgtgccatggccaagctgctgcgtgaggctaatcggctcaaaaccgtcctcagtgccaacgctgaccacatggcacagattgaaggcctgatggatgatgtggacttcaaggcaaaagtgactcgtgtggaatttgaggagttgtgtgcagacttgtttgagcgggtgcctgggcctgtacagcaggccctccagagtgccgaaatgagtctggatgagattgagcaggtgatcctggtgggtggggccactcgggtccccagagttcaggaggtgctgctgaaggccgtgggcaaggaggagctggggaagaacatcaatgcagatgaagcagccgccatgggggcagtgtaccaggcagctgcgctcagcaaagcctttaaagtgaagccatttgtcgtccgagatgcagtggtctaccccatcctggtggagttcacgagggaggtggaggaggagcctgggattcacagcctgaagcacaataaacgggtactcttctctcggatggggccctaccctcaacgcaaagtcatcacctttaaccgctacagccatgatttcaacttccacatcaactacggcgacctgggcttcctggggcctgaagatcttcgggtatttggctcccagaatctgaccacagtgaagctaaaaggggtgggtgacagcttcaagaagtatcctgactacgagtccaagggcatcaaggctcacttcaacctggatgagagtggcgtgctcagtctagacagggtggagtctgtatttgagacactggtagaggacagcgcagaagaggaatctactctcaccaaacttggcaacaccatttccagcctgtttggaggcggtaccacaccagatgccaaggagaatggtactgatactgtccagatgctcttcctttgtccagctagattgccacagtccaagcaggccattgaccgtttccatacagcagtcacctgtatggaacccccatggggtcggcggtgccgagccaggcctgcctggaggctctgctcctgatcgttccctggggcgcctgtggtgtttcccaggaggaagaggagagccctgcagaggggagcaaggacgagcctggggagcaggtggagctcaaggaggaagctgaggccccagtggaggatggctctcagcccccaccccctgaacctaagggagatgcaacccctgagggagaaaaggccacagaaaaagaaaatggggacaagtctgaggcccagaaaccaagtgagaaggcagaggcagggcctgagggcgtcgctccagccccagagggagagaagaagcagaagcccgccaggaagcggcgaatggtagaggagatcggggtggagctggttgttctggacctgcctgacttgccagaggataagctggctcagtcggtgcagaaacttcaggacttgacactccgagacctggagaagcaggaacgggaaaaagctgccaacagcttggaagcattcatatttgagacccaggacaagctgta

SEQ ID NO: 283412 - DNA, 2976 bp, Artificial Sequence
  derived and/or modified sequence
atggctgacaaggtgcggcggcagaggccccggcggcgggtgtgctgggccctggtggccgtgctgctggccgacctgctggccctgagtgacaccctggccgtgatgtctgtggacctgggcagcgagagcatgaaggtggccatcgtgctgaacaaggagagcaggaggaagacccctgtgattgtgaccctgaaggaaaatgaacgcttcttcggggacagcgctgcctccatggccatcaagaaccccaaggccaccctgcgctacttccagcacctgctgggcaagcaggccgacaacccccacgtggccctgtaccaggcccgcttccctgagcacgagctgacctttgacccccagaggcagacagtgcacttccagatcagcagccagctgcagttcagccctgaggaggtgctgggcatggtgctgaactacagccgcagcctggctgaagattttgctgagcagcccatcaaggatgctgtgatcaccgtgcctgtgttcttcaaccaggccgagcggcgggctgtgctgcaggccgccaggatggccggcctgaaggtgctgcagctgatcaatgacaacacagccacagccctgtcctatggagtcttccggaggaaggacatcaacaccacagcccagaacatcatgttttatgacatgggcagcggcagcacagtgtgcaccatcgtgacctaccagatggtgaagaccaaggaggccggcatgcagccccagctgcagatccggggcgtgggctttgacaggaccctgggcggcctggagatggagctgcggctgcgggagcggctggccggcctcttcaatgagcagaggaagggccagagggccaaggatgtgcgggagaacccccgggccatggccaagctgctgcgggaggccaaccggctgaagacagtgctgagcgccaatgctgaccacatggcccagatcgagggcctgatggatgatgtggacttcaaggccaaggtgaccagggtggagtttgaggagctgtgtgccgacctgtttgagcgggtgcccggccctgtgcagcaggccctgcagagcgctgagatgagcctggatgaaattgagcaggtgatcctggtgggcggggccaccagggtgccccgggtgcaggaggtgctgctgaaggctgtgggcaaggaggagctgggcaagaacatcaatgctgatgaagctgctgccatgggcgctgtgtaccaggccgccgccctgagcaaggccttcaaggtgaagccctttgtggtgagagatgctgtggtgtaccccatcctggtggagttcacccgggaggtggaggaggagcccggcatccacagcctgaagcacaacaagagggtgctcttcagcaggatgggcccctacccccagaggaaggtgatcaccttcaaccgctacagccatgacttcaacttccacatcaactacggggacctgggcttcctgggccctgaggacctgcgggtgtttggcagccagaacctgaccaccgtgaagctgaagggcgtgggggacagcttcaagaagtacccagactatgagagcaagggcatcaaggcccacttcaacctggatgaaagtggagtgctgagcctggacagagtggagagcgtgtttgagaccctggtggaggacagcgctgaggaggagagcaccctgaccaagctgggcaacaccatcagcagcctgtttggaggcggcaccaccccagatgccaaggaaaatggaacagacacagtgcaggaggaggaggagagccctgctgagggcagcaaggatgagcctggagagcaggtggagctgaaggaggaggccgaggcccctgtggaggatggcagccagcccccacctcctgagcccaagggagatgccaccccagagggggagaaggccacagagaaggaaaatggagacaagtctgaggcccagaagcccagcgagaaggccgaggccggccctgagggcgtggccccagcccctgagggggagaagaagcagaagccagccaggaagaggaggatggtggaggagattggagtggagctggtggtgctggacctgcctgacctgcctgaggacaagctggcccagagcgtgcagaagctgcaggacctgaccctgcgggacctggagaagcaggagcgggagaaggccgccaacagcctggaggccttcatctttgagacccaggacaagctgtaccagcctgagtaccaggaggtgtccacagaggagcagcgggaggagatcagcggcaagctgtctgctgccagcacctggctggaggatgaaggagtgggcgccaccaccgtgatgctgaaggagaagctggccgagctgaggaagctgtgccagggcctcttcttccgggtggaggagaggaagaagtggccagagcggctgagcgccctggacaacctgctgaaccacagctccatgttcctgaagggggcccggctcatccctgagatggaccagatcttcacagaggtggagatgaccaccctggagaaggtgatcaatgagacctgggcctggaagaatgccaccctggccgagcaggccaagctgcctgccacagagaagcctgtgctgctgagcaaggacatcgaggccaagatgatggccctggaccgggaggtgcagtacctgctgaacaaggccaagttcaccaagccccggccccggcccaaggacaagaatggcaccagggctgagccccccctgaatgccagcgccagtgaccagggcgagaaggtgatccccccagctggccagacagaagatgctgagcccatcagcgagcctgagaaggtggagacagctggcagcgagcccggggacacagagcccctggagctgggcggccctggagctgagcctgagcagaaggagcagagcacaggccagaagaggcccctgaagaatgatgagctgtag

SEQ ID NO: 283413 - DNA, 2040 bp, Artificial Sequence
  derived and/or modified sequence
atggctgacaaggtgcggcggcagaggccccggcggcgggtgtgctgggccctggtggccgtgctgctggccgacctgctggccctgagtgacaccctggccgtgatgtctgtggacctgggcagcgagagcatgaaggtggccatcgtgaagccaggagtgcccatggagatcgtgctgaacaaggagagcaggaggaagacccctgtgattgtgaccctgaaggaaaatgaacgcttctttggagacagcgctgcctccatggccatcaagaaccccaaggccaccctgcgctacttccagcacctgctgggcaagcaggccgacaacccccacgtggccctgtaccaggcccgcttccctgagcacgagctgacctttgacccccagaggcagacagtgcacttccagatcagcagccagctgcagttcagccctgaggaggtgctgggcatggtgctgaactacagccgcagcctggccgaggactttgctgagcagcccatcaaggatgctgtgatcaccgtgcctgtgttcttcaaccaggccgagaggagagctgtgctgcaggccgccaggatggccggcctgaaggtgctgcagctgatcaatgacaacacagccacagccctgtcctatggagtcttccggaggaaggacatcaacaccacagcccagaacatcatgttttatgacatgggcagcggcagcacagtgtgcaccatcgtgacctaccagatggtgaagaccaaggaggccggcatgcagccccagctgcagatccggggcgtgggctttgacaggaccctgggcggcctggagatggagctgcggctgcgggagcggctggccggcctcttcaatgagcagaggaagggccagagggccaaggatgtgcgggagaacccccgggccatggccaagctgctgcgggaggccaaccggctgaagacagtgctgagcgccaatgctgaccacatggcccagatcgagggcctgatggatgatgtggacttcaaggccaaggtgaccagggtggagtttgaggagctgtgtgccgacctgtttgagcgggtgcccggccctgtgcagcaggccctgcagagcgctgagatgagcctggatgaaattgagcaggtgatcctggtgggcggggccaccagggtgccccgggtgcaggaggtgctgctgaaggctgtgggcaaggaggagctgggcaagaacatcaatgctgatgaggccgccgccatgggcgctgtgtaccaggccgccgccctgagcaaggccttcaaggtgaagccctttgtggtgagagatgctgtggtgtaccccatcctggtggagttcacccgggaggtggaggaggagcccggcatccacagcctgaagcacaacaagagggtgctcttcagcaggatgggcccctacccccagaggaaggtgatcaccttcaaccgctacagccatgacttcaacttccacatcaactatggagacctgggcttcctgggccctgaggacctgcgggtgtttggcagccagaacctgaccaccgtgaagctgaagggcgtgggggacagcttcaagaagtacccagactatgagagcaagggcatcaaggcccacttcaacctggatgagagcggcgtgctgagcctggacagagtggagagcgtgtttgagaccctggtggaggacagcgctgaggaggagagcaccctgaccaagctgggcaacaccatcagcagcctgtttggaggcggcaccaccccagatgccaaggaaaatggaacagacacagtgcaggaggaggaggagagccctgctgagggcagcaaggatgagcccggggagcaggtggagctgaaggaggaggccgaggcccctgtggaggatggcagccagcccccacctcctgagcccaagggagatgccaccccagagggggagaaggccacagagaaggaaaatggagacaagtctgaggcccagaagcccacctctgtgtgccgggcctctgtgaccaggtttggcttctag

SEQ ID NO: 283414 - DNA, 1680 bp, Artificial Sequence
  derived and/or modified sequence
atggccatcaagaaccccaaggccaccctgcgctacttccagcacctgctgggcaagcaggccgacaacccccacgtggccctgtaccaggcccgcttccctgagcacgagctgacctttgacccccagaggcagacagtgcacttccagatcagcagccagctgcagttcagccctgaggaggtgctgggcatggtgctgaactacagccgcagcctggctgaagattttgctgagcagcccatcaaggatgctgtgatcaccgtgcctgtgttcttcaaccaggccgagcggcgggctgtgctgcaggccgccaggatggccggcctgaaggtgctgcagctgatcaatgacaacacagccacagccctgtcctatggagtcttccggaggaaggacatcaacaccacagcccagaacatcatgttttatgacatgggcagcggcagcacagtgtgcaccatcgtgacctaccagatggtgaagaccaaggaggccggcatgcagccccagctgcagatccggggcgtgggctttgacaggaccctgggcggcctggagatggagctgcggctgcgggagcggctggccggcctcttcaatgagcagaggaagggccagagggccaaggatgtgcgggagaacccccgggccatggccaagctgctgcgggaggccaaccggctgaagacagtgctgagcgccaatgctgaccacatggcccagatcgagggcctgatggatgatgtggacttcaaggccaaggtgaccagggtggagtttgaggagctgtgtgccgacctgtttgagcgggtgcccggccctgtgcagcaggccctgcagagcgctgagatgagcctggatgaaattgagcaggtgatcctggtgggcggggccaccagggtgccccgggtgcaggaggtgctgctgaaggctgtgggcaaggaggagctgggcaagaacatcaatgctgatgaagctgctgccatgggcgctgtgtaccaggccgccgccctgagcaaggccttcaaggtgaagccctttgtggtgagagatgctgtggtgtaccccatcctggtggagttcacccgggaggtggaggaggagcccggcatccacagcctgaagcacaacaagagggtgctcttcagcaggatgggcccctacccccagaggaaggtgatcaccttcaaccgctacagccatgacttcaacttccacatcaactacggggacctgggcttcctgggccctgaggacctgcgggtgtttggcagccagaacctgaccaccgtgaagctgaagggcgtgggggacagcttcaagaagtacccagactatgagagcaagggcatcaaggcccacttcaacctggatgaaagtggagtgctgagcctggacagagtggagagcgtgtttgagaccctggtggaggacagcgctgaggaggagagcaccctgaccaagctgggcaacaccatcagcagcctgtttggaggcggcaccaccccagatgccaaggaaaatggaacagacacagtgcagatgctgttcctgtgcccagcccggctgccccagagcaagcaggccatcgaccgcttccacacagctgtgacctgcatggagcccccctggggccgccgctgccgggcccggcctgcctggaggctgtgcagctag

SEQ ID NO: 283415 - DNA, 2976 bp, Artificial Sequence
  derived and/or modified sequence
atggccgacaaggtgcggcggcagcggccccggcggcgggtgtgctgggcgttggtcgccgtgttacttgcggacctgctggcccttagcgacacactggctgtcatgtcagtggacctgggttccgaaagtatgaaggtcgcgattgtactcaataaggaatcgagacggaaaacacccgtcattgtgactctgaaggaaaatgagaggttctttggagactctgccgcctccatggccatcaagaaccccaaagcaactctgcggtatttccagcacttattaggaaagcaagcggataacccccatgttgcgctttatcaggcacggtttcctgagcacgagcttactttcgacccccagagacagactgttcacttccagatctctagccagctccaattcagtccggaagaagtgctcgggatggtgttgaattattcgcggagtttggctgaggattttgccgagcagcctattaaagacgccgtcatcacggttccagtgttttttaatcaggctgagaggcgtgccgtgctccaggccgcaagaatggccgggctgaaggtgctgcagcttataaacgacaatactgccaccgcattatcgtatggcgtctttagacggaaggatattaataccactgctcagaacattatgttctacgacatgggctctggaagcactgtctgcactatcgtaacctaccagatggtgaaaaccaaagaagcaggaatgcagccccagctccagattcgcggcgttggtttcgatcgtactctgggggggctcgaaatggaactgagactaagagagagactggctggcctgttcaatgagcagcggaaaggtcagcgcgccaaagatgtaagagagaatccccgggcaatggccaaactgctgcgagaggctaatagactgaaaaccgtactgtccgccaatgctgatcatatggcccaaattgagggtcttatggacgatgtcgatttcaaggccaaagtcaccagagtcgaatttgaagagctctgcgccgacctgttcgaaagagtgcccgggcccgtacagcaagctcttcagagcgccgaaatgtccctggatgaaatcgaacaggtgatactggtgggaggagcgacacgggtaccccgagtccaggaggtgctgcttaaggccgtgggcaaggaagagctcggtaagaatatcaacgccgacgaggcagctgctatgggagcagtttaccaggcggccgccctctcgaaagcctttaaagttaagcccttcgttgtacgggacgccgtggtgtatcccattttagtggaattcactcgcgaagtagaggaggaaccaggaattcactctcttaaacacaataaaagggttctctttagccgcatgggaccatacccacagcggaaggtcattacttttaataggtattctcacgacttcaattttcacattaactatggggatctgggcttcctgggcccggaagatttgcgagtattcggatcacagaatctgacaacagttaagctgaagggtgtgggtgactctttcaagaagtatcctgattacgagtctaaaggaattaaggcacattttaatctggacgagtcgggagttctgtccctggacagggttgagagcgtatttgaaacactcgtcgaggattctgctgaggaagaatccacactaaccaagctgggcaatacaatatccagcttgttcggcggagggactacccccgacgccaaagagaacggcaccgatacagtgcaagaagaggaagagtctccggccgagggcagcaaggatgagcctggggaacaggtggagctcaaggaggaggccgaggctcctgtcgaagatgggtctcagccccccccgcctgaaccaaaaggagatgccacacctgagggagaaaaggcgacagaaaaggagaacggagacaaaagcgaagcgcagaagccaagcgagaaggctgaggctgggcctgaaggtgttgctccagcgcccgagggggaaaaaaaacagaagccagcacggaagagaaggatggtcgaggagattggagtggaactggtggttttagaccttcccgatctgcctgaagacaaactagcccagagtgtacagaaactacaagatttgacactccgcgacctagagaaacaggaacgggaaaaagccgcaaattccctggaagcgtttattttcgaaacacaagacaagctgtaccagcctgagtaccaagaggttagcaccgaagaacagcgtgaggaaatttccggcaaactttccgcagcgtcaacttggctcgaggatgagggagtgggtgcaaccactgtgatgctaaaggagaaactggctgagttacgcaaactctgccaggggctgttcttcagagtagaggagaggaagaagtggcctgagcggttaagcgccttggacaaccttctgaatcactctagtatgtttctgaagggggcgagactaattccagagatggaccagattttcaccgaagtggagatgacaaccctggagaaggtcattaacgagacttgggcttggaagaacgctacactcgccgagcaggctaaattaccagcaacagaaaagcctgtcttgcttagcaaagacatagaggccaagatgatggccctagatcgagaggtgcagtatttgttgaacaaggctaaatttacaaaacctagaccacgccccaaagacaagaatggaacacgagctgaaccacctttaaatgcatcagcaagtgaccaaggcgaaaaggtgatccctccagcaggtcagactgaggacgctgagcccataagcgagccagaaaaagtggagaccgctggctctgaacctggagatacagagcccctggaattggggggccccggggcagaacccgaacaaaaggagcagtcaacgggccaaaagcgacctctcaaaaacgacgaactgtag

SEQ ID NO: 283416 - DNA, 2040 bp, Artificial Sequence
  derived and/or modified sequence
atggccgacaaggtgcggcggcagcggccccggcggcgggtgtgctgggccctggtggccgtgttactggcagaccttcttgctctatccgacacccttgccgtaatgtctgtggatttgggttctgagtctatgaaggtggccattgttaagcctggtgtgcccatggagatcgtgcttaacaaggaaagccggaggaagacaccggtgatcgtgaccctcaaggagaatgagcggttcttcggggacagcgccgcctcaatggctattaagaaccccaaggccactctgcggtacttccagcacctgcttggcaagcaggctgataatcctcatgtcgctctttaccaagctcgcttcccagagcacgaactcacttttgacccccagcggcagactgtgcactttcagatcagctctcagcttcagtttagcccggaggaggtcctgggcatggtgcttaactactcgcgaagcctggcagaagactttgctgagcagccaatcaaggacgctgtgatcaccgtccccgttttttttaaccaggctgaacgccgtgccgtacttcaagcagccaggatggccggtctcaaggttttgcagttgataaacgataacactgctaccgccctgtcatatggcgtctttagaagaaaggacattaataccacagcccaaaatattatgttttatgacatgggttctggttctaccgtctgcaccattgttacatatcagatggtgaagacaaaggaagccggcatgcagcctcagcttcaaatccggggcgtgggtttcgatagaacgctcgggggactggagatggagctgaggctaagggagcggcttgccggcttgtttaacgagcagagaaaagggcaaagggctaaagatgtgagggaaaacccccgggcgatggccaagctactgagggaggctaaccggttgaagactgtgttgagcgccaatgcggaccatatggcacaaattgagggcctgatggatgacgtcgattttaaagctaaagtgactagagtggaatttgaggagctgtgcgccgacctgtttgaacgtgtacccggacctgtgcaacaggccctgcagagcgccgagatgagcctcgatgagattgagcaggtcattcttgtcggcggagccaccagggttcccagggtgcaagaggtgctcttaaaagcagtcggaaaagaagagctggggaagaacataaatgcggacgaggcagccgctatgggggctgtgtaccaggctgccgccttatctaaggcattcaaggtcaagcccttcgtcgtgcgggacgctgtagtctatcccatcttggtagagttcacaagggaagttgaggaggagcccgggatccattctcttaaacacaacaagagagtgttgtttagtagaatggggccctacccacaacgaaaagtcattaccttcaacagatattctcacgacttcaatttccacataaactacggagatttaggattcctcggacccgaggacctaagagtattcggaagccagaatctcaccacagtcaagctcaaaggcgtaggcgactcatttaagaagtaccccgattacgagagcaaggggatcaaggcccactttaatctggacgaatcaggggtcctcagcctcgatcgagtcgaatcagtcttcgaaaccttagtagaggattccgccgaggaagaatccaccctgaccaagttaggtaacacgattagttcgctgtttggtgggggtacaactcccgatgctaaggagaatggaacggacactgtgcaggaggaagaggagagcccagctgagggcagcaaagatgagcccggtgagcaggtggaacttaaggaggaggcggaggctccagtcgaggatggctcgcagccaccgccgcctgaaccaaaaggcgacgctacgcctgaaggagagaaagccaccgagaaggaaaatggtgataagagtgaggctcagaagcccacgtccgtgtgccgggcttcagtgacacgcttcgggttctag

SEQ ID NO: 283417 - DNA, 1680 bp, Artificial Sequence
  derived and/or modified sequence
atggccatcaagaaccccaaggccaccctgcggtacttccagcaccttttaggcaaacaggcagacaacccccacgtggcgttgtaccaggcaaggttcccagaacatgagctgacattcgatccacaacggcagaccgtgcatttccagatcagctcacaactgcagttctcccccgaggaagtgttggggatggttctgaactactccagatcactggccgaggactttgcagagcagccaatcaaagatgcagtgataaccgtcccagtttttttcaatcaggcggagcgtcgcgcggtgctacaagcagcgcgaatggctggcctgaaagttctacagttgattaatgataataccgctactgccttatcttatggtgttttcagacggaaggacatcaataccaccgctcagaacatcatgttctacgatatgggctcaggctccaccgtgtgcacaatcgtaacatatcagatggttaagaccaaagaagccgggatgcagccccaattgcaaatccggggagtcggcttcgatcggactctgggtgggctagagatggagctgcgactgcgggaacgacttgccggcctctttaatgagcagcgaaaaggccagcgggccaaagacgtcagagaaaaccctcgggcgatggctaagctgcttcgggaggcgaatcgactgaagaccgtgttatccgccaacgcagatcatatggcacaaatcgagggactcatggacgacgtggattttaaggcgaaggtgacaagagtggaatttgaagaactctgcgctgacctcttcgagagggttcctgggccagtgcaacaagcattgcaatcagcggagatgtcactggatgagattgagcaggttattctcgtcggaggggctacaagagtgccccgcgtacaggaggtgctcctcaaagcagtggggaaggaggagttgggcaagaatatcaacgcagatgaggcagctgccatgggggcggtttaccaggcagctgctctttcgaaagcgttcaaggttaagcctttcgtggtaagagacgcggtcgtgtatcctatactggtcgagttcacccgtgaggtcgaggaggagccaggaatccactctctgaagcataataagcgcgtgttgttctctcgaatgggcccatatccacagaggaaagttattacattcaacagatacagtcacgactttaactttcacatcaattacggtgacctgggcttcctggggcctgaggaccttcgcgtctttggatcccagaatctaacgactgtgaagttaaaaggggtcggcgactcgtttaaaaagtaccctgactacgaatcaaagggtatcaaagcacacttcaatctggacgagagcggggtgctgtccctggatcgtgtcgagagcgtcttcgagacgctagtcgaggattccgcagaggaagaatccactttgacgaaattaggaaacactatttctagtctattcggcgggggcacaacacctgatgccaaagaaaatggtaccgacaccgttcaaatgctgttcttgtgtcctgctagactccctcagagcaaacaggctatagacaggttccatactgcagtcacttgtatggagccaccatggggacgaaggtgtcgtgcccgcccagcctggaggctatgctcatag

SEQ ID NO: 283418 - DNA, 2976 bp, Artificial Sequence
  derived and/or modified sequence
atggccgataaggtcaggagacagcgtccgagaaggcgtgtgtgctgggcactggtggccgtgttgctcgccgacctgctggcacttagtgataccctggccgtgatgtcagtggacctcgggagtgagtcaatgaaggtggccatcgtgttgaataaagagtcccgtagaaagacgccggtcattgtcactctaaaggagaatgagcggttttttggcgactccgcagccagcatggctatcaagaacccaaaagctacactgcgctacttccagcatctcttaggtaagcaggccgataatccccatgtggctttatatcaggccaggttcccagagcacgaactgacctttgaccctcaaaggcagaccgttcacttccagatctcaagccagctgcagttctctccagaagaagtcctgggtatggttctcaattattctcggagtctcgctgaggactttgcagagcagccaatcaaggatgctgtgatcaccgttcctgtgttttttaaccaggccgaaagacgggctgtgctgcaggcagccagaatggctggcttaaaggttctacaactgattaacgataatacagcgaccgctttgagctacggcgtgtttcggaggaaggatatcaacaccacagcacagaacattatgttctacgatatggggtcggggtccactgtctgtactatcgtaacttaccagatggtgaagacgaaagaggcagggatgcaacctcagttacaaatcagaggggtggggttcgacagaacactgggcggattggaaatggagctacgcctacgcgaacgactggccggactatttaatgagcagaggaaaggccagcgcgctaaagacgtccgggaaaatcctcgggctatggccaaactgttaagagaagccaataggttgaaaaccgttctgagcgccaatgcggaccacatggcacaaatcgaaggtctgatggacgacgttgacttcaaagctaaagtcactcgcgtggaattcgaagaactatgtgctgatctttttgaacgcgtgcctggtccagtccagcaggccttgcagagcgctgagatgtccctagatgagatcgagcaagtaatcttagtggggggtgcaaccagagtccctcgagtgcaggaggtgctcctgaaggctgtaggtaaagaagagctggggaaaaacatcaacgcggacgaagccgcagccatgggcgcagtgtaccaagccgctgccctgagtaaggcgttcaaggtaaagccatttgttgtccgggacgccgtggtgtatcccatcctggtggagttcaccagagaggtagaggaagagccaggtattcactcacttaagcacaacaaacgagttcttttcagtagaatgggcccttacccgcagcgtaaggtgatcactttcaatcgctacagtcatgactttaattttcacattaactatggagacttgggtttcctcgggccagaagacctgcgggtgttcggcagtcagaaccttaccacagtgaaattaaagggggtaggcgacagctttaaaaaatacccagactatgagtccaagggtatcaaagcacactttaacttagacgagagtggcgtattatcactagaccgcgtggaatcagtgttcgagacactcgtagaagactccgccgaggaagagagcaccttgactaagctgggcaataccatctctagtttgttcggcggaggtacaacacctgatgccaaggagaacgggactgatactgtccaagaggaagaagagtcacccgctgaggggagtaaagatgaacccggagaacaggtagaattgaaagaggaggccgaggcccctgttgaggatggtagccagcctccaccgccagagcccaagggtgatgcgactcccgagggggaaaaagcaacagagaaagaaaatggcgataaatcagaggcacagaagccgtcagagaaagcagaggcgggacccgaaggtgtggcacctgccccagagggcgaaaaaaaacaaaagcctgcacgcaagagaaggatggttgaagagattggtgtggaattagtggtcctggacctgcctgatcttcccgaagacaagctcgcccaatccgtgcagaagctgcaagatctgactctgcgggatctcgagaagcaggaacgagaaaaggccgcaaattccttggaggcgtttatattcgaaacccaagataagctctatcagccggagtatcaggaggtaagcacagaagagcagcgagaggagatctccggcaagctgtccgctgcctctacatggcttgaggatgagggagtaggagccacgactgtgatgcttaaagaaaagctagcagaactgcggaaactctgccagggtcttttcttccgcgtggaggaaaggaaaaagtggccagaacggctctcagcacttgataatctgctgaaccactcttctatgtttctaaagggggcaaggctcataccagagatggaccagatttttacagaggtagagatgaccacactcgagaaggtgatcaatgaaacatgggcctggaagaatgccacattagcagaacaggctaaactgcccgctaccgagaagccagtgctgctgtcaaaagacattgaagctaagatgatggccttggaccgggaggttcagtatttgctgaataaagccaaattcactaaaccacgtcctagaccgaaagataaaaatggtacgagagccgaacccccactgaacgcctccgcatctgaccagggcgaaaaagttatccctccagcagggcagaccgaggacgccgagccaatttcagaacctgagaaggtggagacggctggtagcgagcccggagatacagagccgctggaattgggcggtcctggcgcagagcctgagcagaaagaacagtctaccggacagaagcggcctctgaagaacgacgagttgtag

SEQ ID NO: 283419 - DNA, 2040 bp, Artificial Sequence
  derived and/or modified sequence
atggccgacaaggttagaagacagcgaccaaggaggcgagtgtgttgggcattagtggccgtgctcctcgcagatttattggctctgagcgataccctagccgtgatgagcgtcgacctgggtagcgagagtatgaaagttgccatagtaaaacccggtgtgcccatggagatagtactgaacaaggaatccagaagaaaaactcctgtgatagtcacactgaaggaaaatgagagattcttcggagacagcgccgcatccatggccatcaagaaccctaaagccacacttagatattttcagcatctgcttggaaagcaggcagataatccacatgtggcgctgtatcaggcacgctttccagaacatgagctgacatttgatccccagaggcagaccgtgcactttcaaatatcaagccagcttcagttctcacctgaggaggtgctcggaatggtgttgaattactcacggtccctcgcagaggacttcgccgagcaacccattaaagatgcagtaattaccgtgccggtgttttttaatcaggccgagcgacgggctgttctccaggccgcaaggatggctgggcttaaggtgctccagcttatcaatgataacaccgccacggcgctttcatacggcgtgtttcggaggaaggacatcaatactaccgcccagaacattatgttctacgatatggggtcagggagcactgtgtgcaccatcgtaacttatcaaatggtgaagacaaaggaagcaggaatgcaacctcagctgcagattagaggagtgggattcgataggaccctgggaggcctggagatggagcttcgcctgcgggagaggctggcagggctcttcaatgaacagcgcaagggtcagagagccaaggacgtgcgcgagaatccacgggcaatggccaaactgttgagggaagcaaataggctgaagactgtcctgagcgcaaacgctgaccacatggcacagatcgagggactgatggatgatgtcgattttaaggccaaggtcacccgagtggagttcgaggaattgtgcgctgatctgttcgagagagttcctggacctgtgcagcaagctcttcagtctgctgaaatgagcctggacgagattgagcaggtgattttggttggaggggcaaccagagttcccagggtccaggaagtgcttttaaaggcagtgggcaaagaagagctcggcaaaaatattaatgccgacgaagcagccgcaatgggagcagtatatcaggctgctgccctttcgaaggcattcaaggtcaaacccttcgttgtgcgggatgcagtggtgtatccaatcttggtggaattcactagagaggtggaggaggaacccggtattcatagtctgaagcacaacaaacgagtgctgtttagcaggatgggcccatatcctcagcgcaaggttataacttttaatcgctactcacatgactttaactttcacatcaattacggagacctgggctttctggggccagaagatttgcgagtttttggctcccaaaatctgacaacggtcaaactcaagggagtcggcgactcgtttaaaaagtatccggactacgaatcgaagggaatcaaagcccacttcaatctggatgagtcaggcgtgctctctctcgacagggtggagtctgtgttcgaaactctggttgaggatagcgcagaagaggaatctacgctgacaaagttaggtaataccatctcttctctgttcgggggaggaactactccagatgcaaaagagaatgggaccgacacagtgcaggaggaagaagagagcccagctgaagggtctaaagacgagccaggcgaacaggttgagctgaaggaagaggcagaggcacccgtcgaagacgggagccagccacctccgccagagccaaagggggacgccacccctgagggggaaaaagccactgaaaaagagaatggtgacaagtcagaggcgcaaaaacctaccagcgtttgccgtgcttctgttacacgctttggcttttag

SEQ ID NO: 283420 - DNA, 1680 bp, Artificial Sequence
  derived and/or modified sequence
atggcaatcaaaaacccaaaagcaaccctgcgctactttcaacaccttctcggtaagcaggccgacaatccccatgtggcattgtatcaggctaggtttcctgagcacgagctgacttttgatccccagaggcagaccgttcactttcagatttccagtcagttacaattctcccctgaagaggttctgggcatggtactgaactattcccgttcgcttgccgaggatttcgctgagcagcctatcaaagatgccgttattacagtccccgtattcttcaatcaggcagagcgacgggcagttctgcaggccgcacgtatggcaggcctgaaggtgttacagctgattaatgataataccgcaaccgccctctcctacggggtgtttaggcgtaaggacatcaacaccacagcccaaaacattatgttctacgacatgggctccggaagcacagtctgtacaatcgtgacctatcaaatggtgaaaacaaaagaggccggaatgcagccacaattacagatacgtggcgttggtttcgaccgcacgctgggcggtctggagatggaattgagactgagggagaggttggccggattgtttaatgagcaacgcaaaggtcagcgcgctaaagacgtaagggagaaccctcgagctatggctaagctgttgcgtgaagccaatcgactcaagaccgtgctgagcgccaacgccgaccacatggcccagatcgagggcctgatggacgacgttgactttaaagcaaaggttacacgggtggagttcgaggagctgtgtgcagacctctttgagcgcgtaccgggacctgtacagcaggccctgcagagcgctgagatgtccctggatgagattgaacaggtgatcctggtgggaggggcaaccagagtgccgcgagtccaggaggtgctgctgaaagctgtgggcaaggaagaactaggcaagaatatcaacgctgatgaagctgccgcaatgggagctgtttaccaggccgcagctctgtctaaggcctttaaggtcaaaccctttgtggtgagggacgccgttgtgtacccaatcctggttgagtttacaagagaggtggaagaggaaccaggcattcacagcctcaagcacaacaaaagggtcctcttttctagaatgggcccttatccccaaagaaaggtgattacattcaacagatacagccacgattttaacttccacataaactatggggacctcggatttttgggtcccgaagacctgcgcgtcttcggctctcagaacctaacaaccgtgaaactaaagggagtgggagattccttcaagaaatacccggattatgagtccaaaggtataaaagcccactttaatctggatgagtccggagtgctctcactcgatcgggtggagagcgtcttcgaaactctcgtggaggattccgcagaggaagaatcgacactaacaaagctggggaacactatctcctccctctttggagggggaaccaccccagatgctaaagagaacggtacagacacagtacagatgctttttctgtgtccagctcgcctgcctcagtccaaacaggccatcgatcgctttcatacagctgttacatgtatggaacctccttggggcagacgctgtcgcgctagaccagcctggaggctctgctcttag

SEQ ID NO: 283421 - DNA, 2976 bp, Artificial Sequence
  derived and/or modified sequence
atggccgacaaggtgagaagacagagacccagaagaagagtgtgctgggccctggtggccgtgctgctggccgacctgctggccctgagcgacaccctggccgtgatgagcgtggacctgggcagcgagagcatgaaggtggccatcgtgctgaacaaggagagcagaagaaagacccccgtgatcgtgaccctgaaggagaacgagagattcttcggcgacagcgccgccagcatggccatcaagaaccccaaggccaccctgagatacttccagcacctgctgggcaagcaggccgacaacccccacgtggccctgtaccaggccagattccccgagcacgagctgaccttcgacccccagagacagaccgtgcacttccagatcagcagccagctgcagttcagccccgaggaggtgctgggcatggtgctgaactacagcagaagcctggccgaggacttcgccgagcagcccatcaaggacgccgtgatcaccgtgcccgtgttcttcaaccaggccgagagaagagccgtgctgcaggccgccagaatggccggcctgaaggtgctgcagctgatcaacgacaacaccgccaccgccctgagctacggcgtgttcagaagaaaggacatcaacaccaccgcccagaacatcatgttctacgacatgggcagcggcagcaccgtgtgcaccatcgtgacctaccagatggtgaagaccaaggaggccggcatgcagccccagctgcagatcagaggcgtgggcttcgacagaaccctgggcggcctggagatggagctgagactgagagagagactggccggcctgttcaacgagcagagaaagggccagagagccaaggacgtgagagagaaccccagagccatggccaagctgctgagagaggccaacagactgaagaccgtgctgagcgccaacgccgaccacatggcccagatcgagggcctgatggacgacgtggacttcaaggccaaggtgaccagagtggagttcgaggagctgtgcgccgacctgttcgagagagtgcccggccccgtgcagcaggccctgcagagcgccgagatgagcctggacgagatcgagcaggtgatcctggtgggcggcgccaccagagtgcccagagtgcaggaggtgctgctgaaggccgtgggcaaggaggagctgggcaagaacatcaacgccgacgaggccgccgccatgggcgccgtgtaccaggccgccgccctgagcaaggccttcaaggtgaagcccttcgtggtgagagacgccgtggtgtaccccatcctggtggagttcaccagagaggtggaggaggagcccggcatccacagcctgaagcacaacaagagagtgctgttcagcagaatgggcccctacccccagagaaaggtgatcaccttcaacagatacagccacgacttcaacttccacatcaactacggcgacctgggcttcctgggccccgaggacctgagagtgttcggcagccagaacctgaccaccgtgaagctgaagggcgtgggcgacagcttcaagaagtaccccgactacgagagcaagggcatcaaggcccacttcaacctggacgagagcggcgtgctgagcctggacagagtggagagcgtgttcgagaccctggtggaggacagcgccgaggaggagagcaccctgaccaagctgggcaacaccatcagcagcctgttcggcggcggcaccacccccgacgccaaggagaacggcaccgacaccgtgcaggaggaggaggagagccccgccgagggcagcaaggacgagcccggcgagcaggtggagctgaaggaggaggccgaggcccccgtggaggacggcagccagccccccccccccgagcccaagggcgacgccacccccgagggcgagaaggccaccgagaaggagaacggcgacaagagcgaggcccagaagcccagcgagaaggccgaggccggccccgagggcgtggcccccgcccccgagggcgagaagaagcagaagcccgccagaaagagaagaatggtggaggagatcggcgtggagctggtggtgctggacctgcccgacctgcccgaggacaagctggcccagagcgtgcagaagctgcaggacctgaccctgagagacctggagaagcaggagagagagaaggccgccaacagcctggaggccttcatcttcgagacccaggacaagctgtaccagcccgagtaccaggaggtgagcaccgaggagcagagagaggagatcagcggcaagctgagcgccgccagcacctggctggaggacgagggcgtgggcgccaccaccgtgatgctgaaggagaagctggccgagctgagaaagctgtgccagggcctgttcttcagagtggaggagagaaagaagtggcccgagagactgagcgccctggacaacctgctgaaccacagcagcatgttcctgaagggcgccagactgatccccgagatggaccagatcttcaccgaggtggagatgaccaccctggagaaggtgatcaacgagacctgggcctggaagaacgccaccctggccgagcaggccaagctgcccgccaccgagaagcccgtgctgctgagcaaggacatcgaggccaagatgatggccctggacagagaggtgcagtacctgctgaacaaggccaagttcaccaagcccagacccagacccaaggacaagaacggcaccagagccgagccccccctgaacgccagcgccagcgaccagggcgagaaggtgatcccccccgccggccagaccgaggacgccgagcccatcagcgagcccgagaaggtggagaccgccggcagcgagcccggcgacaccgagcccctggagctgggcggccccggcgccgagcccgagcagaaggagcagagcaccggccagaagagacccctgaagaacgacgagctgtag

SEQ ID NO: 283422 - DNA, 2040 bp, Artificial Sequence
  derived and/or modified sequence
atggccgacaaggtgagaagacagagacccagaagaagagtgtgctgggccctggtggccgtgctgctggccgacctgctggccctgagcgacaccctggccgtgatgagcgtggacctgggcagcgagagcatgaaggtggccatcgtgaagcccggcgtgcccatggagatcgtgctgaacaaggagagcagaagaaagacccccgtgatcgtgaccctgaaggagaacgagagattcttcggcgacagcgccgccagcatggccatcaagaaccccaaggccaccctgagatacttccagcacctgctgggcaagcaggccgacaacccccacgtggccctgtaccaggccagattccccgagcacgagctgaccttcgacccccagagacagaccgtgcacttccagatcagcagccagctgcagttcagccccgaggaggtgctgggcatggtgctgaactacagcagaagcctggccgaggacttcgccgagcagcccatcaaggacgccgtgatcaccgtgcccgtgttcttcaaccaggccgagagaagagccgtgctgcaggccgccagaatggccggcctgaaggtgctgcagctgatcaacgacaacaccgccaccgccctgagctacggcgtgttcagaagaaaggacatcaacaccaccgcccagaacatcatgttctacgacatgggcagcggcagcaccgtgtgcaccatcgtgacctaccagatggtgaagaccaaggaggccggcatgcagccccagctgcagatcagaggcgtgggcttcgacagaaccctgggcggcctggagatggagctgagactgagagagagactggccggcctgttcaacgagcagagaaagggccagagagccaaggacgtgagagagaaccccagagccatggccaagctgctgagagaggccaacagactgaagaccgtgctgagcgccaacgccgaccacatggcccagatcgagggcctgatggacgacgtggacttcaaggccaaggtgaccagagtggagttcgaggagctgtgcgccgacctgttcgagagagtgcccggccccgtgcagcaggccctgcagagcgccgagatgagcctggacgagatcgagcaggtgatcctggtgggcggcgccaccagagtgcccagagtgcaggaggtgctgctgaaggccgtgggcaaggaggagctgggcaagaacatcaacgccgacgaggccgccgccatgggcgccgtgtaccaggccgccgccctgagcaaggccttcaaggtgaagcccttcgtggtgagagacgccgtggtgtaccccatcctggtggagttcaccagagaggtggaggaggagcccggcatccacagcctgaagcacaacaagagagtgctgttcagcagaatgggcccctacccccagagaaaggtgatcaccttcaacagatacagccacgacttcaacttccacatcaactacggcgacctgggcttcctgggccccgaggacctgagagtgttcggcagccagaacctgaccaccgtgaagctgaagggcgtgggcgacagcttcaagaagtaccccgactacgagagcaagggcatcaaggcccacttcaacctggacgagagcggcgtgctgagcctggacagagtggagagcgtgttcgagaccctggtggaggacagcgccgaggaggagagcaccctgaccaagctgggcaacaccatcagcagcctgttcggcggcggcaccacccccgacgccaaggagaacggcaccgacaccgtgcaggaggaggaggagagccccgccgagggcagcaaggacgagcccggcgagcaggtggagctgaaggaggaggccgaggcccccgtggaggacggcagccagccccccccccccgagcccaagggcgacgccacccccgagggcgagaaggccaccgagaaggagaacggcgacaagagcgaggcccagaagcccaccagcgtgtgcagagccagcgtgaccagattcggcttctag

SEQ ID NO: 283423 - DNA, 1680 bp, Artificial Sequence
  derived and/or modified sequence
atggccatcaagaaccccaaggccaccctgagatacttccagcacctgctgggcaagcaggccgacaacccccacgtggccctgtaccaggccagattccccgagcacgagctgaccttcgacccccagagacagaccgtgcacttccagatcagcagccagctgcagttcagccccgaggaggtgctgggcatggtgctgaactacagcagaagcctggccgaggacttcgccgagcagcccatcaaggacgccgtgatcaccgtgcccgtgttcttcaaccaggccgagagaagagccgtgctgcaggccgccagaatggccggcctgaaggtgctgcagctgatcaacgacaacaccgccaccgccctgagctacggcgtgttcagaagaaaggacatcaacaccaccgcccagaacatcatgttctacgacatgggcagcggcagcaccgtgtgcaccatcgtgacctaccagatggtgaagaccaaggaggccggcatgcagccccagctgcagatcagaggcgtgggcttcgacagaaccctgggcggcctggagatggagctgagactgagagagagactggccggcctgttcaacgagcagagaaagggccagagagccaaggacgtgagagagaaccccagagccatggccaagctgctgagagaggccaacagactgaagaccgtgctgagcgccaacgccgaccacatggcccagatcgagggcctgatggacgacgtggacttcaaggccaaggtgaccagagtggagttcgaggagctgtgcgccgacctgttcgagagagtgcccggccccgtgcagcaggccctgcagagcgccgagatgagcctggacgagatcgagcaggtgatcctggtgggcggcgccaccagagtgcccagagtgcaggaggtgctgctgaaggccgtgggcaaggaggagctgggcaagaacatcaacgccgacgaggccgccgccatgggcgccgtgtaccaggccgccgccctgagcaaggccttcaaggtgaagcccttcgtggtgagagacgccgtggtgtaccccatcctggtggagttcaccagagaggtggaggaggagcccggcatccacagcctgaagcacaacaagagagtgctgttcagcagaatgggcccctacccccagagaaaggtgatcaccttcaacagatacagccacgacttcaacttccacatcaactacggcgacctgggcttcctgggccccgaggacctgagagtgttcggcagccagaacctgaccaccgtgaagctgaagggcgtgggcgacagcttcaagaagtaccccgactacgagagcaagggcatcaaggcccacttcaacctggacgagagcggcgtgctgagcctggacagagtggagagcgtgttcgagaccctggtggaggacagcgccgaggaggagagcaccctgaccaagctgggcaacaccatcagcagcctgttcggcggcggcaccacccccgacgccaaggagaacggcaccgacaccgtgcagatgctgttcctgtgccccgccagactgccccagagcaagcaggccatcgacagattccacaccgccgtgacctgcatggagcccccctggggcagaagatgcagagccagacccgcctggagactgtgcagctag

SEQ ID NO: 283424 - DNA, 1204 bp, Artificial Sequence
  derived and/or modified sequence
gcgctgctcttccccgcggagcccgcgcagtccgcgcagccctcatcgcaactgggcccgcgcgcagatccaccaaagagaaagcagccctgtgccagttgctctgccagcctttcacaggagaagtgtcactagaatactacagcccccacaggctctgctccacagaaacttaaggctgaaagagtgtccgccatcagggacatcctctgtcactacggccttacataggaagtccttctaaagagctgcctgccagctgcccttccccagatcccgaatatcctcctggccaggtggagcagagaacagttcctcagctggtcatgctgagctcataccctgatggctgctccatgaggtcaagactgggtctcctccctcctcccccttcaccaatgcctggtctcacggggctagttttgacccccacgctatggcatcatcgacctccctcccagctcctggctctcggcctaagaagcctctaggcaagatggctgactggttcaggcagaccctgctgaagaagcccaagaagaggcccaactccccagaaagcacctccagcgatgcttcacagcctacctcacaggacagcccactacccccaagcctcagctcagtcacgtctcccagcctgccacccacacatgcgagtgacagtggcagtagtcgctggagcaaagactatgacgtctgcgtgtgccacagtgaggaagacctggtggccgcccaggacctggtctcctacttggaaggcagcactgccagcctgcgctgcttcctgcaactccgggatgcaaccccaggcggcgctatagtgtccgagctgtgccaggcactgagcagtagtcactgccgggtgctgctcatcacgccgggcttccttcaggacccctggtgcaagtaccagatgctgcaggccctgaccgaggctccaggggccgagggctgcaccatccccctgctgtcgggcctcagcagagctgcctacccacctgagctccgattcatgtactacgtcgatggcaggggccctgatggtggctttcgtcaagtcaaagaagctgtcatgcgttcaaatcaggtcctcaaacacttgttatatcatgggaccccggaaattggagtgaagctagaaacagaaaacccatgcagggcctcggattcccacaaatgtgacaagaggtatagggagtga

SEQ ID NO: 283425 - DNA, 1264 bp, Artificial Sequence
  derived and/or modified sequence
cgcgcagtccgcgcagccctcatcgcaactgggcccgcgcgcagatccaccaaagagaaagcagccctgtgccagttgctctgccagcctttcacaggagaagtgtcactagaatactacagcccccacaggctctgctccacagaaacttaaggctgaaagagtgtccgccatcagggacatcctctgtcactacggtgggaaaagaacatggccttacataggaagtccttctaaagagctgcctgccagctgcccttccccagatcccgaatatcctcctggccaggtggagcagagaacagttcctcagctggtcatgctgagctcataccctgatggctgctccatgaggtcaagactgggtctcctccctcctcccccttcaccaatgcctggtctcacggggctagttttgacccccacgctatggcatcatcgacctccctcccagctcctggctctcggcctaagaagcctctaggcaagatggctgactggttcaggcagaccctgctgaagaagcccaagaagaggcccaactccccagaaagcacctccagcgatgcttcacagcctacctcacaggacagcccactacccccaagcctcagctcagtcacgtctcccagcctgccacccacacatgcgagtgacagtggcagtagtcgctggagcaaagactatgacgtctgcgtgtgccacagtgaggaagacctggtggccgcccaggacctggtctcctacttggaaggcagcactgccagcctgcgctgcttcctgcaactccgggatgcaaccccaggcggcgctatagtgtccgagctgtgccaggcactgagcagtagtcactgccgggtgctgctcatcacgccgggcttccttcaggacccctggtgcaagtaccagatgctgcaggccctgaccgaggctccaggggccgagggctgcaccatccccctgctgtcgggcctcagcagagctgcctacccacctgagctccgattcatgtactacgtcgatggcaggggccctgatggtggctttcgtcaagtcaaagaagctgtcatgcgttgtaagctactacaggagggagaaggggaacgggattcagctacagtatctgatctactttgacttttaggagacagccctgtagcctagtagttcaaagcgcagcttctggaaaaggctgtcggggtttgtatcctggctcctgcacttattaacccataaaaagtaacttggccaagttactcacccg

SEQ ID NO: 283426 - DNA, 2195 bp, Artificial Sequence
  derived and/or modified sequence
gcgctgctcttccccgcggagcccgcgcagtccgcgcagccctcatcgcaactgggcccgcgcgcaggccttacataggaagtccttctaaagagctgcctgccagctgcccttccccagatcccgaatatcctcctggccaggtggagcagagaacagttcctcagctggtcatgctgagctcataccctgatggctgctccatgaggtcaagactgggtctcctccctcctcccccttcaccaatgcctggtctcacggggctagttttgacccccacgctatggcatcatcgacctccctcccagctcctggctctcggcctaagaagcctctaggcaagatggctgactggttcaggcagaccctgctgaagaagcccaagaagaggcccaactccccagaaagcacctccagcgatgcttcacagcctacctcacaggacagcccactacccccaagcctcagctcagtcacgtctcccagcctgccacccacacatgcgagtgacagtggcagtagtcgctggagcaaagactatgacgtctgcgtgtgccacagtgaggaagacctggtggccgcccaggacctggtctcctacttggaaggcagcactgccagcctgcgctgcttcctgcaactccgggatgcaaccccaggcggcgctatagtgtccgagctgtgccaggcactgagcagtagtcactgccgggtgctgctcatcacgccgggcttccttcaggacccctggtgcaagtaccagatgctgcaggccctgaccgaggctccaggggccgagggctgcaccatccccctgctgtcgggcctcagcagagctgcctacccacctgagctccgattcatgtactacgtcgatggcaggggccctgatggtggctttcgtcaagtcaaagaagctgtcatgcgttatctgcagacactcagttgacacttgttatatcatgggaccccggaaattggagtgaagctagaaacagaaaacccatgcagggcctcggattcccacaaatgtgacaagaggtatagggagtgagtcacagcgctttgctcgtgaccctgggatcagagcacccatcaggcttccattactgtgggctccctaagaagaccatggagagcttggggactcccccaggaaggccgtgaagctggggattccccctaggaaagccatgaggaagctggggactccccaagaaggccatgaggaagccagaaattggaggtggtaggaagtggtactgatcaatgatggccagcaggactcatctcctgcctaactggacaggaagcctggcacccacttctgtcttcccctggaactgggcactggcgtacactggtatccctcctaaagaagtgactcacctgactgatcagcaagaagcctagattgcaggcctcaccatggatggtcttcctagttgcctggggaaaccctggaatgggcatcaggagaaagcaacaagaatccagtccttcacactcacactactctgttcctcttcccagagacatcgattcacttcaaagagctgtagggaagatgcagtcagcactgcactgtattttttatttattgcctaggtgccattaaagacacaaacctagaagcctagaggccattctgaatatgggggtggggtggtggagggagcaagtgaagagatgggaatccagggctcagggttcaatgccttcacctgagatcacaagcccatggatgctgtgacatctgggagcttcatcagtggtctggctaaagctgatactttcacagtcaccatcttcacctttggactgggaagaatcaccatttttcttctggcagatgactgtattccttataggacaggcaaggtttcattcatctgttctcagtaagtttgttgttgaactgaaatgaatttcattatttcctccaatgtgtacttttgtgcccccctctcacttctccctatcatgacccctcttttgctgaaaaaaatttttattattttttctatctctagttctagaaagagaaaatttattttttaaattataaactattttgccaggcgccatggctcacacctgtaatctcagcactttgggaggccgaggcaggtggatcacctgaggtcaggagttcaagactagcctggccaatatggtgaaaccctgtctctact

SEQ ID NO: 283427 - DNA, 2068 bp, Artificial Sequence
  derived and/or modified sequence
ccgcgcagccctcatcgcaactgggcccgcgcgcagatccaccaaagagaaagcagccctgtgccagttgctctgccagcctttcacaggagaagtgtcactagaatactacagcccccacaggctctgctccacagaaacttaaggctgaaagagtgtccgccatcagggacatcctctgtcactacggccttacataggaagtccttctaaagagctgcctgccagctgcccttccccagatcccgaatatcctcctggccaggtggagcagagaacagttcctcagctggtcatgctgagctcataccctgatggctgctccatgaggtcaagactgggtctcctccctcctcccccttcaccaatgcctggtctcacggggctagttttgacccccacgctatggcatcatcgacctccctcccagctcctggctctcggcctaagaagcctctaggcaagatggctgactggttcaggcagaccctgctgaagaagcccaagaagaggcccaactccccagaaagcacctccagcgatgcttcacagcctacctcacaggacagcccactacccccaagcctcagctcagtcacgtctcccagcctgccacccacacatgcgagtgacagtggcagtagtcgctggagcaaagactatgacgtctgcgtgtgccacagtgaggaagacctggtggccgcccaggacctggtctcctacttggaaggcagcactgccagcctgcgctgcttcctgcaactccgggatgcaaccccaggcggcgctatagtgtccgagctgtgccaggcactgagcagtagtcactgccgggtgctgctcatcacgccgggcttccttcaggacccctggtgcaagtaccagatgctgcaggccctgaccgaggctccaggggccgagggctgcaccatccccctgctgtcgggcctcagcagagctgcctacccacctgagctccgattcatgtactacgtcgatggcaggggccctgatggtggctttcgtcaagtcaaagaagctgtcatgcgttatctgcagacactcagttgacacttgttatatcatgggaccccggaaattggagtgaagctagaaacagaaaacccatgcagggcctcggattcccacaaatgtgacaagaggtatagggagtgagtcacagcgctttgctcgtgaccctgggatcagagcacccatcaggcttccattactgtgggctccctaagaagaccatggagagcttggggactcccccaggaaggccgtgaagctggggattccccctaggaaagccatgaggaagctggggactccccaagaaggccatgaggaagccagaaattggaggtggtaggaagtggtactgatcaatgatggccagcaggactcatctcctgcctaactggacaggaagcctggcacccacttctgtcttcccctggaactgggcactggcgtacactggtatccctcctaaagaagtgactcacctgactgatcagcaagaagcctagattgcaggcctcaccatggatggtcttcctagttgcctggggaaaccctggaatgggcatcaggagaaagcaacaagaatccagtccttcacactcacactactctgttcctcttcccagagacatcgattcacttcaaagagctgtagggaagatgcagtcagcactgcactgtattttttatttattgcctaggtgccattaaagacacaaacctagaagcctagaggccattctgaatatgggggtggggtggtggagggagcaagtgaagagatgggaatccagggctcagggttcaatgccttcacctgagatcacaagcccatggatgctgtgacatctgggagcttcatcagtggtctggctaaagctgatactttcacagtcaccatcttcacctttggactgggaagaatcaccatttttcttctggcagatgactgtattccttataggacaggcaaggtttcattcatctgttctcagtaagtttgttgttgaactgaaatgaatttcattatttcctccaa

SEQ ID NO: 283428 - DNA, 2245 bp, Artificial Sequence
  derived and/or modified sequence
aatgcctggtctcacggggctagttttgacccccacgctatggcatcatcgacctccctcccagctcctggctctcggcctaagaagcctctaggcaagatggctgactggttcaggcagaccctgctgaagaagcccaagaagaggcccaactccccagaaagcacctccagcgatgcttcacagcctacctcacaggacagcccactacccccaagcctcagctcagtcacgtctcccagcctgccacccacacatgcgagtgacagtggcagtagtcgctggagcaaagactatgacgtctgcgtgtgccacagtgaggaagacctggtggccgcccaggacctggtctcctacttggaaggcagcactgccagcctgcgctgcttcctgcaactccgggatgcaaccccaggcggcgctatagtgtccgagctgtgccaggcactgagcagtagtcactgccgggtgctgctcatcacgccgggcttccttcaggacccctggtgcaagtaccagatgctgcaggccctgaccgaggctccaggggccgagggctgcaccatccccctgctgtcgggcctcagcagagctgcctacccacctgagctccgattcatgtactacgtcgatggcaggggccctgatggtggctttcgtcaagtcaaagaagctgtcatgcgttatctgcagacactcagttgacacttgttatatcatgggaccccggaaattggagtgaagctagaaacagaaaacccatgcagggcctcggattcccacaaatgtgacaagaggtatagggagtgagtcacagcgctttgctcgtgaccctgggatcagagcacccatcaggcttccattactgtgggctccctaagaagaccatggagagcttggggactcccccaggaaggccgtgaagctggggattccccctaggaaagccatgaggaagctggggactccccaagaaggccatgaggaagccagaaattggaggtggtaggaagtggtactgatcaatgatggccagcaggactcatctcctgcctaactggacaggaagcctggcacccacttctgtcttcccctggaactgggcactggcgtacactggtatccctcctaaagaagtgactcacctgactgatcagcaagaagcctagattgcaggcctcaccatggatggtcttcctagttgcctggggaaaccctggaatgggcatcaggagaaagcaacaagaatccagtccttcacactcacactactctgttcctcttcccagagacatcgattcacttcaaagagctgtagggaagatgcagtcagcactgcactgtattttttatttattgcctaggtgccattaaagacacaaacctagaagcctagaggccattctgaatatgggggtggggtggtggagggagcaagtgaagagatgggaatccagggctcagggttcaatgccttcacctgagatcacaagcccatggatgctgtgacatctgggagcttcatcagtggtctggctaaagctgatactttcacagtcaccatcttcacctttggactgggaagaatcaccatttttcttctggcagatgactgtattccttataggacaggcaaggtttcattcatctgttctcatcttgctctgtcgcccaggctggagtgcagtggcgcaaccttggctcactgcaacctttgcctcccaggttcaagcgattctcctgcctcagcctcccaagtagctgggactacaggtgcgtgtcaccacacccagataattttttgtatttttagtagcgatagggtttcaccgtgttagccaggagggtctcgatctcctgacctcatgatccacccacctcgggctcccaaagtgctggaattacaggcatgagccactgcacccagcctttttttaattattatttgaagaatttaagattggaattaattgctccttgaatgtttggtagactcatctgtaataccatttgagcctagaatattctggtttttttgagacggagtcttgccctattgcccaggccggagtgcagtgggattacacgcgtgagccaccatgcctggccagaatattctttattgtaaaatttaaagctgtaatttcaatgtcttgaagagttatagatctaattagattttccatttctcctggagtcaatttggtacaaacagtcaataaagactacaagaccagtttaagta

SEQ ID NO: 283429 - protein, 220 aa, Artificial Sequence
  derived and/or modified sequence
MGCVFQSTEDKCIFKIDWTLSPGEHAKDEYVLYYYSNLSVPIGRFQNRVHLMGDILCNDGSLLLQDVQEADQGTYICEIRLKGESQVFKKAVVLHVLPEEPKELMVHVGGLIQMGCVFQSTEVKHVTKVEWIFSGRRAKEEIVFRYYHKLRMSVEYSQSWGHFQNRVNLVGDIFRNDGSIMLQGVRESDGGNYTCSIHLGNLVFKKTIVLHVSPEEPRKW

SEQ ID NO: 283430 - protein, 327 aa, Artificial Sequence
  derived and/or modified sequence
MIFLGFADDVLNLRWRHKLLLPTAASLPLLMVYFTNFGNTTIVVPKPFRPILGLHLDLGILYYVYMGLLAVFCTNAINILAGINGLEAGQSLVISASIIVFNLVELEGDCRDDHVFSLYFMIPFFFTTLGLLYHNWYPSRVFVGDTFCYFAGMTFAVVGILGHFSKTMLLFFMPQVFNFLYSLPQLLHIIPCPRHRIPRLNIKTGKLEMSYSKFKTKSLSFLGTFILKVAESLQLVTVHQSETEDGEFTECNNMTLINLLLKVLGPIHERNLTLLLLLLQVRMGIEFIPPCLPFCVILTPVHFSLQILGSAITFSIRYQLVRLFYDV

SEQ ID NO: 283431 - DNA, 1770 bp, Artificial Sequence
  derived and/or modified sequence
agtagataggcgggtgcagcggggcagaacataggttgccttagagaggttccccggtgtcccgacggcggctcaagtcagagttgctgggttttgctcagattggtgtgggaagagcctgcctgtggggagcggccactccatactgctgaggcctcaggactgctgctcagcttgcccgttacctgaagaggcggcggagccgggcccctgaccggtcaccatgtgggccttctcggaattgcccatgccgctgctgatcaatttgatcgtctcgctgctgggatttgtggccacagtcaccctcatcccggccttccggggccacttcattgctgcgcgcctctgtggtcaggacctcaacaaaaccagccgacagcagattttgtggccctgataggtgccctccttgccatctgctgcatgatcttcctgggctttgcggatgatgtactgaatctgcgctggcgccataagctgctgctacctacagctgcctcactacctctcctcatggtctatttcaccaactttggcaacacgaccattgtggtgcccaagcccttccgcccgatacttggcctgcatctggacttgggaatcctgtactatgtctacatggggctgctggcagtgttctgtaccaatgccatcaatatcctagcaggaattaacggcctagaggctggccagtcactagtcatttctgcttccatcattgtcttcaacctggtagagttggaaggtgattgtcgggatgatcatgtcttttccctctacttcatgatacccttttttttcaccactttgggattgctctaccacaactggtacccatcacgggtgtttgtgggagataccttctgttactttgctggcatgacctttgccgtggtgggcatcttgggacacttcagcaagaccatgctactattcttcatgccccaggtgttcaacttcctctactcactgcctcagctcctgcatatcatcccctgccctcgccaccgcatacccagactcaatatcaagacaggcaaactggagatgagctattccaagttcaagaccaagagcctctctttcttgggcacctttattttaaaggtggcagagagcctccagctggtgacagtacaccagagtgagactgaagatggtgaattcactgaatgtaacaacatgaccctcatcaacttgctacttaaagtccttgggcccatacatgagagaaacctcacattgctcctgctgctgctgcaggtgaggatgggaatcgagtttatacctccgtgtctccctttctgcgtgattcttactccagtccatttctccttgcagatcctgggcagtgccatcaccttctccattcgatatcagctcgttcgactcttctatgatgtctgagtcccttgatcattgtcctttacctcacagtctctaggattcctgactcaggctgacctctctctctggtcccagactgcctccttgcccaggcctctctcactcttcatactcctccagattttgttctcagcattttcctttctctgtgatcattggcatcctgggcgtttcttgccctctgctgactactgattggattttacctatggctttctgcaacttgctactctctccctctccatcccatctttgcagcctcatagggtgggatacagcagctttttttgcagttatccacactcacatttcagagtcctgactctcaaggaaccactggtttttgggatagaacttgggcca

SEQ ID NO: 283432 - protein, 367 aa, Artificial Sequence
  derived and/or modified sequence
MKRERGALSRASRALRLAPFVYLLLIQTDPLEGVNITSPVRLIHGTVGKSALLSVQYSSTSSDRPVVKWQLKRDKPVTVVQSIGTEVIGTLRPDYRDRIRLFENGSLLLSDLQLADEGTYEVEISITDDTFTGEKTINLTVDVPISRPQVLVASTTVLELSEAFTLNCSHENGTKPSYTWLKDGKPLLNDSRMLLSPDQKVLTITRVLMEDDDLYSCMVENPISQGRSLPVKITVYRRSSLYIILSTGGIFLLVTLVTVCACWKPSKRKQKKLEKQNSLEYMDQNDDRLKPEGELPATQSPIPSTIRSVGCWEKAELGDKENSSAGTLPSDLGASKGKEPEPASLASSHSLPRRHAMPSTLSVSVHE

SEQ ID NO: 283433 - DNA, 1104 bp, Artificial Sequence
  derived and/or modified sequence
atgaagcgagaacgcggggccctaagtagggcctccagagctctgcggctggccccatttgtctacttgctgcttatccagactgaccctctggagggggttaatattacatccccggtgcgactcatccacggaaccgtgggtaaatcagccctgctctccgtgcagtacagttcgaccagcagcgacagaccagtggtgaaatggcagctcaaacgggataagccagttactgtcgttcagagcattggcactgaggtcatcgggaccctgaggcccgactaccgcgaccgcatcagactgtttgagaacgggtccctgttactcagtgacctccaactggccgatgagggaacatatgaagttgagatttcaataacagatgatacttttactggggaaaagactatcaacttaacagtggacgtgcctatctctcgcccgcaggtgctggtggcctccaccacagttctggaactgtcagaagcttttactttaaattgctcccacgagaatggcactaaaccttcttacacctggttaaaggatggcaaaccactcctgaatgatagccggatgctgttatctcctgaccaaaaagtgctcacaataacaagagtgctgatggaagacgatgatctctacagttgtatggtggagaaccccatcagccaggggaggagtctcccagtcaagataactgtgtatagacggagctctctttacataatcctgagcacaggtgggatcttcctgctcgtgactcttgttactgtttgtgcatgttggaaaccgagcaagaggaaacagaagaaactcgagaaacaaaatagtctcgaatacatggaccagaatgacgaccggctcaaacccgagggtgaactgcctgcgacccagtccccaattccctcaacaatccgaagcgttggttgctgggaaaaagcggaattgggagacaaggagaactcttcagcaggaactctgccatctgatctgggtgcctccaaagggaaagagccggagccagcatctctcgcctcttcacacagcctacctcgcagacacgctatgcctagcactctttcagtttcagtccacgaatag

SEQ ID NO: 283434 - DNA, 1510 bp, Artificial Sequence
  derived and/or modified sequence
gttaggtggagacagggtaggttgggacacaaagtccagttaagtgtgtgtcccagctcagtgctctgagcccagatcctcatctccctgggtagtgaggctcagcacagacaagcaaccaactgctgggctgccggtgccccccatgttggaacctgagttggagattatctcctaagcagatacctgcttccaaactggggatgtagggcttggaaactagaaaatgccaggtctgagggagaggaaagaacaagtccagcaatacacagagctctgtgtattcagagggaagttggcagggttgtgttcgggcagagaaactccgagtggtacaaaggggacgtgcccagagtggagaaatcatgctaattgtctgcactagagctggagaacgccacccaaaatgaagagagaaaggggagccctgtccagagcctccagggccctgcgccttgctccttttgtctaccttcttctgatccagacagaccccctggagggggtgaacatcaccagccccgtgcgcctgatccatggcaccgtggggaagtcggctctgctttctgtgcagtacagcagtaccagcagcgacaggcctgtagtgaagtggcagctgaagcgggacaagccagtgaccgtggtgcagtccattggcacagaggtcatcggcaccctgcggcctgactatcgagaccgtatccgactctttgaaaatggctccctgcttctcagcgacctgcagctggccgatgagggcacctatgaggtcgagatctccatcaccgacgacaccttcactggggagaagaccatcaaccttactgtagatgtgcccatttcgaggccacaggtgttggtggcttcaaccactgtgctggagctcagcgaggccttcaccttgaactgctcacatgagaatggcaccaagcccagctacacctggctgaaggatggcaagcccctcctcaatgactcgagaatgctcctgtcccccgaccaaaaggtgctcaccatcacccgcgtgctcatggaggatgacgacctgtacagctgcatggtggagaaccccatcagccagggccgcagcctgcctgtcaagatcaccgtatacagaagaagctccctttacatcatcttgtctacaggaggcatcttcctccttgtgaccttggtgacagtctgtgcctgctggaaaccctccaaaaggaaacagaagaagctagaaaagcaaaactccctggaatacatggatcagaatgatgaccgcctgaaaccagaaggtgagctcccagccacccaatcacccatcccatcaacaatcagatcagtgggctgctgggaaaaggcagaactgggcgacaaggaaaacagctctgcagggacccttccctctgacctgggcgctagcaagggcaaagaacccgagcctgccagcttggcctcctcccacagcctccctcggaggcatgccatgccaagcactctttctgtctctgttcatgaataa

SEQ ID NO: 283435 - DNA, 1104 bp, Artificial Sequence
  derived and/or modified sequence
atgaagcgggagcggggggccctgagccgggccagccgggccctgcggctggccccctttgtgtacctgctgctgatccagacagaccccctggagggcgtgaacatcaccagccctgtgcggctcatccacggcaccgtgggcaagagcgccctgctgtctgtgcagtacagcagcaccagcagtgacaggcctgtggtgaagtggcagctgaagagggacaagcctgtgacagtggtgcagagcattggaacagaggtgattggcaccctgcggccagactacagagaccgcatccggctgtttgaaaatggcagcctgctgctgagtgacctgcagctggctgatgagggcacctatgaggtggagatcagcatcacagatgacaccttcaccggggagaagaccatcaacctgactgtggatgtgcccatcagccggccccaggtgctggtggccagcaccaccgtgctggagctgtctgaggccttcaccctgaactgcagccatgaaaatggcaccaagcccagctacacctggctgaaggatggcaagcccctgctgaatgacagcaggatgctgctgagcccagaccagaaggtgctgaccatcaccagggtgctgatggaggatgatgacctgtacagctgcatggtggagaaccccatcagccagggccgcagcctgcctgtgaagatcaccgtgtacagaagaagcagcctgtacatcatcctgagcactggaggcatcttcctgctggtgaccctggtgacagtgtgtgcctgctggaagcccagcaagaggaagcagaagaagctggagaagcagaacagcctggagtacatggaccagaatgatgaccggctgaagccagagggggagctgcctgccacccagagccccatccccagcaccatccgctctgtgggctgctgggagaaggccgagctgggggacaaggagaacagcagcgctggcaccctgcccagcgacctgggcgccagcaagggcaaggagcctgagcccgccagcctggccagcagccacagcctgcccaggagacatgccatgcccagcaccctgtctgtgtctgtgcatgaatag

SEQ ID NO: 283436 - DNA, 1104 bp, Artificial Sequence
  derived and/or modified sequence
atgaagcgggagcggggcgccctgagccgggccagccgggccctgaggctcgcaccattcgtctatctgctcctaatccagactgatcccctcgagggggtgaacatcacctcgccagttcgactgattcatgggaccgtcggcaagtcagctctgctttccgtccagtattcttcgacaagctctgacaggccagtagtcaagtggcagttaaaacgagataagcccgttacggtggtccaaagcatcggaacagaggtgatagggaccctgaggcccgactatcgcgatcggatcagattatttgaaaatggctcactcttgctgtcagacttgcagctggccgatgaggggacgtatgaagtggaaatttccatcaccgacgacaccttcaccggtgagaaaaccattaacctgaccgtcgacgtacctatctccaggccccaagtgctggttgcctcaacaaccgtgctagaactttctgaggctttcacgctcaattgctcacacgagaacggcactaagccaagttacacttggctgaaagatgggaagcctttgctcaacgattcaaggatgctgctgtctcctgatcagaaggtcttgactataaccagagttctgatggaggatgacgatctttatagttgcatggtcgagaaccccatctctcaggggcgttcattacctgtcaagattacggtataccgccggtcttctctgtatattatattgtcaaccggtgggatcttcctgcttgtaacgctcgtgaccgtgtgtgcctgttggaaaccatcaaaacgcaaacagaagaagttagaaaagcagaactcgttagagtatatggaccagaacgatgatagactcaagcccgaaggggagcttccagcaacgcagagtcctattccatcgactattcggtccgtgggctgctgggaaaaggctgagcttggcgataaagaaaactcatccgcggggacactaccctcagacctcggggcctctaaaggcaaggagccagaacccgcctccctcgcgtctagtcattctctcccacgacgccatgcaatgccctctacactctccgtgtctgtccacgagtag

SEQ ID NO: 283437 - DNA, 1104 bp, Artificial Sequence
  derived and/or modified sequence
atgaagcgtgagaggggcgctttgtctcgagccagcagggctctgaggctggccccatttgtgtacctcctgctgatccagacagatccacttgaaggcgtaaatattaccagcccagtccgtctgatacacgggaccgtggggaagtctgctcttctgtccgtacaatactcctctaccagctctgaccgaccggttgttaagtggcagttgaaaagggacaagcccgttaccgtggtgcaaagcatcggaaccgaggtgattggcaccctgcgacccgattaccgagaccgcattaggttattcgagaacggtagtctgctgctgtcagaccttcagctggcagacgaggggacgtatgaggtggagatctccattacagacgataccttcaccggcgagaagacaatcaatctaaccgtggatgtaccgatctctcgcccacaggttctggtggcgtctactaccgtactcgagctgtccgaagcctttacgctgaattgctcccatgagaacggaactaagccttcctacacttggctgaaagatggaaaaccgctgctcaatgacagcagaatgctgctatctcccgatcagaaggtcctgaccataacacgcgtcctgatggaggacgatgacctgtactcttgtatggtcgaaaacccaatttcccagggtcggtcactgcccgtgaaaatcacagtgtacagacgttcctctctttacattattctctcaaccggtggtatttttctgcttgtgaccctcgtaactgtatgcgcttgctggaagccatccaagaggaaacagaagaagctggagaaacagaattcattagagtatatggatcaaaacgatgaccggctcaaacctgaaggtgaactgccggctactcagtcaccaattccttcaacaatcagatcagtaggatgctgggagaaggctgagctgggcgacaaagaaaactcttccgccggaaccctgccgtctgatcttggcgctagcaaaggcaaagagcccgaacctgcttcgctagcctctagccacagcctcccaagacggcacgccatgccgagcaccctttccgtgtccgttcacgagtag

SEQ ID NO: 283438 - DNA, 1104 bp, Artificial Sequence
  derived and/or modified sequence
atgaagagagagagaggcgccctgagcagagccagcagagccctgagactggcccccttcgtgtacctgctgctgatccagaccgaccccctggagggcgtgaacatcaccagccccgtgagactgatccacggcaccgtgggcaagagcgccctgctgagcgtgcagtacagcagcaccagcagcgacagacccgtggtgaagtggcagctgaagagagacaagcccgtgaccgtggtgcagagcatcggcaccgaggtgatcggcaccctgagacccgactacagagacagaatcagactgttcgagaacggcagcctgctgctgagcgacctgcagctggccgacgagggcacctacgaggtggagatcagcatcaccgacgacaccttcaccggcgagaagaccatcaacctgaccgtggacgtgcccatcagcagaccccaggtgctggtggccagcaccaccgtgctggagctgagcgaggccttcaccctgaactgcagccacgagaacggcaccaagcccagctacacctggctgaaggacggcaagcccctgctgaacgacagcagaatgctgctgagccccgaccagaaggtgctgaccatcaccagagtgctgatggaggacgacgacctgtacagctgcatggtggagaaccccatcagccagggcagaagcctgcccgtgaagatcaccgtgtacagaagaagcagcctgtacatcatcctgagcaccggcggcatcttcctgctggtgaccctggtgaccgtgtgcgcctgctggaagcccagcaagagaaagcagaagaagctggagaagcagaacagcctggagtacatggaccagaacgacgacagactgaagcccgagggcgagctgcccgccacccagagccccatccccagcaccatcagaagcgtgggctgctgggagaaggccgagctgggcgacaaggagaacagcagcgccggcaccctgcccagcgacctgggcgccagcaagggcaaggagcccgagcccgccagcctggccagcagccacagcctgcccagaagacacgccatgcccagcaccctgagcgtgagcgtgcacgagtag

SEQ ID NO: 283439 - protein, 1140 aa, Artificial Sequence
  derived and/or modified sequence
MSVGSSYENTSPAFSPLSSPASSGSCASHSPSGQEPGPSVPPLVPARSSSYHLALQPPQSRPSGARSESPRLSRKGGHERPPSPGLRGLLTDSPAATVLAEARRATESPRLGGQLPVVAISLSEYPASGALSQPTSIPGSPKFQPPVPAPRNKIGTLQDRPPSPFREPPGSERVLTTSPSRQLVGRTFSDGLATRTLQPPESPRLGRRGLDSMRELPPLSPSLSRRALSPLPTRTTPDPKLNREVAESPRPRRWAAHGASPEDFSLTLGARGRRTRSPSPTLGESLAPHKGSFSGRLSPAYSLGSLTGASPCQSPCVQRKLSSGDLRVPVTRERKNSITEISDNEDDLLEYHRRQRQERLREQEMERLERQRLETILNLCAEYSRADGGPEAGELPSIGEATAALALAGRRPSRGLAGASGRSSEEPGVATQRLWESMERSDEENLKEECSSTESTQQEHEDAPSTKLQGEVLALEEERAQVLGHVEQLKVRVKELEQQLQESAREAEMERALLQGEREAERALLQKEQKAVDQLQEKLVALETGIQKERDKEAEALETETKLFEDLEFQQLERESRVEEERELAGQGLLRSKAELLRSIAKRKERLAILDSQAGQIRAQAVQESERLARDKNASLQLLQKEKEKLTVLERRYHSLTGGRPFPKTTSTLKEMEKLLLPAVDLEQWYQELMAGLGTGPAAASPHSSPPPLPAKASRQLQVYRSKMDGEATSPLPRTRSGPLPSSSGSSSSSSQLSVATLGRSPSPKSALLTQNGTGSLPRNLAATLQDIETKRQLALQQKVESLPAEPLPTDDPAGQQVIEEQRRRLAELKQKAAAEAQCQWDALHGAAPFPAGPSGFPPLMHHSILHHLPAGRERGEEGEHAYDTLSLESSDSMETSISTGGNSACSPDNMSSASGLDMGKIEEMEKMLKEAHAEKNRLMESREREMELRRQALEEERRRREQVERRLQSESARRQQLVEKEVKMREKQFSQARPLTRYLPIRKEDFDLKTHIESSGHGVDTCLHVVLSSKVCRGYLVKMGGKIKSWKKRWFVFDRLKRTLSYYVDKHETKLKGVIYFQAIEEVYYDHLRSAAKSPNPALTFCVKTHDRLYYMVAPSAEAMRIWMDVIVTGAEGYTQFMN

SEQ ID NO: 283440 - DNA, 3423 bp, Artificial Sequence
  derived and/or modified sequence
atgtctgttggctcctcctatgagaacacgtcacctgcttttagtcccctttcttcgcctgcttccagcggctcgtgtgccagtcacagtcccagcggccaagagcccggcccctcagtgcccccgctcgtcccggcacggagttcttcctaccatcttgcactgcagccccctcaatcgagacccagtggggcaaggtcagaaagccccagactgagccggaagggaggacatgagaggcctcccagtccaggccttcgtggcctactgaccgattccccagctgcgacagttctggcagaagcaaggagagccactgagagtcctaggctgggtggtcaactcccagtggtcgcaatcagtctgagcgaatatcccgccagcggcgcgttgagtcagcctacatctattccgggatctcctaaatttcagccacccgtgccagccccccggaacaagatcggtaccttacaagacaggcccccttccccatttcgcgagccccctggctccgagagagttctgaccactagcccgtctcgacagctggttggaagaactttttccgacggtctggcaactcggacactgcagccaccagaatccccacggctcgggcgccgcggcttagattctatgcgcgagctgccaccactatctcctagcctgtcccgcagagccctaagtcctctgcccacaagaaccacacccgatcccaaactcaacagagaagtggcagagagtcctagaccccgccgctgggctgctcatggagcttcacctgaggatttctctctaaccctcggagcaaggggacggaggacgcggtccccctcgccaacattgggcgaatcactcgcccctcataaggggtcgttctctgggagactgtctcctgcatattctttgggaagtttgactggagccagcccctgccagagcccttgcgtccagaggaaactgtcctctggtgacctgagagttccagtcacccgcgagcggaaaaatagcatcacggagatatcagacaacgaagatgatctactggaatatcacaggcggcaacgacaagagcggttacgggagcaggagatggaaagattagaaagacaaagattagagacaatactgaacctatgtgccgaatactcccgcgccgacggtggtcctgaagccggagagttaccgtcaatcggggaagctaccgcggccctggctttggccggacgcaggccttcgcgaggtttggccggggcctccggcagaagttctgaggaacccggtgtggcaactcagcgactctgggaatcgatggaaaggtcggacgaggagaacctaaaggaggaatgctcatccaccgagtctacccaacaggagcatgaagacgcacccagtaccaagctccagggagaggtgcttgctctagaagaagaacgagctcaggttttgggtcatgtagagcagttgaaggtaagagtgaaggaactggaacagcagttgcaggagtcagcgcgagaagccgagatggaacgagccctactccagggggagagggaagctgaaagggcactgcttcagaaagaacaaaaggccgtcgatcagctgcaagagaagctcgtggccctggaaacaggcattcaaaaagagcgcgacaaagaggctgaagcactcgagactgagaccaaactgtttgaggacctcgagttccagcagctggagagagaaagcagagtagaggaggaacgagaactggcgggtcagggcttgctgagatctaaagcggaactgctcagatcgatcgctaaacgtaaagagagacttgctatcctcgattcccaggcggggcagattcgtgcccaggccgtccaggaatcagaaaggcttgcacgagacaaaaatgcaagcctgcagttgttgcagaaggaaaaagagaagctgacagtcctggaacgaaggtaccacagcctgacgggcggacggccgtttcctaagacaaccagcacattgaaagagatggagaagttgctcctgccagccgtcgatttggagcagtggtatcaggagttgatggctggcctggggaccgggcccgcagctgcgagcccgcactcctcaccaccgccccttcccgccaaggcttctcgccagctccaggtgtaccgaagcaaaatggacggagaagccacaagccctcttcctagaacacggagcggacccctaccatcttcgtccggaagctcgagctcgagtagccaactctcagtagccacactcggaagatccccttcgccaaagtcagccctgctcacccagaatggaacgggttccctcccacggaatctcgctgccaccctgcaggatattgagacaaagagacagttagcgctgcaacaaaaggtggagtcactgccagctgaacctctcccaacggatgatccggccggccaacaggttatcgaggagcagcgccgtcgtctggccgaacttaaacaaaaagccgctgcggaagcacagtgccagtgggacgcgctccatggcgccgccccttttcccgcaggaccatcagggttcccgcccctcatgcatcactcaatcctccatcatctaccagctggccgtgaaaggggcgaggagggggaacatgcctatgatactctttctcttgagtcctcagattctatggaaacgagcatttcaactgggggcaacagcgcgtgctctcctgataatatgtcctccgcaagtggactagatatgggcaaaattgaggagatggagaaaatgctgaaagaggcgcatgcagagaaaaatcgtctgatggaaagtagagagcgggagatggagttgaggcgtcaggcattggaggaagagcggcgccggcgggagcaagtggaaagaagactgcagagcgagtccgctcggcgccagcaactggttgaaaaggaagtcaaaatgcgggagaaacagttctctcaggctcggccccttactagatacctgcccattcgaaaagaggattttgatttgaagacccatatcgagagctccggacatggcgtggatacctgcctgcacgtagtgctaagcagcaaggtgtgccgtggctatcttgtgaagatgggcggaaagatcaaatcgtggaagaaacggtggttcgtctttgacagactcaagaggacgttatcttactatgtagacaaacacgagactaagcttaaaggggtgatttacttccaagccatagaggaagtctattatgatcaccttcgctctgccgctaagtcgccaaatccagccctgaccttctgcgtcaagacgcatgatagactctactacatggtcgcgcctagcgctgaagccatgaggatttggatggacgtaatcgtcaccggagcagaaggatacacccagttcatgaattag

SEQ ID NO: 283441 - DNA, 3423 bp, Artificial Sequence
  derived and/or modified sequence
atgtctgtgggcagcagctatgagaacaccagccctgccttcagccccctgagcagccctgccagcagcggcagctgtgccagccacagccccagcggccaggagcccggccccagcgtgccccccctggtgcctgcccggagcagcagctaccacctggccctgcagcccccccagagccggcccagcggggcccggtctgagagcccccggctgagcaggaaaggaggccacgagaggcctcccagccctggcctgcggggcctgctgacagacagccctgctgccaccgtgctggccgaggcccggcgggccacagagagcccccggctgggcggccagctgcctgtggtggccatcagcctgtctgagtacccagccagcggggccctgagccagcccaccagcatccctggcagccccaagttccagccccctgtgcctgcccccaggaacaagattggcaccctgcaggacaggcctcccagccccttccgggagcccccaggcagcgagcgggtgctgaccaccagccccagccggcagctggtgggccgcaccttcagtgatggcctggccaccaggaccctgcagcccccagagagcccccggctgggcagaagaggcctggacagcatgagggagctgccccccctgagccccagcctgagcagaagagccctgagccccctgcccaccaggaccaccccagaccccaagctgaaccgggaggtggccgagagcccccggccccggcgctgggccgcccatggagccagccctgaggacttcagcctgaccctgggcgcccggggccgccgcaccaggagccccagccccaccctgggggagagcctggccccccacaagggcagcttcagcggccgcctgagccctgcctacagcctgggcagcctgactggagccagcccctgccagagcccctgtgtgcagaggaagctgagcagcggggacctgcgggtgcctgtgacccgggagaggaagaacagcatcacagagatcagtgacaatgaagatgacctgctggagtaccaccggcggcagaggcaggagcggctgcgggagcaggagatggagcggctggagcggcagaggctggagaccatcctgaacctgtgtgccgagtacagcagagcagatggcggccctgaggccggggagctgcccagcatcggggaggccacagctgccctggccctggccggccggcggcccagccggggcctggccggggccagcggccgcagcagcgaggagcccggggtggccacccagaggctgtgggagagcatggagaggagtgatgaggagaacctgaaggaggagtgcagcagcacagagagcacccagcaggagcatgaagatgcccccagcaccaagctgcagggcgaggtgctggccctggaggaggagcgggcccaggtgctgggccacgtggagcagctgaaggtgcgggtgaaggagctggagcagcagctgcaggagagcgcccgggaggccgagatggagcgggccctgctgcagggcgagcgggaggccgagcgggccctgctgcagaaggagcagaaggctgtggaccagctgcaggagaagctggtggccctggagaccggcatccagaaggagcgggacaaggaggccgaggccctggagacagagaccaagctgtttgaggacctggagttccagcagctggagcgggagagccgggtggaggaggagcgggagctggccggccagggcctgctgcggagcaaggccgagctgctgcggagcatcgccaagaggaaggagcggctggccatcctggacagccaggccggccagatccgggcccaggccgtgcaggagagcgagcggctggcccgggacaagaatgccagcctgcagctgctgcagaaggagaaggagaagctgactgtgctggagcggcgctaccacagcctgactggaggccggcccttccccaagaccaccagcaccctgaaggagatggagaagctgctgctgcctgctgtggacctggagcagtggtaccaggagctgatggccggcctgggcactggacctgctgctgccagcccccacagcagccccccacccctgcctgccaaggccagccggcagctgcaggtgtaccgcagcaagatggatggagaggccaccagccccctgcccaggaccaggagcggccccctgcccagcagcagcggcagcagcagcagcagcagccagctgtctgtggccaccctgggccgcagccccagccccaagagcgccctgctgacccagaatggcaccggcagcctgcccaggaacctggccgccaccctgcaggacatcgagaccaagaggcagctggccctgcagcagaaggtggagagcctgcctgctgagcccctgcccacagatgatcctgctggccagcaggtgattgaggagcagaggcggcggctggccgagctgaagcagaaggctgctgctgaggcccagtgccagtgggatgccctgcatggagctgcccccttccctgctggccccagcggcttcccccccctgatgcaccacagcatcctgcaccacctgcctgctggccgggagcggggggaggagggggagcacgcctatgacaccctgagcctggagagcagtgacagcatggagaccagcatcagcactggaggcaacagcgcctgcagcccagacaacatgagcagcgccagcggcctggacatgggcaagattgaggagatggagaagatgctgaaggaggcccacgccgagaagaaccggctgatggagagccgggagcgggagatggagctgcggcggcaggccctggaggaggagaggagaagaagagagcaggtggagcggcggctgcagagcgagagcgcccggcggcagcagctggtggagaaggaggtgaagatgagggagaagcagttcagccaggcccggcccctgacccgctacctgcccatcagaaaagaagattttgacctgaagacccacatcgagagcagcggccacggcgtggacacctgcctgcacgtggtgctgagcagcaaggtgtgccggggctacctggtgaagatgggcggcaagatcaagtcctggaagaagcgctggtttgtgtttgaccggctgaagaggaccctgagctactacgtggacaagcatgagaccaagctgaagggcgtcatctacttccaggccatcgaggaggtgtactatgaccacctgcggtctgctgccaagagccccaacccagccctgaccttctgtgtgaagacccatgaccggctgtactacatggtggcccccagcgctgaggccatgaggatctggatggatgtgattgtgactggagctgagggctacacccagttcatgaactag

SEQ ID NO: 283442 - DNA, 3423 bp, Artificial Sequence
  derived and/or modified sequence
atgagcgtgggcagcagctacgagaacaccagccccgccttcagccccctgtcttcccctgcaagtagcgggtcctgcgcctcccatagtccttcagggcaggagcctggacctagcgtgccccccctggtccctgccaggtccagtagttaccacctcgcactccagcctccccaaagtagacccagtggcgctaggtcagagagtcctagactcagccggaaaggcgggcacgagcggccaccgtcacctggcctgcgcggacttcttaccgactccccggccgcaaccgttctggcggaggcccgtagagctacggagagcccacggctgggcggacaacttcccgttgtcgccatctccttaagcgagtatcctgctagcggcgccctgtctcagcccacctctattcctggctcacctaagttccagcctcctgtgcctgcacctcggaataaaatcgggacgcttcaggatcggcctccgtcgccctttagagagccgccaggtagcgagcgcgtgttaaccacttcgccgtcccggcagttagtgggcagaacatttagtgacggcctggcaacccgaacgctgcaaccccctgagtcaccacggctgggccgacggggactggactctatgagggaacttccacctttgagtccttcactgtcaagacgggccttaagccccctgcccacaagaaccactcccgacccgaaactcaaccgtgaggtggctgagtcgccacgtcccagacgctgggccgcacacggcgccagccccgaagatttttcactgaccttaggcgctcggggccggcgcaccagatctccgtcgcccacattgggtgagtctttggcgccacataaggggtctttcagcggaagactgagcccagcctactccttggggtccctcactggagccagcccatgtcagtctccctgcgtgcagcgaaaactgagctccggggacttgcgggtgcccgtgacccgcgagcgcaaaaactcaattacagagatctccgacaacgaggatgacctgttagagtaccaccgacgccaacgccaggagaggcttcgggaacaggagatggaaaggcttgagcgccagaggctggaaacaattctcaacctgtgcgcagagtacagccgtgctgacggcgggcccgaggctggagagctcccttcaatcggcgaagcaacagctgccctcgccctggccggaaggaggccatcaaggggactggcgggagcctccgggcgttcatcagaggagccaggcgtcgcaacccagaggctttgggaaagcatggagcgatctgacgaggagaatctgaaggaggaatgcagctctactgagagcactcagcaagaacatgaagatgcaccctctacaaaactccagggggaggtgctcgcactcgaggaggaaagggctcaggtcctgggacatgttgaacagctgaaagtgagagtcaaggagcttgagcagcagttacaagaaagtgcacgcgaagctgaaatggaaagagcgctgctacagggtgagagagaagcagagcgggcacttctgcagaaagagcaaaaagccgttgatcagctgcaagagaagctcgttgcattagagacgggcattcagaaggagagggacaaggaagcagaagcattagagaccgagaccaagctgttcgaggatctggaatttcagcagctcgagcgggagtcacgtgttgaagaagagagggagcttgctgggcaggggctgctgcgatcaaaagcggaactgcttcggtccatcgccaaacgcaaggagcgtctggcaatcctcgactcccaggcaggccagataagggcccaagctgtccaagaaagtgaaaggctggcaagagacaaaaatgccagccttcagctactgcagaaagagaaggaaaagctcacagtactggagcgcaggtatcattccctgaccggcggacgaccatttcccaagactacttctactctcaaagagatggagaagcttctgctgcccgcggtcgatctggaacaatggtaccaagagctgatggcaggcttaggaactgggcctgccgccgcctccccccattcatcaccacccccactgcctgcaaaggccagtcggcagcttcaggtatatcgatcaaagatggacggtgaagccacatcccccctgccgcggacccgctcaggtcctctgccatcttctagcggctctagctcttcatcttcccagctgtccgtggccaccctcggacggagccccagtcccaaatcagcattgctcacccagaacggcaccggctccttgcccagaaaccttgctgccacactgcaggatattgaaacgaaaaggcagctagctctccagcagaaagtggagtctctcccagctgagccactccccaccgacgaccccgccgggcagcaggtgattgaggagcaaaggcggcgtctagccgaactgaagcagaaagccgccgctgaggcgcagtgccagtgggacgcccttcatggggccgcccctttcccagccggcccgtccgggtttcccccactgatgcatcactccatcctgcatcacctgccggcgggtcgggaacgcggagaggagggcgaacacgcatatgatacgctatctcttgagtcttccgattccatggaaacctctatcagcacagggggcaatagtgcctgtagccctgataacatgtcatcggcatccggtttggacatggggaagatcgaggaaatggaaaagatgttgaaggaggcacacgccgagaaaaaccgcctgatggagtcccgcgagcgcgagatggagcttcgcaggcaggcactagaggaggaaagacgcaggagagagcaggtggagaggaggctgcagagtgaaagtgcacgcagacaacaactggtggagaaggaggtgaagatgagggaaaagcagttctctcaggctcgtccccttacccgatacctgccaatccgcaaagaagatttcgacctgaagacccacatagagagctccggccatggtgttgacacctgcctacacgtggtgttaagttcaaaggtttgcagagggtatctggtgaagatggggggcaagattaagtcctggaaaaagcgctggtttgtattcgaccggctcaaaagaactctgtcctactacgtagacaagcatgaaacaaagctgaagggtgttatctactttcaggcaatcgaagaggtctattacgatcacctgagaagtgctgccaaatcacctaacccagcccttacattttgtgttaaaacacatgaccggctgtattacatggtggccccatccgccgaggccatgcgcatctggatggacgtcatagtgaccggagccgagggctacacccagtttatgaactag

SEQ ID NO: 283443 - DNA, 5484 bp, Artificial Sequence
  derived and/or modified sequence
agcgagctcccggggaaaagcaacggtgtcctcctaagcctgaggccaccgcgaccgagccgagccaggctaagggaccagtgtctccctgccccccccccacctctaggagctctggagccttaggaccatggacgctctcaataggaaccaaataggccctggatgccagacccagaccatggtgcagaaaggacccttggacctgatcgagacaggcaaagggctgaaagtgcaaacggacaaaccccacctggtgagcctgggcagtgggcgactcagcacagccatcaccctcctgccgctggaggaagggaggacggtgattggctctgcagccagagacatctcactacagggcccaggcctggctccagagcactgctacatcgagaacctgcggggcaccctcaccctctacccctgtggcaatgcctgcactattgatgggctccctgtccggcagcctacccggctcactcagggctgcatgttgtgcctgggtcagtccaccttccttcgctttaaccacccggctgaagccaagtggatgaaaagcatgattccagcagggggccgagcccctgggcccccctacagccctgttcctgcagaatcagaaagtctggtaaatgggaaccacaccccacagactgcaacacggggaccctctgcctgtgccagccacagttccctggtgagctctattgagaaggacctgcaagagatcatggactcactggtgctagaggagcctggagctgctggcaagaagcctgccgcaacctctccactgtcaccgatggctaatggtgggcgctacctgctgtctcccccaaccagccccggcgccatgtctgtgggctccagctatgagaacacctctccagccttctctccactctcttcaccagccagcagtggaagctgtgccagtcactcacccagtgggcaagagccaggaccttctgtgcccccgctggtacctgcccgttcctccagctaccatctggccctacagcccccacagtcccgcccaagtggtgctcgctccgagagtcctcggctgagcaggaaagggggccatgagaggcctcccagccctggcctccggggtctgctgacagacagccctgcagctactgtcttggcggaggcccggagagccactgagagcccccggctgggtgggcagctgcctgtggtggccatcagcctgagtgaatacccagcttctggtgctctcagtcaacccaccagcattcctggcagccccaagtttcagcctccagtccctgctccccgaaacaagattggcacactccaggaccgccctcccagccctttccgtgagcctccaggcagtgagcgggtgctaacaaccagcccctcacgccaactggtgggccgaacattttcagatgggttagccacccgtaccctgcagcctcctgagagtccccgcctgggccggcggggcctggacagtatgcgagaactaccccccttaagtccatctctgtcccggcgagctctctccccgctgcccacccggaccaccccagatcccaagctaaacagggaagtggcagagagtcctcggccccggcgctgggcagcccatggggcttcaccagaggacttctccctgacgctgggggcacggggccgtaggacacggagcccctcacccacactgggtgagtctctggcaccccacaagggcagcttcagtggcaggctgagcccagcctacagtctgggctctcttactggggcttcaccctgccagagtccctgtgtccagaggaagctctccagcggggacttgcgggtgcctgtcacaagggagcggaaaaatagcatcacagagatcagtgacaatgaggacgacctcctggagtaccaccggcgacagcgccaagagcggctccgggagcaggagatggagaggctggaacgccagcgcctggagaccatcctgaacctgtgtgccgaatacagccgggctgatgggggacctgaggctggggagcttcccagcattggggaggccaccgcagcattggcactggcaggccggaggccctcacgaggccttgcaggggcctctgggcggagcagcgaggagcctggcgttgccacccaacgcctatgggagagtatggagcgctcagatgaggaaaatctcaaggaggagtgcagcagcactgagagcacccagcaggagcacgaagatgcacctagcaccaagctccagggagaggtgctagccctggaagaagagcgggctcaggtgctggggcacgtggagcagctcaaggtccgtgtgaaggagctagagcagcagctgcaggagtcagcccgagaggccgaaatggagcgggcactgctgcagggagagagggaggcagagcgggcactgctgcagaaggagcagaaggcagtggatcagctgcaggagaagctggtggccttggagacaggcatccagaaggagagggacaaggaggcagaggccctggagactgagacaaagctctttgaggacttggagttccagcagttggagcgggagagccgcgtggaggaggagcgcgagctggccggccaggggctgctccggagcaaggctgagctgctccgcagcatcgccaagaggaaggagcgcctggccatcctggacagtcaggctgggcagatccgggctcaggccgtgcaggaatcagaacgcctggcccgggacaagaatgcctccttacagctgctgcaaaaggagaaggagaagctgactgtgctggaaaggagataccactcactcacagggggcaggcctttcccgaagaccacatcgaccctcaaagagatggagaagctgctgctccctgctgtagacttagagcagtggtaccaggagctgatggccgggctggggactggccccgctgcagcctcccctcactcttctcccccgcctctgcccgccaaagcttcccgtcagctgcaggtttaccgctccaagatggatggcgaggccaccagcccccttccccggacccgcagcggccccctcccctcctcctctggctcttcctcctcctcctcccagctcagcgtggctaccctggggcgtagcccctccccaaagagcgctctactcacccagaatggcacgggcagccttcctcgcaacctggcagccacactgcaggacatcgagaccaagcgccaactagctctgcagcagaaggtcgagtcgcttcccgccgagcccctcccaaccgacgacccagcaggacaacaagtgattgaagagcagcggcggcgactggctgagctgaagcagaaagcggcagctgaggcacagtgccagtgggatgcccttcacggggcagcacccttcccagcgggcccctcgggcttcccccctctcatgcaccactctatcctacaccacctgcctgcggggcgggagcgtggggaggagggtgagcacgcctatgatacgctgagtctggagagctctgacagcatggagaccagcatctccaccgggggcaactcggcctgctcccctgacaacatgtccagcgcgagtggtctggacatggggaagatcgaggagatggagaagatgctgaaagaggctcatgcagagaagaaccggctcatggagtcgagggagcgggagatggagctgcggcggcaggccctggaggaggagcggcggaggcgtgagcaggtagaacggaggctgcagagtgagagtgcccggaggcagcagctggtcgagaaggaggtcaagatgcgggagaaacaattttcccaggcacgacccctgacccgctacctgccaatccggaaggaggactttgacctgaagacacatattgagtcatcgggccatggtgttgatacctgcctgcacgtggtgctcagcagcaaggtctgccgtggctacttggtcaagatgggcggcaagattaaatcatggaagaagcgctggtttgtcttcgaccggctcaagcgcaccctttcctattatgtggacaagcatgagacgaagctgaagggagtcatctatttccaggccattgaggaagtgtactacgaccacctgcgcagtgcagccaagagcccgaacccagccctcaccttctgcgtaaagacccatgaccggctgtactacatggtggccccatctgcagaggccatgcgtatctggatggatgtcattgtcacaggggctgagggctacactcagttcatgaactaactgccgtgggcctcctggcagagcacaactggggcttttgtataagaagactttaatattctgtaaggagcttggtcctgtgagtttctgggctctggcctcctgaagaaccagccagaagaagaaaagtagaggtggctttgctgcctcctgggagcccagaacttgcagtaaccctttagggtcctgccccaggcccagccagggctgaggagctgtcacagagagggcctcagctctgacctgacacctgctctccccagcctgttttctcttttctaaaagacaaattatggtaccataagctgccaaagatcccctcctgcctcagacccctttgccaggggctttgggggctgagcagagccacatccagagtggggtaatagctcaggcggcccgcttcccatttctcaaaccccgctctgccccattgttctcctttcccttatactttttattaccttgctcaagggccagagatctcaagtgtcaaccttgaggtcccagctccatcccctagttgcagactcatcaccatggttaccatagtgactgcttcattgccatggttacatactaattgctgcagctctgtggcccagcccactgcttcagctgtgggccatctgagggtacgtgccatcatctctccagcccaggcccctgggcatctcatgctggggggaagggactgaatacctttttccttccccctgcctgtgtcttcagccctgatgcacaggctgccagccccccagtccagccctctcccttccactggtgccttgcttagagccagaagggatgaagccgggggatctatggaacagaggaggagcgatgcagttgggagaggaagctagaagggttatggttggagttctgtacagtgttgagtttccgacagggaaagaggattcctccaatgctcctagagagaaagcctgagcaggagatgatgcagcagaggggaagggccctgtggtgccgccgcccttccttcagcctccgaagggtgatggaaatggagagtggaggaccaggcctccagctgtctggcctcgcccttcacgccttaacactaagcccacctcccctgctctccttcccagcattgagcccttggttgcctgggcccaggctgggggttttcagtatttgtaagcatttcagcagaacaataaagcctttggactacggaagtg

SEQ ID NO: 283444 - DNA, 3423 bp, Artificial Sequence
  derived and/or modified sequence
atgagcgtcggctccagctatgagaataccagtcctgcgttttcccctctaagcagcccagctagcagcggctcctgcgcctcccactccccatccggccaggaaccaggccctagcgtgccaccactcgtccctgccaggagctctagctatcacctcgctctccagcctccccaatccaggccatccggagccagatctgaatctcccaggctcagccggaagggtggccatgagcgtcccccatctccaggcctccggggtcttctcacagattctcctgctgcaaccgtgctcgcagaagctaggagggcaaccgaatccccaaggctcgggggacagttacccgttgttgccatctccctatctgaataccctgcatccggagcactgtctcagcctacaagtattcctgggagccctaagttccagcccccagtgcccgctcctcgaaataagattgggaccctccaggatagacctcctagcccctttagggaacctcccggatctgagagggtcttgactaccagtcccagccggcagctggtgggccgaaccttctccgacggccttgccactagaacgctccagccacctgaatcacccaggctcggaagaaggggcctggactcaatgagggaactgccacctttgagtccctctttatcacgccgagcactcagtcccctcccgactagaaccacaccggaccccaagctcaatcgtgaagtggccgagtcaccaaggcccagaagatgggcggctcatggcgcatctcctgaggacttctcgctcactctcggcgctcggggacgtagaacccgatcacctagccctactcttggagagtcccttgcaccccataagggctccttttcagggcgactgagccccgcttattctcttggttccctgaccggcgctagcccatgccaaagcccatgtgtccagcggaaactctctagcggcgacttgagagtacctgtaactcgtgagcggaagaactcgattactgaaatttccgacaacgaggatgatctgttggagtatcaccgacgccagcgacaagaacggcttcgagagcaggaaatggagagacttgagagacagcggcttgagactatccttaacttatgtgctgaatactcacgcgctgacgggggacccgaagcgggtgagttaccttctatcggcgaggcaaccgctgctctcgcattagcagggagacggccaagcaggggattggccggagcttctggcaggtcaagcgaagagcccggtgttgccacacagcggctgtgggaatccatggagcgctctgacgaagaaaatctgaaggaggagtgttcctcgaccgagtctacccagcaggagcatgaagatgccccttctacaaaactacaaggggaagtgctggcgctggaggaggagagagcccaggttctgggacatgtggaacagcttaaggtccgtgtcaaggagctggagcaacaattacaggagagcgctcgtgaggcagagatggaacgagcattactacagggggagcgggaagcagagcgggcactgcttcagaaagagcagaaagctgtggaccagctgcaggagaagctcgtggcactggagaccgggatccagaaagagcgcgacaaggaagcggaagcgctggagacagaaactaaattgttcgaggacctcgagttccagcaactggaaagggagtctcgcgtcgaagaagagcgggagcttgccggtcaagggttattaaggagtaaggccgaactactccgctctattgccaagagaaaggaacgactggcaatcctggactcacaggccggacagataagggctcaggccgtgcaggagtctgagcgactggccagagacaagaacgcgagtttacagcttctgcagaaagagaaagagaagcttactgtgctggagagacggtaccactcactaacaggaggccgacccttccctaaaacaacaagtacactcaaagagatggaaaaacttctgctccctgccgttgaccttgagcagtggtatcaggagttgatggccggtttgggaactggaccggctgctgcctctccacactcttctccccctccgttgccggcaaaagcatccaggcaactgcaggtttaccggtccaagatggacggcgaggccacgtcccctctgcctaggacaagatctggccctctgccctcaagctcaggctcttcctccagtagctcgcagctgagtgtggctactttaggtcggtctccaagccctaagtctgccttgctgacccagaacggaactggttcacttcctagaaacctcgctgcaactctccaagatatcgaaacaaagagacagttagccctccagcagaaggtagagagcctgccggctgaaccactgccgaccgatgatcccgctgggcaacaggtgatagaagagcagagaagacgactggccgaactgaagcagaaagccgctgctgaagcgcagtgtcaatgggacgccctgcatggcgctgcccctttccccgcaggccctagcggatttccacccctgatgcatcattctatcctccaccacctgccagcgggacgcgagagaggtgaagagggggagcacgcctacgatacattgagccttgagagctcagatagtatggaaactagcatcagtaccggaggaaattctgcttgctctcctgacaatatgagctctgcttccggccttgatatgggtaaaatcgaggagatggagaaaatgctcaaggaagcccacgccgaaaaaaatcgcttaatggagtcccgggaaagggaaatggaactgagaaggcaggcccttgaagaagaaagaaggaggcgcgaacaagtggagaggcgactgcaatctgaatctgctaggaggcagcagctggtggagaaggaagtgaaaatgcgtgagaagcaattcagtcaggccagacccctgaccagataccttcccattcgcaaagaggactttgacctgaagacccatatcgagagctccgggcacggggtggatacttgtcttcatgtggtactctccagtaaagtttgccgcggatacctggtcaagatgggcggaaagattaagtcatggaaaaaacggtggtttgtttttgatcggcttaaaaggacacttagctattatgtcgacaagcacgagacaaaactcaagggagtgatctacttccaggcaattgaggaggtgtattatgaccacttgcgcagcgccgctaagtccccaaatcccgctttaacattttgtgtgaagacccacgatcggttgtactacatggttgcaccgagtgccgaggcaatgcgtatttggatggatgttattgtgaccggtgctgaagggtacactcagttcatgaactag

SEQ ID NO: 283445 - DNA, 3423 bp, Artificial Sequence
  derived and/or modified sequence
atgagcgtgggcagcagctacgagaacaccagccccgccttcagccccctgagcagccccgccagcagcggcagctgcgccagccacagccccagcggccaggagcccggccccagcgtgccccccctggtgcccgccagaagcagcagctaccacctggccctgcagcccccccagagcagacccagcggcgccagaagcgagagccccagactgagcagaaagggcggccacgagagaccccccagccccggcctgagaggcctgctgaccgacagccccgccgccaccgtgctggccgaggccagaagagccaccgagagccccagactgggcggccagctgcccgtggtggccatcagcctgagcgagtaccccgccagcggcgccctgagccagcccaccagcatccccggcagccccaagttccagccccccgtgcccgcccccagaaacaagatcggcaccctgcaggacagaccccccagccccttcagagagccccccggcagcgagagagtgctgaccaccagccccagcagacagctggtgggcagaaccttcagcgacggcctggccaccagaaccctgcagccccccgagagccccagactgggcagaagaggcctggacagcatgagagagctgccccccctgagccccagcctgagcagaagagccctgagccccctgcccaccagaaccacccccgaccccaagctgaacagagaggtggccgagagccccagacccagaagatgggccgcccacggcgccagccccgaggacttcagcctgaccctgggcgccagaggcagaagaaccagaagccccagccccaccctgggcgagagcctggccccccacaagggcagcttcagcggcagactgagccccgcctacagcctgggcagcctgaccggcgccagcccctgccagagcccctgcgtgcagagaaagctgagcagcggcgacctgagagtgcccgtgaccagagagagaaagaacagcatcaccgagatcagcgacaacgaggacgacctgctggagtaccacagaagacagagacaggagagactgagagagcaggagatggagagactggagagacagagactggagaccatcctgaacctgtgcgccgagtacagcagagccgacggcggccccgaggccggcgagctgcccagcatcggcgaggccaccgccgccctggccctggccggcagaagacccagcagaggcctggccggcgccagcggcagaagcagcgaggagcccggcgtggccacccagagactgtgggagagcatggagagaagcgacgaggagaacctgaaggaggagtgcagcagcaccgagagcacccagcaggagcacgaggacgcccccagcaccaagctgcagggcgaggtgctggccctggaggaggagagagcccaggtgctgggccacgtggagcagctgaaggtgagagtgaaggagctggagcagcagctgcaggagagcgccagagaggccgagatggagagagccctgctgcagggcgagagagaggccgagagagccctgctgcagaaggagcagaaggccgtggaccagctgcaggagaagctggtggccctggagaccggcatccagaaggagagagacaaggaggccgaggccctggagaccgagaccaagctgttcgaggacctggagttccagcagctggagagagagagcagagtggaggaggagagagagctggccggccagggcctgctgagaagcaaggccgagctgctgagaagcatcgccaagagaaaggagagactggccatcctggacagccaggccggccagatcagagcccaggccgtgcaggagagcgagagactggccagagacaagaacgccagcctgcagctgctgcagaaggagaaggagaagctgaccgtgctggagagaagataccacagcctgaccggcggcagacccttccccaagaccaccagcaccctgaaggagatggagaagctgctgctgcccgccgtggacctggagcagtggtaccaggagctgatggccggcctgggcaccggccccgccgccgccagcccccacagcagccccccccccctgcccgccaaggccagcagacagctgcaggtgtacagaagcaagatggacggcgaggccaccagccccctgcccagaaccagaagcggccccctgcccagcagcagcggcagcagcagcagcagcagccagctgagcgtggccaccctgggcagaagccccagccccaagagcgccctgctgacccagaacggcaccggcagcctgcccagaaacctggccgccaccctgcaggacatcgagaccaagagacagctggccctgcagcagaaggtggagagcctgcccgccgagcccctgcccaccgacgaccccgccggccagcaggtgatcgaggagcagagaagaagactggccgagctgaagcagaaggccgccgccgaggcccagtgccagtgggacgccctgcacggcgccgcccccttccccgccggccccagcggcttcccccccctgatgcaccacagcatcctgcaccacctgcccgccggcagagagagaggcgaggagggcgagcacgcctacgacaccctgagcctggagagcagcgacagcatggagaccagcatcagcaccggcggcaacagcgcctgcagccccgacaacatgagcagcgccagcggcctggacatgggcaagatcgaggagatggagaagatgctgaaggaggcccacgccgagaagaacagactgatggagagcagagagagagagatggagctgagaagacaggccctggaggaggagagaagaagaagagagcaggtggagagaagactgcagagcgagagcgccagaagacagcagctggtggagaaggaggtgaagatgagagagaagcagttcagccaggccagacccctgaccagatacctgcccatcagaaaggaggacttcgacctgaagacccacatcgagagcagcggccacggcgtggacacctgcctgcacgtggtgctgagcagcaaggtgtgcagaggctacctggtgaagatgggcggcaagatcaagagctggaagaagagatggttcgtgttcgacagactgaagagaaccctgagctactacgtggacaagcacgagaccaagctgaagggcgtgatctacttccaggccatcgaggaggtgtactacgaccacctgagaagcgccgccaagagccccaaccccgccctgaccttctgcgtgaagacccacgacagactgtactacatggtggcccccagcgccgaggccatgagaatctggatggacgtgatcgtgaccggcgccgagggctacacccagttcatgaactag

SEQ ID NO: 283446 - DNA, 5753 bp, Artificial Sequence
  derived and/or modified sequence
actaaactcattgaattagaacagcacttgtccatctcaaagaggataaattattttttgctatccaccccagctggaatttagaccagacttacaggctttctgctccttccttcagtgaagaagagtctccagggtccctctagtgcaggtcaaagaagtccagtccagctgagttcagctccctagggcctccccagccagtctcctggaccaagagctggctttgcaagaaaacatcctactaaagccctgggaaaagagacaaatggtgaagaggagaatgaaaggttgcaggagggagctcctgttttagccctgccacctacctgggggccctctggctaccagtgtccttggaggggcttccttgctgcttctcccactaaggagctctggagccttaggaccatggacgctctcaataggaaccaaataggccctggatgccagacccagaccatggtgcagaaaggacccttggacctgatcgagacaggcaaagggctgaaagtgcaaacggacaaaccccacctggtgagcctgggcagtgggcgactcagcacagccatcaccctcctgccgctggaggaagggaggacggtgattggctctgcagccagagacatctcactacagggcccaggcctggctccagagcactgctacatcgagaacctgcggggcaccctcaccctctacccctgtggcaatgcctgcactattgatgggctccctgtccggcagcctacccggctcactcagggctgcatgttgtgcctgggtcagtccaccttccttcgctttaaccacccggctgaagccaagtggatgaaaagcatgattccagcagggggccgagcccctgggcccccctacagccctgttcctgcagaatcagaaagtctggtaaatgggaaccacaccccacagactgcaacacggggaccctctgcctgtgccagccacagttccctggtgagctctattgagaaggacctgcaagagatcatggactcactggtgctagaggagcctggagctgctggcaagaagcctgccgcaacctctccactgtcaccgatggctaatggtgggcgctacctgctgtctcccccaaccagccccggcgccatgtctgtgggctccagctatgagaacacctctccagccttctctccactctcttcaccagccagcagtggaagctgtgccagtcactcacccagtgggcaagagccaggaccttctgtgcccccgctggtacctgcccgttcctccagctaccatctggccctacagcccccacagtcccgcccaagtggtgctcgctccgagagtcctcggctgagcaggaaagggggccatgagaggcctcccagccctggcctccggggtctgctgacagacagccctgcagctactgtcttggcggaggcccggagagccactgagagcccccggctgggtgggcagctgcctgtggtggccatcagcctgagtgaatacccagcttctggtgctctcagtcaacccaccagcattcctggcagccccaagtttcagcctccagtccctgctccccgaaacaagattggcacactccaggaccgccctcccagccctttccgtgagcctccaggcagtgagcgggtgctaacaaccagcccctcacgccaactggtgggccgaacattttcagatgggttagccacccgtaccctgcagcctcctgagagtccccgcctgggccggcggggcctggacagtatgcgagaactaccccccttaagtccatctctgtcccggcgagctctctccccgctgcccacccggaccaccccagatcccaagctaaacagggaagtggcagagagtcctcggccccggcgctgggcagcccatggggcttcaccagaggacttctccctgacgctgggggcacggggccgtaggacacggagcccctcacccacactgggtgagtctctggcaccccacaagggcagcttcagtggcaggctgagcccagcctacagtctgggctctcttactggggcttcaccctgccagagtccctgtgtccagaggaagctctccagcggggacttgcgggtgcctgtcacaagggagcggaaaaatagcatcacagagatcagtgacaatgaggacgacctcctggagtaccaccggcgacagcgccaagagcggctccgggagcaggagatggagaggctggaacgccagcgcctggagaccatcctgaacctgtgtgccgaatacagccgggctgatgggggacctgaggctggggagcttcccagcattggggaggccaccgcagcattggcactggcaggccggaggccctcacgaggccttgcaggggcctctgggcggagcagcgaggagcctggcgttgccacccaacgcctatgggagagtatggagcgctcagatgaggaaaatctcaaggaggagtgcagcagcactgagagcacccagcaggagcacgaagatgcacctagcaccaagctccagggagaggtgctagccctggaagaagagcgggctcaggtgctggggcacgtggagcagctcaaggtccgtgtgaaggagctagagcagcagctgcaggagtcagcccgagaggccgaaatggagcgggcactgctgcagggagagagggaggcagagcgggcactgctgcagaaggagcagaaggcagtggatcagctgcaggagaagctggtggccttggagacaggcatccagaaggagagggacaaggaggcagaggccctggagactgagacaaagctctttgaggacttggagttccagcagttggagcgggagagccgcgtggaggaggagcgcgagctggccggccaggggctgctccggagcaaggctgagctgctccgcagcatcgccaagaggaaggagcgcctggccatcctggacagtcaggctgggcagatccgggctcaggccgtgcaggaatcagaacgcctggcccgggacaagaatgcctccttacagctgctgcaaaaggagaaggagaagctgactgtgctggaaaggagataccactcactcacagggggcaggcctttcccgaagaccacatcgaccctcaaagagatggagaagctgctgctccctgctgtagacttagagcagtggtaccaggagctgatggccgggctggggactggccccgctgcagcctcccctcactcttctcccccgcctctgcccgccaaagcttcccgtcagctgcaggtttaccgctccaagatggatggcgaggccaccagcccccttccccggacccgcagcggccccctcccctcctcctctggctcttcctcctcctcctcccagctcagcgtggctaccctggggcgtagcccctccccaaagagcgctctactcacccagaatggcacgggcagccttcctcgcaacctggcagccacactgcaggacatcgagaccaagcgccaactagctctgcagcagaagggacaacaagtgattgaagagcagcggcggcgactggctgagctgaagcagaaagcggcagctgaggcacagtgccagtgggatgcccttcacggggcagcacccttcccagcgggcccctcgggcttcccccctctcatgcaccactctatcctacaccacctgcctgcggggcgggagcgtggggaggagggtgagcacgcctatgatacgctgagtctggagagctctgacagcatggagaccagcatctccaccgggggcaactcggcctgctcccctgacaacatgtccagcgcgagtggtctggacatggggaagatcgaggagatggagaagatgctgaaagaggctcatgcagagaagaaccggctcatggagtcgagggagcgggagatggagctgcggcggcaggccctggaggaggagcggcggaggcgtgagcaggtagaacggaggctgcagagtgagagtgcccggaggcagcagctggtcgagaaggaggtcaagatgcgggagaaacaattttcccaggcacgacccctgacccgctacctgccaatccggaaggaggactttgacctgaagacacatattgagtcatcgggccatggtgttgatacctgcctgcacgtggtgctcagcagcaaggtctgccgtggctacttggtcaagatgggcggcaagattaaatcatggaagaagcgctggtttgtcttcgaccggctcaagcgcaccctttcctattatgtggacaagcatgagacgaagctgaagggagtcatctatttccaggccattgaggaagtgtactacgaccacctgcgcagtgcagccaagaagaggtttttccgcttcactatggtgactgagagcccgaacccagccctcaccttctgcgtaaagacccatgaccggctgtactacatggtggccccatctgcagaggccatgcgtatctggatggatgtcattgtcacaggggctgagggctacactcagttcatgaactaactgccgtgggcctcctggcagagcacaactggggcttttgtataagaagactttaatattctgtaaggagcttggtcctgtgagtttctgggctctggcctcctgaagaaccagccagaagaagaaaagtagaggtggctttgctgcctcctgggagcccagaacttgcagtaaccctttagggtcctgccccaggcccagccagggctgaggagctgtcacagagagggcctcagctctgacctgacacctgctctccccagcctgttttctcttttctaaaagacaaattatggtaccataagctgccaaagatcccctcctgcctcagacccctttgccaggggctttgggggctgagcagagccacatccagagtggggtaatagctcaggcggcccgcttcccatttctcaaaccccgctctgccccattgttctcctttcccttatactttttattaccttgctcaagggccagagatctcaagtgtcaaccttgaggtcccagctccatcccctagttgcagactcatcaccatggttaccatagtgactgcttcattgccatggttacatactaattgctgcagctctgtggcccagcccactgcttcagctgtgggccatctgagggtacgtgccatcatctctccagcccaggcccctgggcatctcatgctggggggaagggactgaatacctttttccttccccctgcctgtgtcttcagccctgatgcacaggctgccagccccccagtccagccctctcccttccactggtgccttgcttagagccagaagggatgaagccgggggatctatggaacagaggaggagcgatgcagttgggagaggaagctagaagggttatggttggagttctgtacagtgttgagtttccgacagggaaagaggattcctccaatgctcctagagagaaagcctgagcaggagatgatgcagcagaggggaagggccctgtggtgccgccgcccttccttcagcctccgaagggtgatggaaatggagagtggaggaccaggcctccagctgtctggcctcgcccttcacgccttaacactaagcccacctcccctgctctccttcccagcattgagcccttggttgcctgggcccaggctgggggttttcagtatttgtaagcatttcagcagaacaataaagcctttggactacggaagtg

SEQ ID NO: 283447 - DNA, 5240 bp, Artificial Sequence
  derived and/or modified sequence
gaccgagccgagccaggctaagggaccagtgtctccctgccccccccccacctctaggagctctggagccttaggaccatggacgctctcaataggaaccaaataggccctggatgccagacccagaccatggtgcagaaaggacccttggacctgatcgagacaggcaaagggctgaaagtgcaaacggacaaaccccacctggtgagcctgggcagtgggcgactcagcacagccatcaccctcctgccgctggaggaagggaggacggtgattggctctgcagccagagacatctcactacagggcccaggcctggctccagagcactgctacatcgagaacctgcggggcaccctcaccctctacccctgtggcaatgcctgcactattgatgggctccctgtccggcagcctacccggctcactcagggctgcatgttgtgcctgggtcagtccaccttccttcgctttaaccacccggctgaagccaagtggatgaaaagcatgattccagcagggggccgagcccctgggcccccctacagccctgttcctgcagaatcagaaagtctggtaaatgggaaccacaccccacagactgcaacacggggaccctctgcctgtgccagccacagttccctggtgagctctattgagaaggacctgcaagagatcatggactcactggtgctagaggagcctggagctgctggcaagaagcctgccgcaacctctccactgtcaccgatggctaatggtgggcgctacctgctgtctcccccaaccagccccggcgccatgtctgtgggctccagctatgagaacacctctccagccttctctccactctcttcaccagccagcagtggaagctgtgccagtcactcacccagtgggcaagagccaggaccttctgtgcccccgctggtacctgcccgttcctccagctaccatctggccctacagcccccacagtcccgcccaagtggtgctcgctccgagagtcctcggctgagcaggaaagggggccatgagaggcctcccagccctggcctccggggtctgctgacagacagccctgcagctactgtcttggcggaggcccggagagccactgagagcccccggctgggtgggcagctgcctgtggtggccatcagcctgagtgaatacccagcttctggtgctctcagtcaacccaccagcattcctggcagccccaagtttcagcctccagtccctgctccccgaaacaagattggcacactccaggaccgccctcccagccctttccgtgagcctccaggcagtgagcgggtgctaacaaccagcccctcacgccaactggtgggccgaacattttcagatgggttagccacccgtaccctgcagcctcctgagagtccccgcctgggccggcggggcctggacagtatgcgagaactaccccccttaagtccatctctgtcccggcgagctctctccccgctgcccacccggaccaccccagatcccaagctaaacagggaagtggcagagagtcctcggccccggcgctgggcagcccatggggcttcaccagaggacttctccctgacgctgggggcacggggccgtaggacacggagcccctcacccacactgggtgagtctctggcaccccacaagggcagcttcagtggcaggctgagcccagcctacagtctgggctctcttactggggcttcaccctgccagagtccctgtgtccagaggaagctctccagcggggacttgcgggtgcctgtcacaagggagcggaaaaatagcatcacagagatcagtgacaatgaggacgacctcctggagtaccaccggcgacagcgccaagagcggctccgggagcaggagatggagaggctggaacgccagcgcctggagaccatcctgaacctgtgtgccgaatacagccgggctgatgggggacctgaggctggggagcttcccagcattggggaggccaccgcagcattggcactggcaggccggaggccctcacgaggccttgcaggggcctctgggcggagcagcgaggagcctggcgttgccacccaacgcctatgggagagtatggagcgctcagatgaggaaaatctcaaggaggagtgcagcagcactgagagcacccagcaggagcacgaagatgcacctagcaccaagctccagggagaggtgctagccctggaagaagagcgggctcaggtgctggggcacgtggagcagctcaaggtccgtgtgaaggagctagagcagcagctgcaggagtcagcccgagaggccgaaatggagcgggcactgctgcagggagagagggaggcagagcgggcactgctgcagaaggagcagaaggcagtggatcagctgcaggagaagctggtggccttggagacaggcatccagaaggagagggacaaggaggcagaggccctggagactgagacaaagctctttgaggacttggagttccagcagttggagcgggagagccgcgtggaggaggagcgcgagctggccggccaggggctgctccggagcaaggctgagctgctccgcagcatcgccaagaggaaggagcgcctggccatcctggacagtcaggctgggcagatccgggctcaggccgtgcaggaatcagaacgcctggcccgggacaagaatgcctccttacagctgctgcaaaaggagaaggagaagctgactgtgctggaaaggagataccactcactcacagggggcaggcctttcccgaagaccacatcgaccctcaaagaggtttaccgctccaagatggatggcgaggccaccagcccccttccccggacccgcagcggccccctcccctcctcctctggctcttcctcctcctcctcccagctcagcgtggctaccctggggcgtagcccctccccaaagagcgctctactcacccagaatggcacgggcagccttcctcgcaacctggcagccacactgcaggacatcgagaccaagcgccaactagctctgcagcagaagggacaacaagtgattgaagagcagcggcggcgactggctgagctgaagcagaaagcggcagctgaggcacagtgccagtgggatgcccttcacggggcagcacccttcccagcgggcccctcgggcttcccccctctcatgcaccactctatcctacaccacctgcctgcggggcgggagcgtggggaggagggtgagcacgcctatgatacgctgagtctggagagctctgacagcatggagaccagcatctccaccgggggcaactcggcctgctcccctgacaacatgtccagcgcgagtggtctggacatggggaagatcgaggagatggagaagatgctgaaagaggctcatgcagagaagaaccggctcatggagtcgagggagcgggagatggagctgcggcggcaggccctggaggaggagcggcggaggcgtgagcaggtagaacggaggctgcagagtgagagtgcccggaggcagcagctggtcgagaaggaggtcaagatgcgggagaaacaattttcccaggcacgacccctgacccgctacctgccaatccggaaggaggactttgacctgaagacacatattgagtcatcgggccatggtgttgatacctgcctgcacgtggtgctcagcagcaaggtctgccgtggctacttggtcaagatgggcggcaagattaaatcatggaagaagcgctggtttgtcttcgaccggctcaagcgcaccctttcctattatgtggacaagcatgagacgaagctgaagggagtcatctatttccaggccattgaggaagtgtactacgaccacctgcgcagtgcagccaagagcccgaacccagccctcaccttctgcgtaaagacccatgaccggctgtactacatggtggccccatctgcagaggccatgcgtatctggatggatgtcattgtcacaggggctgagggctacactcagttcatgaactaactgccgtgggcctcctggcagagcacaactggggcttttgtataagaagactttaatattctgtaaggagcttggtcctgtgagtttctgggctctggcctcctgaagaaccagccagaagaagaaaagtagaggtggctttgctgcctcctgggagcccagaacttgcagtaaccctttagggtcctgccccaggcccagccagggctgaggagctgtcacagagagggcctcagctctgacctgacacctgctctccccagcctgttttctcttttctaaaagacaaattatggtaccataagctgccaaagatcccctcctgcctcagacccctttgccaggggctttgggggctgagcagagccacatccagagtggggtaatagctcaggcggcccgcttcccatttctcaaaccccgctctgccccattgttctcctttcccttatactttttattaccttgctcaagggccagagatctcaagtgtcaaccttgaggtcccagctccatcccctagttgcagactcatcaccatggttaccatagtgactgcttcattgccatggttacatactaattgctgcagctctgtggcccagcccactgcttcagctgtgggccatctgagggtacgtgccatcatctctccagcccaggcccctgggcatctcatgctggggggaagggactgaatacctttttccttccccctgcctgtgtcttcagccctgatgcacaggctgccagccccccagtccagccctctcccttccactggtgccttgcttagagccagaagggatgaagccgggggatctatggaacagaggaggagcgatgcagttgggagaggaagctagaagggttatggttggagttctgtacagtgttgagtttccgacagggaaagaggattcctccaatgctcctagagagaaagcctgagcaggagatgatgcagcagaggggaagggccctgtggtgccgccgcccttccttcagcctccgaagggtgatggaaatggagagtggaggaccaggcctccagctgtctggcctcgcccttcacgccttaacactaagcccacctcccctgctctccttcccagcattgagcccttggttgcctgggcccaggctgggggttttcagtatttgtaagcatttcagcagaacaataaagcctttggactacg

SEQ ID NO: 283448 - protein, 598 aa, Artificial Sequence
  derived and/or modified sequence
MGLRASRPSKLTWKKWATTAASNSCSRSVSSCRRCTGGRLMKEPWRRPSSSICYTSRSSTIKFSSNKFKTLSVLLSHLHLFRLHVKISQPSLPISSRGAASSSQFQGLPSRSAIFQQQPENCSSPPNVALTCLGMQQPAQSQQVTIQVQEPVDMLSNMPGTAAGSSGRGISISPSAGQMQMQHRTNLMATLSYGHRPLSKQLSADSAEAHSAHQQPPHYTTSALQQALLSPTPPDYTRHQQVPHILQGLLSPRHSLTGHSDIRLPPTEFAQLIKRQQQQRQQQQQQQQQQEYQELFRHMNQGDAGSLAPSLGGQSMTERQALSYQNADSYHHHTSPQHLLQIRAQECVSQASSPTPPHGYAHQPALMHSESMEEDCSCEGAKDGFQDSKSSSTLTKGCHDSPLLLSTGGPGDPESLLGTVSHAQELGIHPYGHQPTAAFSKNKVPSREPVIGNCMDRSSPGQAVELPDHNGLGYPARPSVHEHHRPRALQRHHTIQNSDDAYVQLDNLPGMSLVAGKALSSARMSDAVLSQSSLMGSQQFQDGENEECGASLGGHEHPDLSDGSQHLNSSCYPSTCITDILLSYKHPEVSFSMEQAGV

SEQ ID NO: 283449 - protein, 1102 aa, Artificial Sequence
  derived and/or modified sequence
MAEKEARRKFKQIVTAVYFCHCRNIVHRDLKAENLLLDANLNIKIADFGFSNLFTPGQLLKTWCGSPPYAAPELFEGKEYDGPKVDIWSLGVVLYVLVCGALPFDGSTLQNLRARVLSGKFRIPFFMSTECEHLIRHMLVLDPNKRLSMEQICKHKWMKLGDADPNFDRLIAECQQLKEERQVDPLNEDVLLAMEDMGLDKEQTLQSLRSDAYDHYSAIYSLLCDRHKRHKTLRLGALPSMPRALAFQAPVNIQAEQAGTAMNISVPQVQLINPENQIVEPDGTLNLDSDEGEEPSPEALVRYLSMRRHTVGVADPRTEVMEDLQKLLPGFPGVNPQAPFLQVAPNVNFMHNLLPMQNLQPTGQLEYKEQSLLQPPTLQLLNGMGPLGRRASDGGANIQLHAQQLLKRPRGPSPLVTMTPAVPAVTPVDEESSDGEPDQEAVQSSTYKDSNTLHLPTERFSPVRRFSDGAASIQAFKAHLEKMGNNSSIKQLQQECEQLQKMYGGQIDERTLEKTQQQHMLYQQEQHHQILQQQIQDSICPPQPSPPLQAACENQPALLTHQLQRLRIQPSSPPPNHPNNHLFRQPSNSPPPMSSAMIQPHGAASSSQFQGLPSRSAIFQQQPENCSSPPNVALTCLGMQQPAQSQQVTIQVQEPVDMLSNMPGTAAGSSGRGISISPSAGQMQMQHRTNLMATLSYGHRPLSKQLSADSAEAHSAHQQPPHYTTSALQQALLSPTPPDYTRHQQVPHILQGLLSPRHSLTGHSDIRLPPTEFAQLIKRQQQQRQQQQQQQQQQEYQELFRHMNQGDAGSLAPSLGGQSMTERQALSYQNADSYHHHTSPQHLLQIRAQECVSQASSPTPPHGYAHQPALMHSESMEEDCSCEGAKDGFQDSKSSSTLTKGCHDSPLLLSTGGPGDPESLLGTVSHAQELGIHPYGHQPTAAFSKNKVPSREPVIGNCMDRSSPGQAVELPDHNGLGYPARPSVHEHHRPRALQRHHTIQNSDDAYVQLDNLPGMSLVAGKALSSARMSDAVLSQSSLMGSQQFQDGENEECGASLGGHEHPDLSDGSQHLNSSCYPSTCITDILLSYKHPEVSFSMEQAGV

SEQ ID NO: 283450 - DNA, 1797 bp, Artificial Sequence
  derived and/or modified sequence
atgggcctgagagccagcagacccagcaagctgacctggaagaagtgggccaccaccgccgccagcaacagctgcagcagaagcgtgagcagctgcagaagatgcaccggcggcagactgatgaaggagccctggagaagacccagcagcagcatctgctacaccagcagaagcagcaccatcaagttcagcagcaacaagttcaagaccctgagcgtgctgctgagccacctgcacctgttcagactgcacgtgaagatcagccagcccagcctgcccatcagcagcagaggcgccgccagcagcagccagttccagggcctgcccagcagaagcgccatcttccagcagcagcccgagaactgcagcagcccccccaacgtggccctgacctgcctgggcatgcagcagcccgcccagagccagcaggtgaccatccaggtgcaggagcccgtggacatgctgagcaacatgcccggcaccgccgccggcagcagcggcagaggcatcagcatcagccccagcgccggccagatgcagatgcagcacagaaccaacctgatggccaccctgagctacggccacagacccctgagcaagcagctgagcgccgacagcgccgaggcccacagcgcccaccagcagcccccccactacaccaccagcgccctgcagcaggccctgctgagccccaccccccccgactacaccagacaccagcaggtgccccacatcctgcagggcctgctgagccccagacacagcctgaccggccacagcgacatcagactgccccccaccgagttcgcccagctgatcaagagacagcagcagcagagacagcagcagcagcagcagcagcagcagcaggagtaccaggagctgttcagacacatgaaccagggcgacgccggcagcctggcccccagcctgggcggccagagcatgaccgagagacaggccctgagctaccagaacgccgacagctaccaccaccacaccagcccccagcacctgctgcagatcagagcccaggagtgcgtgagccaggccagcagccccacccccccccacggctacgcccaccagcccgccctgatgcacagcgagagcatggaggaggactgcagctgcgagggcgccaaggacggcttccaggacagcaagagcagcagcaccctgaccaagggctgccacgacagccccctgctgctgagcaccggcggccccggcgaccccgagagcctgctgggcaccgtgagccacgcccaggagctgggcatccacccctacggccaccagcccaccgccgccttcagcaagaacaaggtgcccagcagagagcccgtgatcggcaactgcatggacagaagcagccccggccaggccgtggagctgcccgaccacaacggcctgggctaccccgccagacccagcgtgcacgagcaccacagacccagagccctgcagagacaccacaccatccagaacagcgacgacgcctacgtgcagctggacaacctgcccggcatgagcctggtggccggcaaggccctgagcagcgccagaatgagcgacgccgtgctgagccagagcagcctgatgggcagccagcagttccaggacggcgagaacgaggagtgcggcgccagcctgggcggccacgagcaccccgacctgagcgacggcagccagcacctgaacagcagctgctaccccagcacctgcatcaccgacatcctgctgagctacaagcaccccgaggtgagcttcagcatggagcaggccggcgtgtag

SEQ ID NO: 283451 - DNA, 3309 bp, Artificial Sequence
  derived and/or modified sequence
atggccgagaaggaggccagaagaaagttcaagcagatcgtgaccgccgtgtacttctgccactgcagaaacatcgtgcacagagacctgaaggccgagaacctgctgctggacgccaacctgaacatcaagatcgccgacttcggcttcagcaacctgttcacccccggccagctgctgaagacctggtgcggcagccccccctacgccgcccccgagctgttcgagggcaaggagtacgacggccccaaggtggacatctggagcctgggcgtggtgctgtacgtgctggtgtgcggcgccctgcccttcgacggcagcaccctgcagaacctgagagccagagtgctgagcggcaagttcagaatccccttcttcatgagcaccgagtgcgagcacctgatcagacacatgctggtgctggaccccaacaagagactgagcatggagcagatctgcaagcacaagtggatgaagctgggcgacgccgaccccaacttcgacagactgatcgccgagtgccagcagctgaaggaggagagacaggtggaccccctgaacgaggacgtgctgctggccatggaggacatgggcctggacaaggagcagaccctgcagagcctgagaagcgacgcctacgaccactacagcgccatctacagcctgctgtgcgacagacacaagagacacaagaccctgagactgggcgccctgcccagcatgcccagagccctggccttccaggcccccgtgaacatccaggccgagcaggccggcaccgccatgaacatcagcgtgccccaggtgcagctgatcaaccccgagaaccagatcgtggagcccgacggcaccctgaacctggacagcgacgagggcgaggagcccagccccgaggccctggtgagatacctgagcatgagaagacacaccgtgggcgtggccgaccccagaaccgaggtgatggaggacctgcagaagctgctgcccggcttccccggcgtgaacccccaggcccccttcctgcaggtggcccccaacgtgaacttcatgcacaacctgctgcccatgcagaacctgcagcccaccggccagctggagtacaaggagcagagcctgctgcagccccccaccctgcagctgctgaacggcatgggccccctgggcagaagagccagcgacggcggcgccaacatccagctgcacgcccagcagctgctgaagagacccagaggccccagccccctggtgaccatgacccccgccgtgcccgccgtgacccccgtggacgaggagagcagcgacggcgagcccgaccaggaggccgtgcagagcagcacctacaaggacagcaacaccctgcacctgcccaccgagagattcagccccgtgagaagattcagcgacggcgccgccagcatccaggccttcaaggcccacctggagaagatgggcaacaacagcagcatcaagcagctgcagcaggagtgcgagcagctgcagaagatgtacggcggccagatcgacgagagaaccctggagaagacccagcagcagcacatgctgtaccagcaggagcagcaccaccagatcctgcagcagcagatccaggacagcatctgccccccccagcccagcccccccctgcaggccgcctgcgagaaccagcccgccctgctgacccaccagctgcagagactgagaatccagcccagcagccccccccccaaccaccccaacaaccacctgttcagacagcccagcaacagccccccccccatgagcagcgccatgatccagccccacggcgccgccagcagcagccagttccagggcctgcccagcagaagcgccatcttccagcagcagcccgagaactgcagcagcccccccaacgtggccctgacctgcctgggcatgcagcagcccgcccagagccagcaggtgaccatccaggtgcaggagcccgtggacatgctgagcaacatgcccggcaccgccgccggcagcagcggcagaggcatcagcatcagccccagcgccggccagatgcagatgcagcacagaaccaacctgatggccaccctgagctacggccacagacccctgagcaagcagctgagcgccgacagcgccgaggcccacagcgcccaccagcagcccccccactacaccaccagcgccctgcagcaggccctgctgagccccaccccccccgactacaccagacaccagcaggtgccccacatcctgcagggcctgctgagccccagacacagcctgaccggccacagcgacatcagactgccccccaccgagttcgcccagctgatcaagagacagcagcagcagagacagcagcagcagcagcagcagcagcagcaggagtaccaggagctgttcagacacatgaaccagggcgacgccggcagcctggcccccagcctgggcggccagagcatgaccgagagacaggccctgagctaccagaacgccgacagctaccaccaccacaccagcccccagcacctgctgcagatcagagcccaggagtgcgtgagccaggccagcagccccacccccccccacggctacgcccaccagcccgccctgatgcacagcgagagcatggaggaggactgcagctgcgagggcgccaaggacggcttccaggacagcaagagcagcagcaccctgaccaagggctgccacgacagccccctgctgctgagcaccggcggccccggcgaccccgagagcctgctgggcaccgtgagccacgcccaggagctgggcatccacccctacggccaccagcccaccgccgccttcagcaagaacaaggtgcccagcagagagcccgtgatcggcaactgcatggacagaagcagccccggccaggccgtggagctgcccgaccacaacggcctgggctaccccgccagacccagcgtgcacgagcaccacagacccagagccctgcagagacaccacaccatccagaacagcgacgacgcctacgtgcagctggacaacctgcccggcatgagcctggtggccggcaaggccctgagcagcgccagaatgagcgacgccgtgctgagccagagcagcctgatgggcagccagcagttccaggacggcgagaacgaggagtgcggcgccagcctgggcggccacgagcaccccgacctgagcgacggcagccagcacctgaacagcagctgctaccccagcacctgcatcaccgacatcctgctgagctacaagcaccccgaggtgagcttcagcatggagcaggccggcgtgtag

SEQ ID NO: 283452 - DNA, 1797 bp, Artificial Sequence
  derived and/or modified sequence
atggggctacgggcctcaaggcctagtaagctgacatggaagaagtgggctacaaccgccgcatccaacagctgttccaggagcgtgtcctcctgtaggcgctgtactggaggccgtctgatgaaggagccctggcgcaggccttcctctagtatttgttacactagtcggtcttcaaccattaaattctcttctaataagtttaagactctttccgtcctcctgagtcatctgcatctcttcaggcttcacgtgaagatttctcagccatcattgcctattagctcccggggcgctgcctcttccagtcagttccaaggcctgcccagcaggagtgccattttccagcagcagcctgaaaattgtagctctcccccgaacgttgccctcacttgcttgggcatgcagcaacccgcgcagtctcaacaagtgaccatccaggttcaagaacctgttgacatgctgagtaatatgcctggcaccgccgctggtagctcaggtcgggggatttcaatctcccctagtgcaggccagatgcagatgcagcaccggaccaatctgatggccacgttgagttacggacaccgccccctctccaagcaactgtccgcagacagcgccgaggcacatagtgcgcaccaacaaccgccgcactacactactagtgcactgcagcaggccctgctttcaccaacaccgccggactacaccagacatcagcaggtcccacacatcctgcagggtttgctctctccaagacacagcctgacgggccattcggacatccgtttgccccctaccgagttcgcccaattgataaaaaggcagcagcagcagagacagcagcagcagcaacagcagcaacagcaggaataccaggagctgttcagacacatgaaccagggggacgccggctcactggccccttctttggggggccagtccatgaccgagcggcaggctctgtcataccaaaatgcagattcttaccaccaccatacatctccccaacatctgctgcagatcagagcgcaggaatgcgtgagccaggcgtccagtccgactccgccacacgggtatgcccaccagcctgctctcatgcatagcgagagcatggaagaagattgctcgtgtgagggtgccaaggacgggtttcaagactcaaaatcgtccagcaccctgacgaagggatgtcacgactcacctctcttgctgagcaccggcggaccaggtgaccctgaatccctgcttggcacggtgtctcacgcacaggagctgggaatccatccatatggtcaccagcctacggctgccttcagcaagaataaggtaccaagtagggagcccgttatcggaaattgcatggatcggtcctcccctggccaggccgtagagctgccagatcacaatggcctgggataccccgcacgcccatccgtccatgaacatcatcggcccagggctctccaaaggcatcataccattcagaactctgatgacgcctatgtacagctcgacaacctgcccggcatgtccttggtggccggcaaagcactctcatccgctcgaatgtccgacgctgtcctttcccagtcgagcctgatgggcagtcagcagtttcaagatggagagaatgaggaatgcggggcttccctaggagggcatgagcatccggacctctccgatggttcccagcatctgaactcaagttgttacccaagcacctgcatcaccgacatcctgctgtcatataaacaccccgaagtgtcattttccatggaacaggccggagtgtag

SEQ ID NO: 283453 - DNA, 3309 bp, Artificial Sequence
  derived and/or modified sequence
atggcagagaaagaagccaggaggaaattcaaacagattgtcacagcggtgtacttttgccactgtcgcaacatcgtccaccgggacctgaaggcagagaaccttctgctagacgccaaccttaatatcaagatcgcagattttggtttttccaatctattcacccccgggcagctgctgaagacatggtgcggctcccccccttacgcggcccctgagttgttcgagggcaaggagtacgacggaccaaaggtggacatttggagcctgggagttgtgctatacgtgttggtgtgcggtgccctcccatttgatggatctaccttgcagaatctgagagcgcgtgtcctatcgggcaagtttaggatacccttttttatgagtaccgaatgtgagcacctcatccgacatatgctggtgctagatccaaataagcgcctgagcatggagcaaatctgtaagcacaagtggatgaaattgggagacgctgatcctaatttcgacaggctgatcgccgagtgtcaacaattgaaggaggagcgtcaggtcgacccactaaacgaggacgtgctgctggcgatggaggatatgggcctcgataaagagcagactcttcagtccttaagaagtgacgcatacgatcactattctgcgatctatagtctgctatgcgacagacacaagcgtcataagactctgagattgggagcgctgccaagcatgccacgggctctcgcattccaggcgccggtgaacatccaggccgaacaggcggggactgccatgaatatcagtgtgccccaagtacagctgatcaatccagagaatcagatcgtggagccggacggcacattgaaccttgatagcgatgaaggggaggaaccctccccagaagccctggtgaggtacctcagcatgcgtcggcatactgtgggggttgccgatcccaggacagaggtgatggaagacctgcagaaactgctacccggcttcccaggcgtaaacccgcaggcgccctttctgcaggttgcaccgaacgtcaatttcatgcataatctgctacctatgcaaaatctgcagcctacaggacagctcgagtataaagagcagtccctcctgcagccacccactctgcagctcttaaatggcatgggtcctctggggaggcgggccagtgatgggggtgctaacatccagctgcacgcccagcagttgctcaagcgtccccgcggaccgtcccccctggttaccatgacccctgcggtacctgcagtgacacctgttgacgaggaatcatccgacggggagcccgatcaggaggcagtccagtctagcacttacaaggattcaaacaccctgcatctgcctacggagagatttagcccagtgagacgtttcagtgatggtgctgccagtatccaggccttcaaggctcatctcgagaagatggggaataattctagtatcaaacagctgcagcaggagtgcgaacaactccagaaaatgtacggaggtcaaattgacgagcggactctcgaaaagacccagcagcagcatatgctctaccaacaggagcaacaccaccagatcctgcagcagcagatccaggactccatctgtcccccacaacccagccctcctttacaggcggcttgcgagaatcagcccgctcttctcacacatcaactgcagagactcaggatacagcctagctcccctccgcctaatcaccccaataaccacctgtttagacagccgtctaattcaccaccccctatgagtagcgcaatgatccagccccacggcgccgcttcgtcatcccaattccaaggtctccccagccgcagcgctatttttcagcaacagccagaaaactgttcctcacctccaaatgtcgccctcacctgtctgggtatgcagcagccagctcagagtcaacaggtcactattcaggtgcaagaacctgtggacatgcttagcaatatgccaggaaccgctgccgggtcttctggcagagggatttccataagtcccagcgcgggtcagatgcagatgcagcaccggaccaacctgatggctacgctgtcgtacggacatcgtcctctgagcaagcagctgtcagccgatagtgccgaagcccattcagctcaccaacaacctcctcactacaccaccagcgctctgcagcaggcccttctctccccaacaccccctgactatacccggcaccagcaggttccccatatacttcagggcctgctttctcccaggcactccctgaccggccattctgacatcaggctgccaccaaccgaattcgcgcagctgattaaacggcaacagcagcagcggcagcagcagcagcagcagcagcagcaacaggaatatcaggagctgtttcgccacatgaatcaaggagatgctggaagcctcgctccttcactgggggggcagtccatgacagagagacaggccctctcttatcagaatgcagattcttaccatcatcacactagtcctcagcatttgctccagatccgggcccaggagtgcgtgagtcaggcctcctcacccacaccccctcatggatatgcccatcaacccgccttgatgcacagcgaatctatggaagaggactgcagctgcgagggcgcgaaagacggctttcaagactccaagtcatccagcacactcacgaaggggtgtcacgacagcccactcttgctgtcaacggggggcccgggcgacccagaatccttgttagggacagtatcccatgcacaagagctggggattcatccttacgggcaccagcctacagccgcattctccaaaaacaaagtgccctcccgggagcctgtgatcgggaattgcatggatcgcagttctccaggccaggccgtggagctgcccgaccacaacgggctcggttaccccgccagacccagcgtgcacgagcatcatcggcctcgagcactgcaacgccatcataccattcagaattccgacgacgcctacgtgcagctcgataatctgcccggaatgtccctggtggcaggtaaggctctatcctctgccagaatgagcgacgccgtcttgagccagagctccctgatgggttcacagcaattccaggacggtgagaacgaagaatgtggagcgagccttggagggcatgagcaccctgacttaagcgatggttctcaacacctcaactcctcctgttacccaagtacttgtatcacagacatactgctttcctataagcacccagaggtctccttcagcatggaacaggcgggagtgtag

SEQ ID NO: 283454 - DNA, 5777 bp, Artificial Sequence
  derived and/or modified sequence
cagccgcgtcccccagccccggcctcccgcggacccatgcccgcccgtatcggctactacgagatcgaccgcaccatcggcaagggcaacttcgcggtggtcaagcgggccacgcacctcgtcaccaaggccaaggttgctatcaagatcatagataagacccagctggatgaagaaaacttgaagaagattttccgggaagttcaaattatgaagatgctttgccacccccatatcatcaggctctaccaggttatggagacagaacggatgatttatctggtgacagaatatgctagtggaggggaaatatttgaccacctggtggcccatggtagaatggcagaaaaggaggcacgtcggaagttcaaacagatcgtcacagctgtctatttttgtcactgtcggaacattgttcatcgtgatttaaaagctgaaaatttacttctggatgccaatctgaatatcaaaatagcagattttggtttcagtaacctcttcactcctgggcagctgctgaagacctggtgtggcagccctccctatgctgcacctgaactctttgaaggaaaagaatatgatgggcccaaagtggacatctggagccttggagttgtcctctacgtgcttgtgtgcggtgccctgccatttgatggaagcacactgcagaatctgcgggcccgcgtgctgagtggaaagttccgcatcccattttttatgtccacagaatgtgagcatttgatccgccatatgttggtgttagatcccaataagcgcctctccatggagcagatctgcaagcacaagtggatgaagctaggggacgccgatcccaactttgacaggttaatagctgaatgccaacaactaaaggaagaaagacaggtggaccccctgaatgaggatgtcctcttggccatggaggacatgggactggacaaagaacagacactgcagtcattaagatcagatgcctatgatcactatagtgcaatctacagcctgctgtgtgatcgacataagagacataaaaccctgcgtctcggagcacttcctagcatgccccgagccctggcctttcaagcaccagtcaatatccaggcggagcaggcaggtactgctatgaacatcagcgttccccaggtgcagctgatcaacccagagaaccaaattgtggagccggatgggacactgaatttggacagtgatgagggtgaagagccttcccctgaagcattggtgcgctatttgtcaatgaggaggcacacagtgggtgtggctgacccacgcacggaagttatggaagatctgcagaagctcctacctggctttcctggagtcaacccccaggctccattcctgcaggtggcccctaatgtgaacttcatgcacaacctgttgcctatgcaaaacttgcaaccaaccgggcaacttgagtacaaggagcagtctctcctacagccgcccacgctacagctgttgaatggaatgggcccccttggccggagggcatcagatggaggagccaacatccaactgcatgcccagcagctgctgaagcgcccacggggaccctctccgcttgtcaccatgacaccagcagtgccagcagttacccctgtggacgaggagagctcagacggggagccagaccaggaagctgtgcagagctctacctacaaggactccaacactctgcacctccctacggagcgtttctcccctgtgcgccggttctcagatggggctgcgagcatccaggccttcaaagctcacctggaaaaaatgggcaacaacagcagcatcaaacagctgcagcaggagtgtgagcagctgcagaagatgtacggggggcagattgatgaaagaaccctggagaagacccagcagcagcatatgttataccagcaggagcagcaccatcaaattctccagcaacaaattcaagactctatctgtcctcctcagccatctccacctcttcaggctgcatgtgaaaatcagccagccctccttacccatcagctccagaggggctgcatcttcttcccagtttcaaggcttaccttcccgcagtgcaatctttcagcagcaacctgagaactgttcctctcctcccaacgtggcactaacctgcttgggtatgcagcagcctgctcagtcacagcaggtcaccatccaagtccaagagcctgttgacatgctcagcaacatgccaggcacagctgcaggctccagtgggcgcggcatctccatcagccccagtgctggtcagatgcagatgcagcaccgtaccaacctgatggccaccctcagctatgggcaccgtcccttgtccaagcagctgagtgctgacagtgcagaggctcacagtgcacatcagcagccgccacactataccacgtcggcactacagcaggccctgctgtctcccacgccgccagactatacaagacaccagcaggtaccccacatccttcaaggactgctttctccccggcattcgctcaccggccactcggacatccggctgcccccaacagagtttgcacagctcattaaaaggcagcagcaacaacggcagcagcagcagcaacagcagcaacagcaagaataccaggaactgttcaggcacatgaaccaaggggatgcggggagtctggctcccagccttgggggacagagcatgacagagcgccaggctttatcttatcaaaatgctgactcttatcaccatcacaccagcccccagcatctgctacaaatcagggcacaagaatgtgtctcacaggcttcctcacccaccccgccccacgggtatgctcaccagccggcactgatgcattcagagagcatggaggaggactgctcgtgtgagggggccaaggatggcttccaagacagtaagagttcaagtacattgaccaaaggttgccatgacagccctctgctcttgagtaccggtggacctggggaccctgaatctttgctaggaactgtgagtcatgcccaagaattggggatacatccctatggtcatcagccaactgctgcattcagtaaaaataaggtgcccagcagagagcctgtcatagggaactgcatggatagaagttctccaggacaagcagtggagctgccggatcacaatgggctcgggtacccagcacgcccctccgtccatgagcaccacaggccccgggccctccagagacaccacacgatccagaacagcgacgatgcttatgtacagctggataacttgccaggaatgagtctcgtggctgggaaagcacttagctctgcccggatgtcggatgcagttctcagtcagtcttcgctcatgggcagccagcagtttcaggatggggaaaatgaggaatgtggggcaagcctgggaggtcatgagcacccagacctgagtgatggcagccagcatttaaactcctcttgctatccatctacgtgtattacagacattctgctcagctacaagcaccccgaagtctccttcagcatggagcaggcaggcgtgtaacaagaaacagagagttttgtgtacagcttgggaatgaaaaggttgattgtaaacccacagtatctagcagcgttgtgccaaattgcccttgtgtttctctccacccaaaatatcacagctgctttcctcacatttggttcatccgtgtgctgttcttttgggttctgagagggttttgccatgtttgcttgtatgaccaagtcaccaaggaaataaacaggaaggaaatccatgttctccatcttttgtgaaagtatatttgagttggtggttttttgttttgtttgggggtttgtgttttgttttgtttttggtatgttttcttccagaggtgatatactttcttttttttcttcctttcttttttttctttcgttccttttttgaaacaggagagcaaagcagttagagttcagaggccagcggcctcagggccactccctccctagccttcatcagcagagcaccctccatccccctgcattgctcttctgtgaaagcaaatactaaaggatgccatcctctggaatcctaatggcaggcaaagggagagaggaagggtgacggcttctggcacttagaaaacaaaaagaacaaaaaaagagaaacccccaagcctggaacgcagagaggtctttactgctgggatccacggaaaacatgtctgtcctagccaagatcatatgaagagtttggcacggaggctgagaatgacctggcatagatggtttgccagttaggatgtctcaatttgagcctttgcttttggtggataactcagctcccctcttgtaacctggaaagttggttgcctttatcatcctgctggttttatccatggactgaacacccaacagcagtgcactatgctttctatggcatctttcattctcattttatattgtgctataaaaaggattgtttctccatatatatattatatatgtgtgtatatatataatataatatatgtgtatatatatattatatatataatatataatataatatattatatatatattatatatataatatatatataaaatatatatatatatgctctcctctttcagcctctttgtcacagggaagaagtgtaggaggttgccttgggccctgcctctctcctaacctcctcttccccactgggtaccctcagcccctatattttaattcttgatcatgtagaaattgtttttggtaaatgttgatattattgttattatcattattaataaataaagagaaaaggaatttttgtttaaatgagaaatgtttaaccagattctgttctatttgaattgtgacttgcaccttttgttcaaagtatttcctttaggcattgtaattgtgaacagctcttacttgtgccagtgacagatgcagtggtctcctttccccagttgaagcagtgcatacgcagtagctattatttgtgttatctttatttctcttcattgttagaaaccaaagtcttctctgctggctggggctgagagagggtctgggttatctccttctgatcttcaaaacaagagagagaccttgaatacactgactcttccaccctttttttttctgggaaaggagagcaagaggtcccgagtcccctcctagtctttcatcctgaatttgcacagaggaaagcgggtgcccggcatggccatcctgatgttgctggcgggatccccatgcaccttgtccttctccactgatactggcagctcggctcctggacccaagatcccttgagtggaattctgcagtgcaagagcccttcgtgggagctgtcccatgtttccatggtccccagtctcccctccacttggtggggtcaccaactactcaccagaagggggcttaccaagaaagccctaaaaagctgttgacttatctgcgcttgttccaactcttatgcccccaacctgccctaccaccaccacgcgctcagcctgatgtgtttacatggtactgtatgtatgggagagcagactgcaccctccagcaacaacagatgaaagccagtgagcctactaaccgtgccatcttgcaaactacactttaaaaaaaactcattgctttgtattgtagtaaccaatatgtgcagtatacgttgaatgtatatgaacatactttcctatttctgttctttgaaaatgtcagaaatatttttttctttctcattttatgttgaactaaaaaggattaaaaaaaaaatctccagactcaagttgct

SEQ ID NO: 283455 - DNA, 1797 bp, Artificial Sequence
  derived and/or modified sequence
atgggcctgcgggccagccggcccagcaagctgacctggaagaagtgggccaccacagctgccagcaacagctgcagccgctctgtgagcagctgccgccgctgcaccggcggccgcctgatgaaggagccctggaggcggcccagcagcagcatctgctacaccagccgcagcagcaccatcaagttcagcagcaacaagttcaagaccctgtctgtgctgctgagccacctgcacctgttccggctgcacgtgaagatcagccagcccagcctgcccatcagcagcagaggagctgccagcagcagccagttccagggcctgcccagccgcagcgccatcttccagcagcagcctgagaactgcagcagccccccaaatgtggccctgacctgcctgggcatgcagcagcctgcccagagccagcaggtgaccatccaggtgcaggagcctgtggacatgctgagcaacatgcctggaacagctgctggcagcagcggccggggcatcagcatcagccccagcgctggccagatgcagatgcagcacaggaccaacctgatggccaccctgtcctatggccaccggcccctgagcaagcagctgtctgctgacagcgctgaggcccacagcgcccaccagcagcccccccactacaccaccagcgccctgcagcaggccctgctgagccccaccccaccagactacaccaggcaccagcaggtgccccacatcctgcagggcctgctgagccccaggcacagcctgaccggccacagcgacatccggctgcccccaacagaatttgcccagctgatcaagaggcagcagcagcagaggcagcagcagcagcagcagcagcagcagcaggagtaccaggagctgttccgccacatgaaccagggagatgctggcagcctggcccccagcctgggcggccagagcatgacagagcggcaggccctgagctaccagaatgctgacagctaccaccaccacaccagcccccagcacctgctgcagatccgggcccaggagtgtgtgtcccaggccagcagccccaccccaccccacggctacgcccaccagcctgccctgatgcacagcgagagcatggaggaggactgcagctgtgagggcgccaaggatggcttccaggacagcaagagcagcagcaccctgaccaagggctgccacgacagccccctgctgctgagcactggaggccctggggaccctgagagcctgctgggcaccgtgagccacgcccaggagctgggcatccacccctacggccaccagcccacagctgccttcagcaagaacaaggtgcccagccgggagcctgtgattggcaactgcatggacaggagcagccctggccaggccgtggagctgcctgaccacaacggcctgggctacccagcccggcccagcgtgcatgagcaccaccggccccgggccctgcagaggcaccacaccatccagaacagtgatgatgcctacgtgcagctggacaacctgcccggcatgagcctggtggccggcaaggccctgagcagcgccaggatgtctgatgctgtgctgagccagagcagcctgatgggcagccagcagttccaggatggagaaaatgaagaatgtggggccagcctgggcggccacgagcacccagacctgagtgatggcagccagcacctgaacagcagctgctaccccagcacctgcatcacagacatcctgctgagctacaagcaccctgaggtgtccttctccatggagcaggccggcgtgtag

SEQ ID NO: 283456 - DNA, 3309 bp, Artificial Sequence
  derived and/or modified sequence
atggccgagaaggaggcccggaggaagttcaagcagatcgtgacagctgtgtacttctgccactgcagaaatattgtgcaccgggacctgaaggccgagaacctgctgctggatgccaacctgaacatcaagattgctgactttggcttcagcaacctcttcaccccaggccagctgctgaagacctggtgtggcagccccccctatgctgcccctgagctgtttgagggcaaggagtatgatggccccaaggtggacatctggagcctgggcgtggtgctgtatgtgctggtgtgtggggccctgccctttgatggcagcaccctgcagaacctgcgggcccgggtgctgagcggcaagttccgcatccccttcttcatgagcacagaatgtgagcacctgatccgccacatgctggtgctggaccccaacaagaggctgtccatggagcagatctgcaagcacaagtggatgaagctgggagatgctgaccccaactttgaccggctgattgctgagtgccagcagctgaaggaggagcggcaggtggaccccctgaatgaagatgtgctgctggccatggaggacatgggcctggacaaggagcagaccctgcagagcctgcggagtgatgcctatgaccactacagcgccatctacagcctgctgtgtgacagacacaagaggcacaagaccctgcggctgggcgccctgcccagcatgccccgggccctggccttccaggcccctgtgaacatccaggccgagcaggccggcacagccatgaacatctctgtgccccaggtgcagctgatcaaccctgagaaccagatcgtggagccagatggcaccctgaacctggacagtgatgaaggagaggagcccagccctgaggccctggtgcgctacctgtccatgagaagacacacagtgggcgtggccgaccccaggacagaggtgatggaggacctgcagaagctgctgcccggcttccctggggtgaacccccaggcccccttcctgcaggtggcccccaacgtgaacttcatgcacaacctgctgcccatgcagaacctgcagcccaccggccagctggagtacaaggagcagagcctgctgcagccccccaccctgcagctgctgaatggcatgggccccctgggcagaagagccagtgatggaggagccaacatccagctgcacgcccagcagctgctgaagaggccccggggccccagccccctggtgaccatgaccccagctgtgcctgctgtgacccctgtggatgaggagagcagtgatggagagccagaccaggaggccgtgcagagcagcacctacaaggacagcaacaccctgcacctgcccacagagcgcttcagccctgtgcggcgcttcagtgatggagctgccagcatccaggccttcaaggcccacctggagaagatgggcaacaacagcagcatcaagcagctgcagcaggagtgtgagcagctgcagaagatgtatggaggccagattgatgagaggaccctggagaagacccagcagcagcacatgctgtaccagcaggagcagcaccaccagatcctgcagcagcagatccaggacagcatctgccccccccagcccagcccccccctgcaggccgcctgtgagaaccagcctgccctgctgacccaccagctgcagaggctgcgcatccagcccagcagccccccacccaaccaccccaacaaccacctgttccggcagcccagcaacagccccccacccatgagcagcgccatgatccagccccatggagctgccagcagcagccagttccagggcctgcccagccgcagcgccatcttccagcagcagcctgagaactgcagcagccccccaaatgtggccctgacctgcctgggcatgcagcagcctgcccagagccagcaggtgaccatccaggtgcaggagcctgtggacatgctgagcaacatgcctggaacagctgctggcagcagcggccggggcatcagcatcagccccagcgctggccagatgcagatgcagcacaggaccaacctgatggccaccctgtcctatggccaccggcccctgagcaagcagctgtctgctgacagcgctgaggcccacagcgcccaccagcagcccccccactacaccaccagcgccctgcagcaggccctgctgagccccaccccaccagactacaccaggcaccagcaggtgccccacatcctgcagggcctgctgagccccaggcacagcctgaccggccacagcgacatccggctgcccccaacagaatttgcccagctgatcaagaggcagcagcagcagaggcagcagcagcagcagcagcagcagcagcaggagtaccaggagctgttccgccacatgaaccagggagatgctggcagcctggcccccagcctgggcggccagagcatgacagagcggcaggccctgagctaccagaatgctgacagctaccaccaccacaccagcccccagcacctgctgcagatccgggcccaggagtgtgtgtcccaggccagcagccccaccccaccccacggctacgcccaccagcctgccctgatgcacagcgagagcatggaggaggactgcagctgtgagggcgccaaggatggcttccaggacagcaagagcagcagcaccctgaccaagggctgccacgacagccccctgctgctgagcactggaggccctggggaccctgagagcctgctgggcaccgtgagccacgcccaggagctgggcatccacccctacggccaccagcccacagctgccttcagcaagaacaaggtgcccagccgggagcctgtgattggcaactgcatggacaggagcagccctggccaggccgtggagctgcctgaccacaacggcctgggctacccagcccggcccagcgtgcatgagcaccaccggccccgggccctgcagaggcaccacaccatccagaacagtgatgatgcctacgtgcagctggacaacctgcccggcatgagcctggtggccggcaaggccctgagcagcgccaggatgtctgatgctgtgctgagccagagcagcctgatgggcagccagcagttccaggatggagaaaatgaagaatgtggggccagcctgggcggccacgagcacccagacctgagtgatggcagccagcacctgaacagcagctgctaccccagcacctgcatcacagacatcctgctgagctacaagcaccctgaggtgtccttctccatggagcaggccggcgtgtag

SEQ ID NO: 283457 - DNA, 1797 bp, Artificial Sequence
  derived and/or modified sequence
atgggcctgcgggccagccggcccagcaagctgacctggaagaagtgggccaccaccgcggcgtcaaactcctgctcccgctccgtttcgtcatgtcgtaggtgtactggtggccgcctcatgaaggaaccctggcggcggccttcctcttctatttgctacacctccagaagttccacaatcaagttctcttcaaataagtttaaaacgctgtcggtgctcctgagccacttgcacctcttccggctccatgttaaaatttcacagccttcactgccaatcagcagccgtggcgcagcatcatccagccaatttcagggcctccccagcagatcagcgatttttcagcagcagcccgagaactgcagttctcccccaaatgtggccctcacatgcctgggcatgcagcagcctgcccagtcccagcaggtgaccatccaggtgcaggaaccggtagacatgctgtcaaatatgcctggtaccgcagccgggtcctccggcaggggcatttccataagtccgtcggcaggacagatgcaaatgcaacaccggacaaacctgatggccactttgtcctacgggcaccgcccgttgtcaaagcagctgagcgctgattcagcggaggcccactctgcccaccagcaacccccccactataccacaagcgccttgcagcaggcactgctgagccccaccccacctgactacacgagacaccaacaggtgccacacattcttcagggacttctgagtcccaggcactcacttacaggtcattcagatattcgcctccccccaacagaattcgcccagctcattaaacgccagcagcagcagcgccagcaacaacagcaacagcagcaacaacaggaataccaggaactgttccggcatatgaaccagggggacgccggaagcttagccccgtctctcggaggacagagtatgacggagcgacaggccctcagttaccaaaacgccgattcctatcaccatcatacgagccctcagcacttgctgcagattcgggcacaggaatgtgtctcccaggcctcctctcccacaccccctcatggctacgctcaccagcctgcactaatgcacagcgagtctatggaggaagattgttcttgcgagggcgcaaaagacgggttccaagattcgaagtcttcctcaaccctgaccaagggctgtcacgattctcctttgctgttgagcactggcggtcccggggaccctgagtccctgctgggcacggtttcacacgcacaagagttaggcattcacccttatggacaccagcctacagctgctttcagcaagaataaagtgccgtctagggaacctgtcatcggcaactgcatggacagatcaagccccggtcaagcggtggagctgcctgatcataacgggctagggtatcccgcgcggccttcggtgcacgaacatcaccggccccgcgctctgcagcgacatcacaccatacagaacagtgatgacgcttatgtccagttagacaatctgccaggaatgtcactggttgctggcaaagcactgtcaagcgcacggatgagcgatgcagtcttgagtcagtcaagcttaatgggcagccagcagtttcaggacggagagaatgaggagtgcggcgcgtccctaggcgggcatgagcaccctgacctgtcagacgggagtcagcacctgaacagttcctgctatccgtctacatgcattacagacatccttttaagttacaagcatccggaagtatccttctcaatggagcaggccggtgtgtag

SEQ ID NO: 283458 - DNA, 3309 bp, Artificial Sequence
  derived and/or modified sequence
atggccgagaaggaggcccggcggaagttcaagcagatcgtgaccgccgtgtacttttgtcattgtcgcaacattgttcatcgtgatctgaaggcagaaaatctactgctggacgcgaacctcaatataaagatcgcggactttggctttagtaatctctttacaccaggtcagttactcaagacatggtgtggcagccccccgtatgcagcccctgaattgtttgaaggtaaagaatatgacggcccgaaagtggacatctggtcactgggggtcgtgctgtacgtgctggtgtgcggagccctgcccttcgatgggagcactttacagaacctgcgcgcccgggttttaagtgggaagttccggattccgttcttcatgtccactgagtgcgagcaccttatccgccacatgctggtgctggaccctaacaaacgcctgtctatggaacaaatttgcaagcacaagtggatgaaactgggggacgccgatcctaactttgatcgccttattgcagagtgtcaacagctcaaagaggaacggcaagtggatccactgaacgaggatgttctgctggctatggaagacatgggactcgacaaggagcagacactccagtcgctccgcagtgatgcctatgatcattactcggccatctattcattactctgtgaccggcataaaagacacaagaccctacgcctcggagccctgccttccatgcctcgcgcccttgcttttcaagcgccagtgaacattcaagccgagcaggctgggactgccatgaatatttctgtgccacaggtccaactgataaaccccgaaaaccagatcgtcgagcccgacggcactctgaatctggactctgacgaaggcgaagagccctctcccgaggccctcgtccgctatctgtcaatgcgcagacacaccgtcggggttgccgatccccggacagaagtcatggaggacctccaaaaactgctccccggattccccggggtaaaccctcaggctccattccttcaggtcgcaccaaacgtgaatttcatgcataatcttctacccatgcaaaacttacagccaacgggtcagctcgaatacaaggaacagagtctgttgcagccacccaccctccagctgttgaacggcatggggccactcgggagacgggcctccgatggtggcgcaaacattcaactgcatgcacagcagttgctgaagcggccacgtgggccaagccctttggtgaccatgaccccagcagtcccagccgtgacgccagtcgacgaagaaagctccgatggagagcccgaccaagaagcagtgcagtcttccacatacaaggattcgaacacgctgcatctcccaactgaaaggttctccccagtccggcgcttctctgatggtgcagcatccatccaggcatttaaagcccaccttgagaaaatgggtaataatagtagtatcaagcaacttcaacaggaatgtgagcagctgcagaaaatgtacggaggccagatcgacgagcgcaccctggagaagacccaacagcaacatatgctgtatcagcaagaacagcaccatcagatccttcagcagcaaatccaggattccatctgtcctcctcagcctagcccaccgctgcaggctgcctgtgaaaaccagcccgcgctcctgacccaccagttacagcggttacgaatacaaccatctagccccccgccaaaccatccgaataaccacctgtttcgccagccttccaattctcctccacctatgtcatcagccatgattcaaccccacggagcggcatcatcctcccaatttcaggggctgccatctcgatccgcaatctttcagcagcaaccagaaaactgtagctccccaccaaatgtggcgttgacgtgccttgggatgcagcaacccgcacagtcccaacaggtgaccattcaggttcaggaaccagttgacatgttatccaacatgcctggcaccgccgcagggtccagtggacggggtatttccatctcgccctctgcaggccagatgcagatgcaacatcgcacgaatcttatggctaccctttcatatggacacaggccactgtctaaacaactatcagccgatagtgccgaagctcatagtgctcaccaacagcctccccactacactactagcgcactccaacaagcattgctttctcccaccccaccagactacactcggcatcagcaggtcccacatatattgcaaggcctactgagcccacgccacagtctgactggccactcagatattcgtttgcctcccaccgaatttgcacagcttatcaagagacaacagcagcagcgccagcagcaacagcagcagcagcagcagcaggaataccaagagctgtttaggcacatgaaccaaggtgacgccgggtcactagcaccatccctcgggggccagagcatgaccgaaagacaggcactgtcatatcagaatgctgattcctaccaccaccacactagtccccagcatctgctgcagatccgggcacaggagtgtgtgagccaggcatcttcgcctacccccccccacgggtacgcacatcagcccgccctgatgcactctgaatctatggaagaagactgcagttgcgaaggggccaaagacggattccaggattctaaatcctcgtctactctgacgaaaggctgtcacgattcacccttactcctgtcaacaggggggccaggcgacccagagagtttactgggaaccgtcagccacgcacaagagctcggcatccacccctacgggcatcaacccacagcagcgttttccaagaacaaagtacccagccgcgaacccgtcatcggtaattgcatggataggagttctcctgggcaagccgttgaactgcctgatcataatgggctgggataccccgcacgcccgagtgtgcacgaacatcacaggccacgcgccctccaacggcatcacaccatccagaactccgacgacgcctacgtgcagctggacaatctgcccgggatgtcactggtggctggtaaagccctgtcttccgcccgtatgtccgacgccgtgctgtcacagtcatcgttgatgggatcacagcagttccaggatggagagaatgaggagtgcggcgctagcctcggagggcacgagcaccctgatctgtctgatggatctcagcatcttaactcatcctgttacccctctacctgcattacagacattctgctgtcctacaaacacccagaggtttccttctccatggagcaggcaggagtctag

SEQ ID NO: 283459 - DNA, 1797 bp, Artificial Sequence
  derived and/or modified sequence
atggggctacgtgcctcaagaccgagtaagctcacctggaagaagtgggccacaactgcagcttctaattcctgttcacgttctgtcagcagctgtaggcgctgcacaggaggacggcttatgaaagagccctggagaagaccaagttccagtatctgttatacatccaggagtagtacaataaaattcagtagtaataagtttaaaactttgtctgtcttgttgagtcatctacaccttttccgcctgcacgtgaaaatctctcagcctagcttgccaattagcagtcgcggagctgccagcagttcccagtttcaggggctgccctccaggagcgccatctttcagcaacagccagagaactgcagtagccccccaaacgttgctctcacctgtctaggaatgcaacagcccgctcagagccagcaggtcacaatccaggtgcaggagccagtggatatgctctccaatatgccaggaacagctgcaggatccagcggccgtggcattagcatctccccatctgccggtcagatgcagatgcagcacagaactaatctcatggccaccctcagttatggccaccgtcccctgagcaagcagctatctgccgactccgcagaggcgcacagtgcccaccagcaacctcctcattacacgacaagtgcgctccagcaggcgctgctgagccctacgcctcccgattacacaaggcaccaacaggtgccacatattctgcagggcctgctgtctccgagacactccctgaccggtcattctgatattcggctccccccaacagaatttgcgcaactgattaagcggcaacaacagcagcggcagcagcagcagcaacaacagcagcagcaggaataccaagaattattccgccacatgaaccagggagacgctggatctttggctccaagcctagggggtcagagtatgactgagcgccaagcactcagctatcagaacgcggactcctaccaccaccacacgtctccgcaacacctgctgcagatccgggctcaggaatgcgtgagtcaggccagctcccctacaccacctcatgggtatgcccaccaaccggctcttatgcattcagagagcatggaggaggattgctcctgtgagggcgctaaagacggattccaggatagcaaaagttccagcaccctgaccaaaggatgtcacgactcaccgctgctgctaagtacgggaggacccggagaccctgaatctctgctgggtactgtgtctcacgcgcaggaactcggtatccatccctacggtcatcagccaacagccgctttctctaaaaacaaagttccttctcgagagccagttatcgggaattgtatggacagatcctccccgggtcaggcagtggaactgccagatcacaatggcctcgggtaccctgccaggcctagtgtgcatgagcaccatagacctcgcgcacttcagaggcaccatacgatccagaattccgatgatgcatacgtccagttggataatctacctgggatgtctctcgttgccggtaaagctctctcgtccgccagaatgtctgatgctgtcctgtcccagtccagcctcatgggtagccagcagttccaggacggtgagaatgaggagtgtggagcaagcctgggtggtcacgagcaccccgacttgtccgacggttcacaacacctcaacagctcctgttacccatcaacttgtatcaccgatattctgcttagttacaagcacccagaagtgtccttctctatggaacaggccggagtttag

SEQ ID NO: 283460 - DNA, 3309 bp, Artificial Sequence
  derived and/or modified sequence
atggctgaaaaggaggccagacgtaagtttaagcaaatcgttaccgcagtttacttctgtcattgtagaaatattgttcatcgggatttaaaagcggagaatttacttcttgacgccaatcttaatatcaaaattgccgacttcgggttctcgaacttgttcacaccaggacagttattgaaaacttggtgtggctcccctccgtatgccgcacctgagttgtttgagggaaaagagtacgacgggccaaaggttgacatctggtcgttaggggtggtgctctacgtgctggtgtgtggagctcttccgttcgatgggtccaccctccagaacctgagagctcgcgtgctgtccgggaagtttcgcataccgttcttcatgtctactgagtgcgagcatctgatcaggcacatgcttgtcctggaccccaataaacggctgagtatggaacagatctgcaagcacaagtggatgaagctcggagatgctgaccctaacttcgaccgtctgattgctgagtgccagcagctcaaagaggaacggcaggtggaccctttgaacgaagacgttcttctggccatggaagatatgggtctggataaggagcagaccttgcagtcacttcgaagtgacgcctatgaccattactccgccatctacagcctgctctgtgacagacacaaaaggcacaagaccctcaggctaggagcccttccatccatgccacgggctctggcttttcaggctcccgttaacatccaagcagaacaggcgggtacagcaatgaacattagtgtccctcaggtgcagttaataaaccctgaaaaccagattgttgagcctgacggtacgctgaacctggacagcgacgaaggcgaggagccatccccagaggctcttgttcgctacctctccatgcgacgccatacagtgggagtggccgacccacggactgaggtgatggaagatctgcagaaacttctgcccggtttcccaggtgtcaaccctcaggccccttttctgcaggtagcacccaatgtgaacttcatgcataacctgctgcccatgcagaacctgcaaccaacggggcagttagagtataaggaacagtcattactccagcctccaactctgcaattactcaatggcatgggccctctgggccgacgggcatccgatgggggagccaacatccagctgcatgctcaacagctcctgaagaggccgcgaggtccgtcgccactcgtgaccatgacacccgctgtgccagccgtgactccagtggacgaggaatctagcgacggggagccagaccaggaagctgtccagtcatctacatataaggattccaacaccctgcatctgcccacagagagattttctcccgtacgccgttttagcgacggcgcagccagtattcaggcttttaaagcacacctggaaaagatgggcaacaattcatccattaagcagctgcagcaagagtgtgagcaactgcagaaaatgtacggagggcagattgacgaaagaacactagaaaagacccagcagcagcacatgttgtatcaacaggagcaacatcaccagattcttcaacagcaaattcaggactcaatctgcccaccacagccgtcacctcccctacaggctgcttgcgaaaaccagccggctctccttacgcaccagctgcagaggctgcgtatccaaccaagctcccctcctcctaatcatccaaacaaccatttgttcaggcagccatccaactcaccgcctccaatgagctctgcaatgatccagccgcacggagctgcctcaagctcacagtttcagggcctgccctcccgctctgccatcttccaacaacagccagagaattgtagttccccccctaatgtagccttaacctgcctcggtatgcaacagccagcccagagccagcaggtgactatccaggttcaagaacctgtggatatgctgtctaatatgccagggacggccgcaggatcatccgggagaggtattagcatctcaccatctgcaggacagatgcagatgcagcatcggacaaacttaatggccaccttgagttatgggcataggccgctgtccaagcagctgagcgccgattccgctgaagcccatagcgcacatcagcaaccaccgcactataccacatcagctttgcagcaggctctgctgtcccctacaccacctgactataccagacatcaacaggtcccccatattttgcaagggttactgtcgccacggcactctctcaccgggcacagtgacatcagactgcccccaactgaattcgcccaactcatcaagaggcagcagcaacagaggcagcaacagcagcagcagcaacagcaacaggagtatcaagagctctttaggcacatgaatcagggtgacgccggatccttagccccatccctggggggacagagcatgactgaacggcaggcactaagctaccagaacgcagattcttaccaccatcacacctcaccacagcatttactgcagatccgagctcaggagtgcgtctcccaggccagcagtcccacacccccacacggctatgcccatcagcctgccctaatgcacagcgaaagcatggaagaggactgctcttgtgaaggggctaaggatgggtttcaggattcaaagagtagctccaccttaacaaaaggatgtcacgatagccctttacttctgagcaccggcggacccggtgatcccgaatccttactcgggactgtcagtcacgcccaggagctgggcatacacccttatggccatcagcccacagcggcattcagcaagaacaaagtgcccagcagggaacctgtaatcgggaactgtatggataggtctagtccgggacaggctgtcgagctgcctgatcataatggactgggttatcctgctcgtccttctgttcacgagcaccaccgtccaagagcattgcagcggcaccacaccattcagaattctgatgatgcttatgtgcagctggataacctgcctggaatgtctctcgtcgctggcaaagcactgagctctgcccgtatgtcggatgctgtactatcacaatcctccttaatgggaagccagcagttccaggacggagaaaatgaggaatgcggcgcaagtctgggcggacacgaacatcccgacctgtccgatggcagccaacacctgaacagctcatgctacccgagtacttgcataaccgacatactgttatcttacaagcatccggaagtctctttttccatggaacaggcgggtgtatag

SEQ ID NO: 283461 - DNA, 3818 bp, Artificial Sequence
  derived and/or modified sequence
cgtcccccagccccggcctcccgcggacccatgcccgcccgtatcggctactacgagatcgaccgcaccatcggcaagggcaacttcgcggtggtcaagcgggccacgcacctcgtcaccaaggccaaggttgctatcaagatcatagataagacccagctggatgaagaaaacttgaagaagattttccgggaagttcaaattatgaagatgctttgccacccccatatcatcaggctctaccaggttatggagacagaacggatgatttatctggtgacagaatatgctagtggaggggaaatatttggaggatttggacatcagcaattctcattctgccccgagctgcctattgctgagtcctggagaagtgcagttaagagatgggggccccttcttctactcagcccccacttgtggaacttgatcagaccacctggtggcccatggtagaatggcagaaaaggaggcacgtcggaagttcaaacagatcgtcacagctgtctatttttgtcactgtcggaacattgttcatcgtgatttaaaagctgaaaatttacttctggatgccaatctgaatatcaaaatagcagattttggtttcagtaacctcttcactcctgggcagctgctgaagacctggtgtggcagccctccctatgctgcacctgaactctttgaaggaaaagaatatgatgggcccaaagtggacatctggagccttggagttgtcctctacgtgcttgtgtgcggtgccctgccatttgatggaagcacactgcagaatctgcgggcccgcgtgctgagtggaaagttccgcatcccattttttatgtccacagaatgtgagcatttgatccgccatatgttggtgttagatcccaataagcgcctctccatggagcagatctgcaagcacaagtggatgaagctaggggacgccgatcccaactttgacaggttaatagctgaatgccaacaactaaaggaagaaagacaggtggaccccctgaatgaggatgtcctcttggccatggaggacatgggactggacaaagaacagacactgcagtcattaagatcagatgcctatgatcactatagtgcaatctacagcctgctgtgtgatcgacataagagacataaaaccctgcgtctcggagcacttcctagcatgccccgagccctggcctttcaagcaccagtcaatatccaggcggagcaggcaggtactgctatgaacatcagcgttccccaggtgcagctgatcaacccagagaaccaaattgtggagccggatgggacactgaatttggacagtgatgagggtgaagagccttcccctgaagcattggtgcgctatttgtcaatgaggaggcacacagtgggtgtggctgacccacgcacggaagttatggaagatctgcagaagctcctacctggctttcctggagtcaacccccaggctccattcctgcaggtggcccctaatgtgaacttcatgcacaacctgttgcctatgcaaaacttgcaaccaaccgggcaacttgagtacaaggagcagtctctcctacagccgcccacgctacagctgttgaatggaatgggcccccttggccggagggcatcagatggaggagccaacatccaactgcatgcccagcagctgctgaagcgcccacggggaccctctccgcttgtcaccatgacaccagcagtgccagcagttacccctgtggacgaggagagctcagacggggagccagaccaggaagctgtgcagagctctacctacaaggactccaacactctgcacctccctacggagcgtttctcccctgtgcgccggttctcagatggggctgcgagcatccaggccttcaaagctcacctggaaaaaatgggcaacaacagcagcatcaaacagctgcagcaggagtgtgagcagctgcagaagatgtacggggggcagattgatgaaagaaccctggagaagacccagcagcagcatatgttataccagcaggagcagcaccatcaaattctccagcaacaaattcaagactctatctgtcctcctcagccatctccacctcttcaggctgcatgtgaaaatcagccagccctccttacccatcagctccagaggttaaggattcagccttcaagcccaccccccaaccaccccaacaaccatctcttcaggcagcccagtaatagtcctccccccatgagcagtgccatgatccagcctcacggggctgcatcttcttcccagtttcaaggcttaccttcccgcagtgcaatctttcagcagcaacctgagaactgttcctctcctcccaacgtggcactaacctgcttgggtatgcagcagcctgctcagtcacagcaggtcaccatccaagtccaagagcctgttgacatgctcagcaacatgccaggcacagctgcaggctccagtgggcgcggcatctccatcagccccagtgctggtcagatgcagatgcagcaccgtaccaacctgatggccaccctcagctatgggcaccgtcccttgtccaagcagctgagtgctgacagtgcagaggctcacagtgcacatcagcagccgccacactataccacgtcggcactacagcaggccctgctgtctcccacgccgccagactatacaagacaccagcaggtaccccacatccttcaaggactgctttctccccggcattcgctcaccggccactcggacatccggctgcccccaacagagtttgcacagctcattaaaaggcagcagcaacaacggcagcagcagcagcaacagcagcaacagcaagaataccaggaactgttcaggcacatgaaccaaggggatgcggggagtctggctcccagccttgggggacagagcatgacagagcgccaggctttatcttatcaaaatgctgactcttatcaccatcacaccagcccccagcatctgctacaaatcagggcacaagaatgtgtctcacaggcttcctcacccaccccgccccacgggtatgctcaccagccggcactgatgcattcagagagcatggaggaggactgctcgtgtgagggggccaaggatggcttccaagacagtaagagttcaagtacattgaccaaaggttgccatgacagccctctgctcttgagtaccggtggacctggggaccctgaatctttgctaggaactgtgagtcatgcccaagaattggggatacatccctatggtcatcagccaactgctgcattcagtaaaaataaggtgcccagcagagagcctgtcatagggaactgcatggatagaagttctccaggacaagcagtggagctgccggatcacaatgggctcgggtacccagcacgcccctccgtccatgagcaccacaggccccgggccctccagagacaccacacgatccagaacagcgacgatgcttatgtacagctggataacttgccaggaatgagtctcgtggctgggaaagcacttagctctgcccggatgtcggatgcagttctcagtcagtcttcgctcatgggcagccagcagtttcaggatggggaaaatgaggaatgtggggcaagcctgggaggtcatgagcacccagacctgagtgatggcagccagcatttaaactcctcttgctatccatctacgtgtattacagacattctgctcagctacaagcaccccgaagtctccttcagcatggagcaggcaggcgtgtaacaagaaacagagagttttgtgtacagcttgggaatgaaaaggttgattgtaa

SEQ ID NO: 283462 - DNA, 966 bp, Artificial Sequence
  derived and/or modified sequence
atgaccgagctgagcctgcagaaggagcagctgcagctgaagatcatcgagatcgaggacgaggccgagaagtggcagaaggagaaggacagaatcaagagcttcaccaccaacgagaaggccatcctggagcagaacttcagagacctggtgagagacctggagaagcagaaggaggaggtgagagccgccctggagcagagagagcaggacgccgtggaccaggtgaaggtgatcatggacgccctggacgagagagccaaggtgctgcacgaggacaagcagaccagagagcagctgcacagcatcagcgacagcgtgctgttcctgcaggagttcggcgccctgatgagcaactacagcctgcccccccccctgcccacctaccacgtgctgctggagggcgagggcctgggccagagcctgggcaacttcaaggacgacctgctgaacgtgtgcatgagacacgtggagaagatgtgcaaggccgacctgagcagaaacttcatcgagagaaaccacatggagaacggcggcgaccacagatacgtgaacaactacaccaacagcttcggcggcgagtggagcgcccccgacaccatgaagagatacagcatgtacctgacccccaagggcggcgtgagaaccagctaccagcccagcagccccggcagattcaccaaggagaccacccagaagaacttcaacaacctgtacggcaccaagggcaactacaccagcagagtgtgggagtacagcagcagcatccagaacagcgacaacgacctgcccgtggtgcagggcagcagcagcttcagcctgaagggctaccccagcctgatgagaagccagagccccaaggcccagccccagacctggaagagcggcaagcagaccatgctgagccactacagacccttctacgtgaacaagggcaacggcatcggcagcaacgaggccccctag

SEQ ID NO: 283463 - DNA, 966 bp, Artificial Sequence
  derived and/or modified sequence
atgaccgaattatcgctgcagaaggagcagctgcagttgaagatcattgaaattgaggatgaagcagagaagtggcaaaaggaaaaggaccgcatcaaatctttcacaaccaacgaaaaggcaatactggaacagaacttccgggatctggtgcgggacctggagaaacaaaaagaggaggttcgagctgcgctggaacaacgtgagcaagacgctgttgaccaagtcaaagttattatggatgcattggatgagcgcgccaaagtactgcacgaggacaagcaaactagagagcagcttcacagcatatcagattctgtactgtttctccaggagtttggcgccttaatgagcaactattccctcccacccccactgcctacttatcacgtgctgttggagggggagggcctggggcaatccctcggtaatttcaaagatgacctgctgaatgtctgcatgaggcacgttgaaaaaatgtgtaaagcagacctctccagaaatttcatcgaacgcaatcatatggagaatggcggagatcataggtacgttaacaactataccaactcatttggaggtgaatggtctgcgccagacacaatgaagcgctacagtatgtacctgactcctaagggcggagtcagaacatcttaccagcccagtagtcccgggcgcttcaccaaagagactacgcagaaaaatttcaacaacctctatggcactaaaggaaattatacctcacgagtatgggagtactcctcttcaattcagaatagcgacaacgacctccccgtcgttcaggggagctcgagttttagccttaagggatacccatcattgatgagatctcaaagtccaaaggcccagccacagacatggaaatccggcaagcaaacgatgctcagccactatcggcccttctatgtgaacaagggaaatggaatcggcagcaacgaggccccttag

SEQ ID NO: 283464 - DNA, 966 bp, Artificial Sequence
  derived and/or modified sequence
atgacagagctgagcctgcagaaggagcagctgcagctgaagatcatcgagattgaagatgaggccgagaagtggcagaaggagaaggaccgcatcaagagcttcaccaccaatgagaaggccatcctggagcagaacttccgggacctggtgcgggacctggagaagcagaaggaggaggtgcgggccgccctggagcagcgggagcaggatgctgtggaccaggtgaaggtgatcatggatgccctggatgagcgggccaaggtgctgcacgaggacaagcagacccgggagcagctgcacagcatcagtgacagcgtgctcttcctgcaggagtttggagccctgatgagcaactacagcctgcccccacccctgcccacctaccacgtgctgctggagggggagggcctgggccagagcctgggcaacttcaaggatgacctgctgaatgtgtgcatgagacatgtggagaagatgtgcaaggctgacctgagcaggaacttcatcgagaggaaccacatggagaatggaggagaccacagatatgtgaacaactacaccaacagctttggaggagagtggagcgccccagacaccatgaagcgctacagcatgtacctgacccccaagggcggcgtgaggaccagctaccagcccagcagccctggccgcttcaccaaggagaccacccagaagaacttcaacaacctgtatggcaccaagggcaactacaccagccgggtgtgggagtacagcagcagcatccagaacagcgacaatgacctgcctgtggtgcagggcagcagcagcttcagcctgaagggctaccccagcctgatgaggagccagagccccaaggcccagccccagacctggaagagcggcaagcagaccatgctgagccactaccggcccttctacgtgaacaagggaaatggaattggcagcaatgaggccccctag

SEQ ID NO: 283465 - DNA, 966 bp, Artificial Sequence
  derived and/or modified sequence
atgaccgagctgagcctgcagaaggagcagctgcagctgaagatcattgaaatcgaggacgaagccgaaaagtggcagaaggaaaaagatcggattaagagcttcacaacaaacgagaaagcgatactcgaacagaatttccgtgatctggtgcgcgacttagagaagcagaaagaggaagtgagagccgcgctggagcaacgggagcaggatgcagtggaccaagtaaaggtaatcatggacgccctggatgaaagagctaaggttttgcacgaggataaacagacaagagaacagctacactcgatttccgactctgtgctttttttacaagaatttggagccttgatgtcaaattactctttgcctccaccattgcctacttatcacgtgctgctggagggagagggcctcggtcagagtctaggcaattttaaagacgacctgttgaatgtgtgcatgcgtcatgtggaaaagatgtgtaaggccgatctgtcaagaaatttcattgagaggaatcatatggaaaacggcggggatcaccggtacgttaacaattacactaacagctttggtggggaatggtctgcgccggatacaatgaagcgatacagcatgtatctgacccctaaggggggagtcagaacatcttatcagccgtcctccccgggccggttcaccaaggagaccacccaaaagaacttcaataacctgtatgggaccaaaggcaattatacgtcaagggtttgggaatattccagctccattcaaaatagtgacaacgacttgccagttgtccagggaagcagttccttcagcctcaagggttatccctccctgatgaggtcccagtcgccaaaggcccaaccccaaacgtggaagagtggcaaacagactatgctgagccactaccgccccttttatgtcaataaggggaacggcataggtagcaatgaggccccttag

SEQ ID NO: 283466 - DNA, 966 bp, Artificial Sequence
  derived and/or modified sequence
atgacagagctgtccctgcagaaagagcaactgcagttgaagatcattgagatcgaggacgaggcagagaagtggcagaaagagaaagaccggatcaagtctttcacaactaacgagaaggcgatattggagcaaaattttcgagatctcgtacgggatctggagaagcaaaaagaggaagtgcgagcagccctcgagcagcgggaacaggatgcagttgaccaagtgaaggtgatcatggatgctcttgacgaacgcgcaaaagtcctgcacgaggacaagcaaacgagggaacagctgcatagtatctctgattctgtcctgttcctgcaggagttcggggcacttatgtctaactattccctgcctcctcccttacctacttaccacgtcttgctggagggtgaggggctggggcagtccctcggaaacttcaaggatgacctgctgaacgtctgtatgcgccacgtcgaaaagatgtgcaaggccgacttatcccgcaattttatagagcggaatcatatggagaatggcggagatcaccggtatgtgaataactacacgaactctttcggcggagaatggtctgccccagacaccatgaaacgctattccatgtatctcacccctaagggtggagtacgcacaagctatcaaccctcatctcctgggaggttcacaaaggagacaacccagaagaatttcaacaacctctacggcacgaagggcaactacacttcccgcgtctgggaatactcttcctccatccagaactctgataacgacctgcccgtcgttcagggatcaagctcattctccctcaagggatatccatcactaatgcgaagtcaatctcctaaagcacagccccagacatggaagtcgggcaagcaaacaatgctcagtcactatcgtccattttacgtgaacaagggtaatggcattgggtcgaacgaagccccatag

SEQ ID NO: 283467 - DNA, 1538 bp, Artificial Sequence
  derived and/or modified sequence
cttcctttctcttcccattgtccccaggtccactgaaaagggcaagcaccctgtaaatgagtttccctcctgctcttgctgggtggaggagataggcagaggtttagcccttaaaaagacatggctaggatatccagccctagtggcctgagaatacagcaagatgacggagctgtcattgcaaaaggagcagctgcagctcaagatcattgagattgaggatgaagctgagaagtggcagaaggagaaggaccgcatcaagagcttcaccaccaatgagaaggccatcctggagcagaacttccgggacctggtgcgggacctggagaagcaaaaggaggaagtgagggctgcgctggagcagcgggagcaggatgctgtggaccaagtgaaggtgatcatggatgctctggatgagagagccaaggtgctgcatgaggacaagcagacccgggagcagctgcatagcatcagcgactctgtgttgtttctgcaggaatttggtgcattgatgagcaattactctctccccccacccctgcccacctatcatgtcctgctggagggggagggcctgggacagtcactaggcaacttcaaggacgacctgctcaatgtatgcatgcgccacgttgagaagatgtgcaaggcggacctgagccgtaacttcattgagaggaaccacatggagaacggtggtgaccatcgctatgtgaacaactacacgaacagcttcgggggtgagtggagtgcaccggacaccatgaagagatactccatgtacctgacacccaaaggtggggtccggacatcataccagccctcgtctcctggccgcttcaccaaggagaccacccagaagaatttcaacaatctctatggcaccaaaggtaactacacctcccgggtctgggagtactcctccagcattcagaactctgacaatgacctgcccgtcgtccaaggcagctcctccttctccctgaaaggctatccctccctcatgcggagccaaagccccaaggcccagccccagacttggaaatctggcaagcagactatgctgtctcactaccggccattctacgtcaacaaaggcaacgggattgggtccaacgaagccccatgagctcctggcggaaggaacgaggcgccacacccctgctcttcctcctgaccctgctgctcttgccttctaagctactgtgcttgtctgggtgggagggagcctggtcctgcacctgccctctgcagccctctgccagcctcttgggggcagttccggcctctccgacttccccactggccacactccattcagactcctttcctgccttgtgacctcagatggtcaccatcattcctgtgctcagaggccaacccatcacaggggtgagataggttggggcctgccctaacccgccagcctcctcctctcgggctggatctgggggctagcagtgagtacccgcatggtatcagcctgcctctcccgcccacgccctgctgtctccaggcctatagacgtttctctccaa

SEQ ID NO: 283468 - DNA, 384 bp, Artificial Sequence
  derived and/or modified sequence
atgttatacgtgtacgatcccccaacaactattcccccccccacaaccacgactacaactactacgaccacaaccacgactattctgactatcatcactgatacaaccgccacaacagaacctgccgtgcatgatagcagagccggcgaggagggcagtatccgagcagtcgaccacgccgtgattggaggtgtcgtagcagtggtagtgttcgctatgctgtgcttattaataattctggggcgctatttcgcaagacacaaagggacctactttacccacgaggccaagggcgcagacgacgccgcggatgccgatactgccatcatcaacgcagagggaggccagaacaactctgaggagaagaaggagtactttatctag

SEQ ID NO: 283469 - DNA, 384 bp, Artificial Sequence
  derived and/or modified sequence
atgctgtatgtgtatgacccccccaccaccatccccccacccaccaccaccaccaccaccaccaccaccaccaccaccaccatcctgaccatcatcacagacaccacagccaccacagagcctgctgtgcatgacagccgggccggggaggagggcagcatccgggctgtggaccacgccgtcatcggcggcgtggtggccgtggtggtgtttgccatgctgtgcctgctgatcatcctgggccgctactttgcccggcacaagggcacctacttcacccatgaggccaagggagcagatgatgctgctgatgctgacacagccatcatcaatgctgagggcggccagaacaacagcgaggagaagaaggagtacttcatctag

SEQ ID NO: 283470 - DNA, 384 bp, Artificial Sequence
  derived and/or modified sequence
atgctgtacgtgtacgacccccccaccaccatccccccccccaccaccaccactaccactacgacgaccaccactactacaattttgactattatcaccgacaccaccgctaccacagagccggcagtccacgacagccgcgcaggcgaggagggcagtatcagagccgttgaccacgccgtgatcggtggtgtggtagccgttgtggtatttgcaatgctgtgtctgctgatcattctggggcggtactttgccagacacaaaggcacctactttacccacgaagctaaaggcgctgatgatgccgcagatgccgataccgctatcataaacgcggaaggtggtcagaataattctgaggagaaaaaggagtactttatttag

SEQ ID NO: 283471 - DNA, 384 bp, Artificial Sequence
  derived and/or modified sequence
atgctctacgtgtacgatcccccaacgactattcctcccccaactaccacgacaacaaccaccaccacgactaccacaaccattcttactattatcacggatacaaccgccaccactgaacccgctgtccacgactctcgcgcaggtgaagagggctcgatccgcgcagtggaccacgccgtgatcggaggagtggtcgctgtggttgttttcgccatgctctgtctgctaatcatcctgggcagatatttcgcgagacataagggaacctatttcactcacgaagctaagggcgctgacgacgccgcagacgctgatacagcgattattaacgccgaaggtggtcagaacaattcagaggagaagaaagagtatttcatttag

SEQ ID NO: 283472 - DNA, 384 bp, Artificial Sequence
  derived and/or modified sequence
atgctgtacgtgtacgacccccccaccaccatccccccccccaccaccaccaccaccaccaccaccaccaccaccaccaccatcctgaccatcatcaccgacaccaccgccaccaccgagcccgccgtgcacgacagcagagccggcgaggagggcagcatcagagccgtggaccacgccgtgatcggcggcgtggtggccgtggtggtgttcgccatgctgtgcctgctgatcatcctgggcagatacttcgccagacacaagggcacctacttcacccacgaggccaagggcgccgacgacgccgccgacgccgacaccgccatcatcaacgccgagggcggccagaacaacagcgaggagaagaaggagtacttcatctag

SEQ ID NO: 283473 - protein, 357 aa, Artificial Sequence
  derived and/or modified sequence
MRKAAQLGFGGVYIQTDVGGSGLSRLDTSVIFEALATGCTSTTAYISIHNMCAWMIDSFGNEEQRHKFCPPLCTMEKFASYCLTEPGSGSDAASLLTSAKKQGDHYILNGSKAFISGAGESDIYVVMCRTGGPGPKGISCIVVEKGTPGLSFGKKEKKVGWNSQPTRAVIFEDCAVPVANRIGSEGQGFLIAVRGLNGGRINIASCSLGAAHASVILTRDHLNVRKQFGEPLASNQYLQFTLADMATRLVAARLMVRNAAVALQEERKDAVALCSMAKLFATDECFAICNQALQMHGGYGYLKDYAVQQYVRDSRVHQILEELFWQGPGVQSRSFVPFGGPQIALLLPFSSGDLREG

SEQ ID NO: 283474 - DNA, 1074 bp, Artificial Sequence
  derived and/or modified sequence
atgagaaaggcggcacagttggggtttggaggtgtctacattcaaacagacgtgggggggagtggcttatcgaggcttgacactagcgttatattcgaagcccttgcaactggctgtacatcaaccaccgcctacataagtatccacaatatgtgtgcctggatgattgattcctttggcaatgaggagcagagacataaattctgcccacctctatgcaccatggaaaaattcgcctcatattgcttgacagaacctggctcaggttccgatgccgcttcgcttttgacctcggccaagaagcagggggatcactatattctgaacggctccaaggcctttatctcaggcgcaggagaatcagatatctacgtggtcatgtgcagaaccggaggacccggtccaaagggaatttcatgtatagtcgtggaaaagggtacgcccggtcttagcttcgggaagaaagagaaaaaagtcggttggaactctcagccgacccgcgccgtcatatttgaagactgcgccgtgccagtggccaacaggataggatctgaaggacagggatttttaatcgctgtgcggggtctcaatggaggtaggatcaacatcgcatcctgctctctcggggcggcgcacgcatcagtaatcctgactagggatcatcttaacgttagaaagcaatttggggagccactggcctctaaccaatacttgcagtttactctggctgacatggccacgagattggtcgcagctagattaatggtgaggaatgccgccgtcgctttgcaagaggaaaggaaagacgccgttgctctgtgtagtatggcgaaattgttcgcaacagacgagtgctttgccatttgcaaccaggccctgcagatgcatggagggtatggctacttgaaggattatgcggtgcagcagtacgttcgcgattctagagtccatcaaattctggaggagttgttctggcaagggcccggtgtccagtcccgctcgttcgtccctttcggaggccctcagatcgctctgctgctcccgttctcttccggtgacctcagggaaggatag

SEQ ID NO: 283475 - DNA, 1074 bp, Artificial Sequence
  derived and/or modified sequence
atgaggaaggccgcccagctgggctttggaggagtgtacatccagacagatgtgggcggcagcggcctgagccggctggacaccagcgtcatctttgaggccctggccaccggctgcaccagcaccacagcctacatcagcatccacaacatgtgtgcctggatgattgacagctttggaaatgaggagcagaggcacaagttctgcccccccctgtgcaccatggagaagtttgccagctactgcctgacagagcccggcagcggcagtgatgctgccagcctgctgaccagcgccaagaagcagggcgaccactacatcctgaatggcagcaaggccttcatcagcggggccggggagagtgacatctacgtggtgatgtgcaggactggaggccctggccccaagggcatcagctgcatcgtggtggagaagggcaccccaggcctgagctttgggaagaaggagaagaaggtgggctggaacagccagcccacccgggccgtcatctttgaggactgtgctgtgcctgtggccaaccgcatcggcagcgagggccagggcttcctgattgctgtgcggggcctgaatggaggccgcatcaacatcgccagctgcagcctgggcgccgcccacgccagcgtcatcctgacccgggaccacctgaatgtgaggaagcagtttggagagcccctggccagcaaccagtacctgcagttcaccctggccgacatggccacccggctggtggccgcccggctgatggtgagaaatgctgctgtggccctgcaggaggagaggaaggatgctgtggccctgtgcagcatggccaagctgtttgccacagatgagtgctttgccatctgcaaccaggccctgcagatgcacggcggctacggctacctgaaggactatgctgtgcagcagtatgtgcgggacagccgggtgcaccagatcctggaggagctgttctggcagggccctggggtgcagagccgcagctttgtgccctttggaggcccccagatcgccctgctgctgcccttcagcagcggggacctgcgggagggctag

SEQ ID NO: 283476 - DNA, 1074 bp, Artificial Sequence
  derived and/or modified sequence
atgcggaaggccgcccagctgggcttcggcggcgtgtacatccagactgatgtagggggtagcgggctttcccgactggacacatccgttattttcgaggcgctcgccactgggtgtacctcaacaacggcttatattagcatccacaatatgtgtgcctggatgattgactcctttgggaacgaggaacagcgccacaagttttgtcccccattgtgtacaatggagaagttcgcatcatactgcctgacagaacctgggtctggctcggatgcagcatctttgctgacatctgctaagaagcaaggagatcactacatccttaacgggtcaaaggcctttatcagtggagctggcgagagtgacatctatgtggtgatgtgtcggacggggggccccggaccaaaggggatctcctgcatcgtagtggaaaaggggactccaggactgagcttcggcaaaaaggaaaaaaaggtgggctggaacagtcaacctactagagctgtgatctttgaggactgcgccgtccccgtggccaaccgaattggctcagagggccagggattcctgatagccgtgcgaggcctaaacggaggacggataaacatcgcgtcatgctctctcggagccgcccacgcatcagtcattcttacgcgcgaccacctgaatgtgcgaaaacagttcggcgaacccttagcttctaaccagtacctgcagtttaccctggccgatatggccaccaggttggtggctgctcgactgatggtccgaaacgccgctgtggctctgcaagaagagcgcaaagatgcagtagccttatgcagcatggcaaaactgttcgcgactgacgagtgctttgctatttgtaaccaggctttacaaatgcacggcgggtatggctacctgaaagactatgccgtgcagcagtacgtgagagacagtcgcgtgcaccaaatcctcgaggaactgttctggcagggtcctggggtgcagagccgaagctttgttcctttcgggggcccccagattgcattgctattgccatttagcagtggagatctgagagagggctag

SEQ ID NO: 283477 - DNA, 1074 bp, Artificial Sequence
  derived and/or modified sequence
atgcgaaaagcagcccagttgggatttgggggagtatacatccaaactgatgtggggggttcaggtctgtcccgacttgacacctcggtcatcttcgaggcactggccacaggctgcacctccaccaccgcctacatctctatccacaatatgtgcgcctggatgatcgacagttttggcaatgaagagcagcgacacaaattctgtcctccgctgtgcaccatggagaaattcgcatcctattgcctaaccgagcccggaagcggctctgatgcagcctcccttttgactagcgctaaaaagcagggcgatcattacatcttgaatgggagtaaagctttcattagcggtgcaggagagtctgacatctatgtagtgatgtgtaggaccgggggtccgggtcctaagggcatttcctgcattgtggtggagaaaggtacccctgggctctcttttggaaagaaagagaagaaggttggatggaatagccagccaactcgcgcagtcatcttcgaggactgtgcagtcccagtggccaaccggatcggctccgaaggtcaggggttcctgatagcggtgcgtgggctcaatgggggacgaatcaatattgcttcctgcagtttaggcgcagctcacgcctctgtcatcctgaccagagatcaccttaacgtcagaaaacagttcggagagccgctggcttccaatcagtatttacagtttaccctcgctgatatggccaccagactggtggcagcccgattgatggtgagaaatgccgctgttgctctacaagaggagagaaaagatgccgtagcgctgtgtagcatggctaagctatttgcaaccgacgagtgttttgccatatgcaatcaggcattacagatgcacgggggttacggctatctgaaggattacgctgtgcagcagtatgtccgtgacagccgggtccatcagattctggaggaactgttctggcaaggccctggggttcaaagccgcagttttgttcctttcggcggtcctcaaatcgcactcctgttaccatttagttcgggcgatctgagggaggggtag

SEQ ID NO: 283478 - DNA, 1074 bp, Artificial Sequence
  derived and/or modified sequence
atgagaaaggccgcccagctgggcttcggcggcgtgtacatccagaccgacgtgggcggcagcggcctgagcagactggacaccagcgtgatcttcgaggccctggccaccggctgcaccagcaccaccgcctacatcagcatccacaacatgtgcgcctggatgatcgacagcttcggcaacgaggagcagagacacaagttctgcccccccctgtgcaccatggagaagttcgccagctactgcctgaccgagcccggcagcggcagcgacgccgccagcctgctgaccagcgccaagaagcagggcgaccactacatcctgaacggcagcaaggccttcatcagcggcgccggcgagagcgacatctacgtggtgatgtgcagaaccggcggccccggccccaagggcatcagctgcatcgtggtggagaagggcacccccggcctgagcttcggcaagaaggagaagaaggtgggctggaacagccagcccaccagagccgtgatcttcgaggactgcgccgtgcccgtggccaacagaatcggcagcgagggccagggcttcctgatcgccgtgagaggcctgaacggcggcagaatcaacatcgccagctgcagcctgggcgccgcccacgccagcgtgatcctgaccagagaccacctgaacgtgagaaagcagttcggcgagcccctggccagcaaccagtacctgcagttcaccctggccgacatggccaccagactggtggccgccagactgatggtgagaaacgccgccgtggccctgcaggaggagagaaaggacgccgtggccctgtgcagcatggccaagctgttcgccaccgacgagtgcttcgccatctgcaaccaggccctgcagatgcacggcggctacggctacctgaaggactacgccgtgcagcagtacgtgagagacagcagagtgcaccagatcctggaggagctgttctggcagggccccggcgtgcagagcagaagcttcgtgcccttcggcggcccccagatcgccctgctgctgcccttcagcagcggcgacctgagagagggctag

SEQ ID NO: 283479 - DNA, 1336 bp, Artificial Sequence
  derived and/or modified sequence
aacggaggtcgaaggcgttcagactcttagctgaacgcggagctgcggcggctatgctgtggagcggctgccggcgtttcggggcgcgcctcggctgcctgcccggcggtctccgggtcctcgtccagaccggccaccggagcttgacctcctgcatcgaccgagctgttcccagtggatgtgatgcggaaggcagcccagctaggcttcggaggggtctacatacaaacagatgtgggcgggtctgggctgtcacgtcttgatacctctgtcatttttgaagccttggctacaggctgcaccagcaccacagcctatataagcatccacaacatgtgtgcctggatgattgatagcttcggaaatgaggaacagaggcacaaattttgcccaccgctctgtaccatggagaagtttgcttcctactgcctcactgaaccaggaagtgggagtgatgctgcctctcttctgacctccgctaagaaacagggagatcattacatcctcaatggctccaaggccttcatcagtggtgctggtgagtcagacatctatgtggtcatgtgccgaacaggaggaccaggccccaagggcatctcatgcatagttgttgagaaggggacccctggcctcagctttggcaagaaggagaaaaaggtggggtggaactcccagccaacacgagctgtgatcttcgaagactgtgctgtccctgtggccaacagaattgggagcgaggggcagggcttcctcattgccgtgagaggactgaacggagggaggatcaatattgcttcctgctccctgggggctgcccacgcctctgtcatcctcacccgagaccacctcaatgtccggaagcagtttggagagcctctggccagtaaccagtacttgcaattcacactggctgatatggcaacaaggctggtggccgcgcggctgatggtccgcaatgcagcagtggctctgcaggaggagaggaaggatgcagtggccttgtgctccatggccaagctctttgctacagatgaatgctttgccatctgcaaccaggccttgcagatgcacgggggctacggctacctgaaggattacgctgttcagcagtacgtgcgggactccagggtccaccagattctagaagagctgttctggcaggggcctggagtccagagccgcagcttcgtccctttcggggggcctcagatcgctctgctgctgcccttttcctctggagatctgcgagaagggtgaactgagataatggatgagaaagcatgttgaaaaccacagccggggcttttctctaaggttatcgagtacgtggttctca

SEQ ID NO: 283480 - DNA, 2444 bp, Artificial Sequence
  derived and/or modified sequence
tgaggattatttccagacagattgtcttgttattttctggattttggggactcgccatgggagcctttccgagcagcgtgcaaataggtggtctcttcatccgaaacacagatcaggaatacactgcttttcgattagcaatttttcttcataacaccagccccaatgcgtcggaagctccttttaatttggtacctcatgtggacaacattgagacagccaacagttttgctgtaacaaacgccttctgttcccagtattctagaggagtatttgccatttttggactctatgataagaggtcggtacataccttgacctcattctgcagcgccttacatatctccctcatcacaccaagtttccctactgagggggagagccagtttgtgctgcaactaagaccttcgttacgaggagcactcttgagtttgctggatcactacgaatggaactgttttgtcttcctgtatgacacagacaggggatactcgatactccaagctattatggaaaaagcaggacaaaatggttggcatgtcagcgctatatgtgtggaaaattttaatgatgtcagctataggcaacttctagaagaacttgacagaagacaagagaagaagtttgtaatagactgtgagatagagagacttcaaaacatattagaacagattgtaagtgttggaaagcatgttaaaggctaccattatatcattgcaaacttgggattcaaggatatttctcttgagaggtttatacatggtggagccaatgttactggattccagttggtggattttaatacacctatggtaatcaaactaatggatcgctggaagaaactagatcagagagagtatccaggatctgagactcctccaaagtacacctctgctctgacttatgatggagtccttgtgatggctgaaactttccgaagtcttaggaggcagaaaattgatatctcaaggagaggaaatgctggggattgtctggcaaatcctgctgctccatggggccagggaattgacatggagaggacactcaaacaggttcgaattcaagggctgacagggaatgttcagtttgaccactatggacgtagagtcaattacacaatggatgtgtttgagctgaaaagcacaggacctagaaaggttggttactggaatgatatggataagttagtcttgattcaagatgtaccaactcttggcaatgacacagctgctattgagaacagaacagtggttgtaaccacaattatggaatccccatatgttatgtacaagaaaaatcatgaaatgtttgaaggaaatgacaagtatgaaggatactgtgtagatttggcatctgaaattgcaaaacatattggtatcaagtataaaattgccattgtccctgatggaaaatatggagcaagggatgcagacacaaaaatctggaatgggatggtaggagaacttgtttatgggaaagcagagattgctattgcccctctgacaatcactttggtacgagaggaggtcattgacttttctaagcccttcatgagtttgggcatatctatcatgatcaaaaagcctcagaaatccaaaccaggagtgttttccttcttggatcctctggcctatgagatttggatgtgcatagtctttgcctacattggtgtcagcgtggtcttattcctagttagtagatttagtccatatgagtggcacacagaagagccagaggacggaaaggaaggacccagcgaccagcctcccaatgagtttggcatctttaacagcctctggttttccctgggtgcttttatgcagcaaggatgtgacatttcacccagatccctctcaggtcgaattgttggaggtgtttggtggttctttacactcatcattatatcatcttatactgctaacctcgctgctttcctgacggttgagcgaatggtctctcccatagaaagtgcagaagacctggccaaacaaacagaaattgcctatggaacactggattcaggatcaacaaaagaattcttcagaagatcaaaaatagcagtgtatgaaaagatgtggacctacatgcgatcagcagagccatcagtattcactaggactacagctgagggagtagctcgtgtccgcaaatccaagggcaaatttgcctttctcctggagtccactatgaatgaatacattgagcagcgaaagccatgtgacacgatgaaagtgggaggaaatctggattccaaaggctatggagtagcaacgcccaagggttcctcattaagaaatgctgttaacctcgcagttttaaaactgaatgaacaaggcctcttggacaaattgaaaaacaaatggtggtacgacaaaggagaatgtggcagcgggggaggtgactccaagaactcctgtaaaccttgccgttttgaaactcagtga

SEQ ID NO: 283481 - protein, 225 aa, Artificial Sequence
  derived and/or modified sequence
MSRPRKRLAGTSGSDKGLSGKRTKTENSGEALAKVEDSNPQKTSATKNCLKNLSSHWLMKSEPESRLEKGVDVKFSIEDLKAQPKQTTCWDGVRNYQARNFLRAMKLGEEAFFYHSNCKEPGIAGLMKIVKEAYPDHTQFEKNNPHYDPSSKEDNPKWSMVDVQFVRMMKRFIPLAELKSYHQAHKATGGPLKNMVLFTRQRLSIQPLTQEEFDFVLSLEEKEPS

SEQ ID NO: 283482 - DNA, 1299 bp, Artificial Sequence
  derived and/or modified sequence
tgcggcgcagcggaggcggaccgcagtcgagtctgcagagtgttgggtctgtagccagcaaattacttcatcatctagattatccattcagttgatcctaattagcaaggataacaaggtaacacaaggcttacttatattcacccaacaaaagtgtctctgtggagccacttcccagtgaactacatactgagataggggttcctggatgagaaggaccaaggacagaaccgagaagagtttaggggcaggttatgcgagatggaaatggcgcagataacggagggaaggatttgagggctcaaacgtaggcgtctgtgtttcgcaaaagttggagacgttctaggctgcctctcgttgcctccatctcgctctgcgcgggttttggaggacattagcattctttcttgtatctccgttgattccagaatcgtccgcactaaagtcccctgcagcgtgaccatgtcgagaccccggaagaggctggctgggacttctggttcagacaagggactatcaggaaaacgcaccaaaactgagaactcaggtgaggcattagctaaagtggaggactccaaccctcagaagacttcagccactaaaaactgtttgaagaatctaagcagccactggctgatgaagtcagagccagagagccgcctagagaaaggtgtagatgtgaagttcagcattgaggatctcaaagcacagcccaaacagacaacatgctgggatggtgttcgtaactaccaggctcggaacttccttagagccatgaagctgggagaagaagccttcttctaccatagcaactgcaaagagccaggcatcgcaggactcatgaagatcgtgaaagaggcttacccagaccacacacagtttgagaaaaacaatccccattatgacccatctagcaaagaggacaaccctaagtggtccatggtggatgtacagtttgttcggatgatgaaacgtttcattcccctggctgagctcaaatcctatcatcaagctcacaaagctactggtggccccttaaaaaatatggttctcttcactcgccagagattatcaatccagcccctgacccaggaagagtttgattttgttttgagcctggaggaaaaggaaccaagttaactgagatactgctgctggaatgggcgagacattgctgcaaagaagtcaagcttttttcagacaaaaggtgtgagggggcttgcttggtatgcttacctgggcttgtgtacctcagtggtttttgtgtacttttttcaataaaatatcaaagttgaagaa

SEQ ID NO: 283483 - DNA, 943 bp, Artificial Sequence
  derived and/or modified sequence
cgccgcgggggtcgcgctgcacagcctgcggcgcagcggaggcggaccgcagtcgagtctgcagagtgttggaatcgtccgcactaaagtcccctgcagcgtgaccatgtcgagaccccggaagaggctggctgggacttctggttcagacaagggactatcaggaaaacgcaccaaaactgagaactcaggtgaggcattagctaaagtggaggactccaaccctcagaagacttcagccactaaaaactgtttgaagaatctaagcagccactggctgatgaagtcagagccagagagccgcctagagaaaggtgtagatgtgaagttcagcattgaggatctcaaagcacagcccaaacagacaacatgctgggatggtgttcgtaactaccaggctcggaacttccttagagccatgaagctgggagaagaagccttcttctaccatagcaactgcaaagagccaggcatcgcaggactcatgaagatcgtgaaagaggcttacccagaccacacacagtttgagaaaaacaatccccattatgacccatctagcaaagaggacaaccctaagtggtccatggtggatgtacagtttgttcggatgatgaaacgtttcattcccctggctgagctcaaatcctatcatcaagctcacaaagctactggtggccccttaaaaaatatggttctcttcactcgccagagattatcaatccagcccctgacccaggaagagtttgattttgttttgagcctggaggaaaaggaaccaagttaactgagatactgctgctggaatgggcgagacattgctgcaaagaagtcaagcttttttcagacaaaaggtgtgagggggcttgcttggtatgcttacctgggcttgtgtacctcagtggtttttgtgtacttttttcaataaaatatcaaagttgaagaa

SEQ ID NO: 283484 - DNA, 893 bp, Artificial Sequence
  derived and/or modified sequence
cctaattagcaaggataacaagaatcgtccgcactaaagtcccctgcagcgtgaccatgtcgagaccccggaagaggctggctgggacttctggttcagacaagggactatcaggaaaacgcaccaaaactgagaactcaggtgaggcattagctaaagtggaggactccaaccctcagaagacttcagccactaaaaactgtttgaagaatctaagcagccactggctgatgaagtcagagccagagagccgcctagagaaaggtgtagatgtgaagttcagcattgaggatctcaaagcacagcccaaacagacaacatgctgggatggtgttcgtaactaccaggctcggaacttccttagagccatgaagctgggagaagaagccttcttctaccatagcaactgcaaagagccaggcatcgcaggactcatgaagatcgtgaaagaggcttacccagaccacacacagtttgagaaaaacaatccccattatgacccatctagcaaagaggacaaccctaagtggtccatggtggatgtacagtttgttcggatgatgaaacgtttcattcccctggctgagctcaaatcctatcatcaagctcacaaagctactggtggccccttaaaaaatatggttctcttcactcgccagagattatcaatccagcccctgacccaggaagagtttgattttgttttgagcctggaggaaaaggaaccaagttaactgagatactgctgctggaatgggcgagacattgctgcaaagaagtcaagcttttttcagacaaaaggtgtgagggggcttgcttggtatgcttacctgggcttgtgtacctcagtggtttttgtgtacttttttcaataaaatatcaaagttgaagaa

SEQ ID NO: 283485 - protein, 166 aa, Artificial Sequence
  derived and/or modified sequence
MSRPRKRLAGTSGSDKGLSGKRTKTENSGEALAKVEDSNPQKTSATKNCLKNLSSHWLMKSEPESRLEKGVDVKFSIEDLKAQPKQTTCWDGVRNYQARNFLRAMKLGEEAFFYHSNCKEPGIAGLMKIVKEAYPDHTQFEKNNPHYDPSSKEDNPKWSMKSLILF

SEQ ID NO: 283486 - DNA, 835 bp, Artificial Sequence
  derived and/or modified sequence
acagcctgcggcgcagcggaggcggaccgcagtcgagtctgcagagtgttgggtctgtagccagcaaattacttcatcatctagattatccattcagttgatcctaattagcaaggataacaagaatcgtccgcactaaagtcccctgcagcgtgaccatgtcgagaccccggaagaggctggctgggacttctggttcagacaagggactatcaggaaaacgcaccaaaactgagaactcaggtgaggcattagctaaagtggaggactccaaccctcagaagacttcagccactaaaaactgtttgaagaatctaagcagccactggctgatgaagtcagagccagagagccgcctagagaaaggtgtagatgtgaagttcagcattgaggatctcaaagcacagcccaaacagacaacatgctgggatggtgttcgtaactaccaggctcggaacttccttagagccatgaagctgggagaagaagccttcttctaccatagcaactgcaaagagccaggcatcgcaggactcatgaagatcgtgaaagaggcttacccagaccacacacagtttgagaaaaacaatccccattatgacccatctagcaaagaggacaaccctaagtggtccatgaagagtttgattttgttttgagcctggaggaaaaggaaccaagttaactgagatactgctgctggaatgggcgagacattgctgcaaagaagtcaagcttttttcagacaaaaggtgtgagggggcttgcttggtatgcttacctgggcttgtgtacctcagtggtttttgtgtacttttttcaataaaatatcaaa

SEQ ID NO: 283487 - DNA, 1035 bp, Artificial Sequence
  derived and/or modified sequence
atgagagtgatcagagtgggcaccagaaagagccagctggccagaatccagaccgacagcgtggtggccaccctgaaggccagctaccccggcctgcagttcgagatcatcgccatgagcaccaccggcgacaagatcctggacaccgccctgagcaagatcggcgagaagagcctgttcaccaaggagctggagcacgccctggagaagaacgaggtggacctggtggtgcacagcctgaaggacctgcccaccgtgctgccccccggcttcaccatcggcgccatctgcaagagagagaacccccacgacgccgtggtgttccaccccaagttcgtgggcaagaccctggagaccctgcccgagaagagcgtggtgggcaccagcagcctgagaagagccgcccagctgcagagaaagttcccccacctggagttcagaagcatcagaggcaacctgaacaccagactgagaaagctggacgagcagcaggagttcagcgccatcatcctggccaccgccggcctgcagagaatgggctggcacaacagagtgggccagatcctgcaccccgaggagtgcatgtacgccgtgggccagggcgccctgggcgtggaggtgagagccaaggaccaggacatcctggacctggtgggcgtgctgcacgaccccgagaccctgctgagatgcatcgccgagagagccttcctgagacacctggagggcggctgcagcgtgcccgtggccgtgcacaccgccatgaaggacggccagctgtacctgaccggcggcgtgtggagcctggacggcagcgacagcatccaggagaccatgcaggccaccatccacgtgcccgcccagcacgaggacggccccgaggacgacccccagctggtgggcatcaccgccagaaacatccccagaggcccccagctggccgcccagaacctgggcatcagcctggccaacctgctgctgagcaagggcgccaagaacatcctggacgtggccagacagctgaacgacgcccactag

SEQ ID NO: 283488 - DNA, 1035 bp, Artificial Sequence
  derived and/or modified sequence
atgcgtgtcattagagtggggaccaggaagtctcagctcgcacggatacaaacagactcagtggtcgccactctcaaggcttcctacccaggtttgcagtttgagatcatagcgatgtctactacgggcgacaaaatactggatacagctttaagcaagattggcgaaaagtcactttttaccaaagagctggaacatgcgctggagaaaaacgaagtggacctcgtcgtccatagtctgaaagatctgcctaccgtcctcccacccggttttactatcggtgcaatatgtaagcgggagaacccacatgatgctgtagtgtttcacccgaaattcgttgggaagacgctggaaacactgcctgagaaatcagtggttggtacgagctcccttcgaagagccgctcaactgcaacgtaaattccctcatctggaattccgttcaatccgcgggaaccttaatacccgtctccgcaaactggatgaacaacaggagttttccgccataattctggctaccgctggcctgcagagaatggggtggcataacagggtagggcagatcctgcatccagaggagtgcatgtacgccgtgggacagggggctctgggcgtagaagtgagggccaaggatcaagacatcctggaccttgtcggagtcctccatgaccccgaaacactgttgcgctgcattgccgagcgagccttcctacggcatctggaagggggatgctcagtcccagtcgcagtgcacacagcgatgaaagacggccagctctacttaaccggcggggtgtggtcccttgatggcagcgactctatccaggagaccatgcaggcgactatccatgtgccggcacagcacgaggacggacccgaggacgatcctcagcttgttggtataactgcacgcaacatcccacgcgggccccagttagccgctcagaacctaggaattagcctggccaacctgctgcttagcaagggtgccaaaaatattctcgatgtggctcggcagctgaatgatgcacactag

SEQ ID NO: 283489 - DNA, 1035 bp, Artificial Sequence
  derived and/or modified sequence
atgagggtcatccgggtgggcaccaggaagagccagctggcccgcatccagacagacagcgtggtggccaccctgaaggccagctacccaggcctgcagtttgagatcatcgccatgagcaccaccggggacaagatcctggacacagccctgagcaagatcggggagaagagcctcttcaccaaggagctggagcacgccctggagaagaatgaggtggacctggtggtgcacagcctgaaggacctgcccaccgtgctgcccccaggcttcaccatcggggccatctgcaagcgggagaacccccatgatgctgtggtgttccaccccaagtttgtgggcaagaccctggagaccctgcctgagaagtctgtggtgggcaccagcagcctgcggcgggccgcccagctgcagaggaagttcccccacctggagttccgcagcatccggggcaacctgaacacccggctgaggaagctggatgagcagcaggagttcagcgccatcatcctggccacagctggcctgcagaggatgggctggcacaacagagtgggccagatcctgcaccctgaggagtgcatgtatgctgtgggccagggcgccctgggcgtggaggtgcgggccaaggaccaggacatcctggacctggtgggcgtgctgcatgaccctgagaccctgctgcgctgcatcgccgagcgggccttcctgcggcacctggagggcggctgcagcgtgcctgtggccgtgcacacagccatgaaggatggccagctgtacctgaccggcggcgtgtggagcctggatggcagtgacagcatccaggagaccatgcaggccaccatccacgtgcctgcccagcatgaagatggcccagaagatgacccccagctggtgggcatcacagccaggaacatcccccggggcccccagctggccgcccagaacctgggcatcagcctggccaacctgctgctgagcaagggggccaagaacatcctggatgtggcccggcagctgaatgatgcccactag

SEQ ID NO: 283490 - DNA, 1035 bp, Artificial Sequence
  derived and/or modified sequence
atgcgggtgatccgggtgggcacccggaagagccagctggcccggattcaaacggattccgtggtagctacactgaaagcatcttaccccggcttgcagtttgagataatcgctatgtccacaaccggggataaaatcttagacacagctctgagcaaaattggagagaagtccttgttcacaaaagaacttgaacatgccctggaaaagaatgaagtggacctggtagtgcacagtctgaaagaccttcccacagtgctgcctccaggctttactattggggcaatctgcaagagggagaatccacacgatgccgtcgtcttccaccccaagttcgtcggcaagactctcgaaacactccctgagaaatctgtcgtaggcacgtcaagccttcggcgggctgcccagttgcagcgaaaattcccgcacctggagtttcgctcaatacgcgggaatttaaacactcggctgcggaagctggatgagcagcaagaattctctgcaatcattttggctactgcaggcctgcagcgtatgggatggcacaatagggtgggacagattctccaccctgaagaatgtatgtatgcagtgggacagggggcccttggagtggaagttagggccaaagaccaggatatcctcgatctagtgggcgttttgcatgaccctgaaaccctgcttcggtgcattgcggaacgggcctttctgaggcaccttgagggcggttgtagtgtcccagtagcggtgcacaccgccatgaaggacgggcagctttacttaacaggcggtgtttggtccttggacgggtccgactccattcaggaaaccatgcaggcaaccatacacgtgcccgcccagcacgaagatggaccagaggatgatccacagcttgtgggcatcacggcccgaaatattccaaggggcccacagcttgctgcacagaacctgggcatctcattagcgaatctcctgctgagcaaaggcgcaaagaatatcttggacgtggctaggcagctgaacgacgctcactag

SEQ ID NO: 283491 - DNA, 1035 bp, Artificial Sequence
  derived and/or modified sequence
atgagggtcataagggttggcaccagaaagtcccagctggccagaatccagaccgactccgttgtcgctactttgaaagcgtcatatccgggtctccagtttgagatcatagctatgtccaccaccggagataagatactggacaccgctctgagcaagattggagagaagagcttgttcaccaaagagctcgaacatgctcttgaaaagaacgaggttgatctcgttgtgcactcattaaaagacctgccgacagttctaccgcctggctttaccattggggctatttgcaagcgcgagaatccacacgacgctgtcgttttccacccgaagttcgtcggcaaaaccctggaaacactgccagagaaatctgtggtgggcacctctagcctccggagagcggctcaactgcagcgtaagttccctcacctggagttccggagtatccgaggcaatctgaacacgagactgcgtaaactggacgagcagcaagagttcagtgccatcattttagcaacagcaggactgcagcgtatgggatggcacaaccgggtggggcagatactgcaccccgaggaatgcatgtacgcggtaggccagggagctctgggtgtggaggtgagggctaaagaccaggacattctggaccttgtcggtgtgctgcatgatcccgaaacactgctgagatgtatcgctgaacgggcttttctcagacatcttgaggggggttgtagcgtgccagtcgctgtgcacactgcgatgaaagacggccagttatacctgactgggggagtttggtccttagatggcagcgactccatccaggaaacgatgcaggccacaattcacgtgcctgcacagcatgaggacggacccgaagacgaccctcaactcgtagggatcaccgccaggaatatacccaggggcccacagctcgctgcccagaatctagggatcagcctagccaacctcttattgagtaaaggggcaaagaatatcctcgacgttgcccgtcagttgaacgacgcacactag

SEQ ID NO: 283492 - DNA, 1035 bp, Artificial Sequence
  derived and/or modified sequence
atgcgggttattagagttggcacccgcaagtcgcagcttgccaggattcaaaccgattctgtggtggctaccctcaaagctagttaccccggcctgcagtttgagattatagcaatgtcaacaacaggggacaagatcctggacaccgctctttctaagattggggaaaagtcattgtttacaaaggaactggagcatgccttagagaagaatgaggtggatctcgtagtccatagcctcaaagacctgcctactgtgctgcctcccggcttcaccatcggcgctatttgcaaacgcgaaaacccacacgatgcagtcgtgtttcaccccaagtttgtggggaagacactcgagacattaccagaaaaaagcgtagtaggaacatcaagccttcgaagagccgcacagctgcagcggaagtttccccatcttgagtttcggagtattcgtgggaatcttaataccagactgcggaagctggacgaacagcaagagttctcagccatcatacttgccactgccgggcttcagagaatgggatggcacaatagagtgggccagattctgcaccctgaagagtgtatgtacgcagtcggtcagggagcccttggcgtggaagtccgggccaaggaccaagatattctggacctggtcggcgttctgcacgacccagagactttactgagatgtatcgctgaacgcgcttttctgagacacttagagggcggctgcagcgttccggtggccgttcataccgccatgaaagacggacagctgtaccttactgggggcgtgtggagtttagacgggagcgattcaatccaggagaccatgcaagcaacaatccatgtgcccgctcagcacgaagacggacctgaggacgatcctcagctagtgggtattaccgcacgcaatatcccaagaggcccccagctggccgctcagaatctgggaatttcgctcgccaacttgttattgtccaaaggtgccaaaaacatcttggacgtcgctagacagctcaacgatgcccactag

SEQ ID NO: 283493 - DNA, 1035 bp, Artificial Sequence
  derived and/or modified sequence
atgcgtgtgatccgcgtcgggacgcgtaaatcacagttggcgcgcatacagaccgacagcgtggtggctacactgaaggctagttacccaggactccaatttgagattatcgccatgagtaccaccggagataaaatattggataccgccttgagcaagattggagaaaagagcctgttcactaaagaacttgagcacgctctggagaaaaatgaggtggatcttgtggttcattcgctcaaagaccttcccaccgtactgccgcctggatttacaattggagctatctgcaagcgcgaaaatccgcatgacgccgtggtttttcaccccaagttcgtaggtaaaaccctcgagacattaccagagaaatcagtggtgggaactagctcactgcggagagcagctcaactgcagcgaaagtttcctcacctcgaatttcgcagcatcagggggaatctgaacacacgcttgcgtaaactcgacgagcaacaggagttctccgcaatcattctggcaactgctgggctccaaaggatgggctggcacaacagggtgggacaaatattgcatcccgaggaatgcatgtatgcggttgggcagggagccctgggcgtggaggtgcgggctaaggaccaggacatattagatctggtaggagtcctccatgacccagagaccctcctgaggtgtattgcagaaagggcgtttctccgtcacctggagggaggatgcagcgtgcctgtggcggtgcacaccgcgatgaaagacggtcaactttacttaaccggcggggtgtggagcctggatggatctgatagtatccaggaaactatgcaagcaacgattcacgtcccggcgcaacatgaggatggacccgaagatgatccgcagcttgtgggcataacagcccgcaatatcccccgtggcccccagctggccgcccaaaatctgggcatcagcctcgcaaacttactgttgtctaaaggagccaagaatattctggacgtggctagacaactgaatgatgctcactag

SEQ ID NO: 283494 - DNA, 1035 bp, Artificial Sequence
  derived and/or modified sequence
atgcgggtcatacgcgtcggaaccaggaaatctcaattggcccgaattcagaccgactctgttgttgctacactaaaggcgagttatcccgggctgcagttcgaaatcatcgccatgtcaactaccggcgataagattctggacactgcactgtccaagattggtgaaaagtcactgtttacaaaagagcttgaacacgcattggaaaaaaacgaagtggacctggtagttcactcactgaaggatctccctactgtgctaccgcccggtttcacaattggagccatttgcaagagggagaatccacacgacgccgtggtttttcaccctaagttcgttggcaagaccctggagacactgcctgaaaaatcagtggtgggaacctcgtctttgcgacgcgcggctcaactgcaacgaaaattcccccacctggaattccggagcatacgaggcaacctcaataccagactccgtaaactggacgagcagcaagaattctccgcgatcatcctcgcgacagctggcttacaacgtatggggtggcacaatagagtgggccaaatcctccaccccgaggagtgtatgtacgcagtgggccaaggggctctgggtgtggaggtacgagctaaggaccaggatattttggatctggtcggcgtgcttcacgatcccgaaaccctactccgctgcattgctgagagggctttccttaggcacctggaaggagggtgttccgttccagtggcagtgcacacagccatgaaggatggtcaattgtacctgactgggggagtgtggtcgttggacggatccgactcaatacaggagactatgcaggccactatccacgtgcccgcacagcatgaggacggtccagaggatgatcctcagttggtgggtatcacggcgcggaacatccctaggggccctcaactggccgctcagaacctggggatctctctggccaacctgctgttatccaagggggccaaaaatatcctcgacgtcgcccgtcagctgaatgacgctcattag

SEQ ID NO: 283495 - DNA, 1035 bp, Artificial Sequence
  derived and/or modified sequence
atgcgggtgatccgggtgggcacccggaagagccagctggcccggattcaaacggatagcgtggttgcaactttgaaggccagttaccccggcttgcagttcgagattattgccatgagcacaaccggcgacaagattctggatactgccctgtccaagattggagaaaaaagcctcttcacgaaggagctcgagcacgctctggagaagaatgaggtggatcttgttgtgcactctttgaaggatctacctacggtgctgccccccggttttacgattggagccatctgtaagcgagagaatcctcacgacgctgtggtctttcatccaaaattcgtggggaagacattagagaccttacctgaaaagagcgtggtgggaacttctagtctgcgccgcgccgctcagctgcaacgaaagtttccccacctggaatttagatctattagggggaacctgaataccagactgcgtaagttagacgagcagcaggaattttcagcaataattctcgctaccgcggggctgcagagaatgggatggcacaatagggtcggccaaatcctgcaccccgaggagtgcatgtacgctgttggccagggagccctaggtgtggaggttcgggccaaagatcaggatattcttgatctggtcggggtgctgcatgatccagagaccctgctgcgttgcatcgctgagcgagcgttcctacggcacctggaaggaggctgctctgtcccagtggctgtccacaccgccatgaaggacggacaactatacctgactgggggcgtgtggtctctcgatggcagtgattctattcaagagactatgcaagccacgatccatgtaccagcccaacatgaagacggtcccgaggacgatcctcagctcgtgggtataacggcccgcaatataccacggggaccccaacttgcggcccagaaccttgggatatctttggcaaatcttttgttaagtaaaggtgcaaagaacattctggacgtggctagacaactgaatgatgcacactag

SEQ ID NO: 283496 - DNA, 1035 bp, Artificial Sequence
  derived and/or modified sequence
atgcgggtgatccgggtgggcacccggaagagccagctggcccggatccaaacagattcagtagtggctacactgaaggctagctatcccgggcttcaattcgaaataattgctatgagcacaactggagacaagatccttgacactgcactgtccaagatcggcgagaaatccttattcaccaaagaactggaacatgctttggaaaaaaatgaagttgacctggtggtgcacagcctcaaggacttgcccacagtgttgccccccgggtttactatcggcgctatctgtaagagagagaatcctcatgacgcggtcgtgttccaccctaagttcgtcggcaaaacactggagacgctccctgagaagtctgtggttgggacatcaagtttgagacgggcggctcagctccaacgaaagttcccgcatttggagttcaggtcaatacggggcaatctgaacacccgactccgcaaactggacgagcaacaggaattcagtgctatcattttggccactgcaggcctccagcgaatgggatggcacaaccgcgtcggacaaatcctccaccccgaggagtgcatgtacgccgtggggcagggggccctaggcgtagaggtccgggcgaaggaccaggacatcctggacctcgtcggagtcctgcacgatccggagacactgctaaggtgcattgctgagcgggcatttttgagacacctggaggggggctgttctgttcctgtcgccgttcacacggccatgaaggacggccagttataccttacaggcggcgtctggtcgctcgatgggtccgattcaattcaggagacgatgcaggctactatacacgtgccggcgcaacacgaagacggtcccgaagacgaccctcagctggtgggcatcactgccaggaacattcctcggggaccccagctagcagcacaaaacctgggcatctccctggctaatctgctgctgtccaaaggcgcaaaaaacatcctcgacgtagcccgtcagctgaatgatgcccattag

SEQ ID NO: 283497 - DNA, 1035 bp, Artificial Sequence
  derived and/or modified sequence
atgcgggtgatccgggtgggcacccggaagagccagctggcccggatccaaaccgatagtgtagtcgccacgctgaaagcttcttatcctgggctgcagttcgagataattgcgatgagcactactggggataaaatcctagataccgctttgtcaaagatcggagagaaaagcttgttcaccaaagagcttgagcatgctctggagaagaatgaggtcgatcttgtcgtgcattctctgaaggacctgcccactgttctcccccctggattcacaattggggccatatgtaagagagagaaccctcacgacgccgtggttttccatccaaagtttgtggggaagacccttgagacactgcccgaaaagagtgtggtcggaaccagctcactgcgccgcgcggcccagctgcagagaaagttcccccacttagagttccgctctataaggggcaacctaaacacacgtttgaggaagcttgatgaacaacaggaatttagcgccattatacttgctacagcggggttgcaacgaatgggctggcacaaccgggtagggcagatcctgcaccctgaagaatgtatgtacgcagttggtcagggtgcattaggggtcgaggtaagagctaaggatcaggatattttggatctggtaggcgttctgcacgacccagaaacactgttaagatgcattgctgagagggcattcttgcgacatttggaaggagggtgttccgtgccagtggccgtgcacaccgctatgaaagatgggcagttatacttgacaggtggtgtctggtctctcgatggcagcgacagtattcaggagacaatgcaggccacaattcatgtccccgcacagcacgaagacgggccggaggatgatccccaattggtcgggattaccgcgaggaatatcccccgaggaccccagttggcggcccaaaatctcgggatctcactagccaacctacttttaagtaaaggagccaaaaatatccttgatgtggcacgtcagctaaatgacgcccactag

SEQ ID NO: 283498 - DNA, 1035 bp, Artificial Sequence
  derived and/or modified sequence
atgcgcgtgatccgcgttggcacccggaaatctcagctcgctcggatacagacagactctgttgtggcaacgttgaaagcttcctaccctgggttacagttcgagatcatcgcgatgtccacgaccggtgacaagatcctcgacactgcgctctccaagattggggaaaaatccctgttcacaaaagagctggagcacgctcttgagaaaaatgaagtggatctagtggtgcacagcctcaaggatttacccacggttctgcctccagggttcaccatcggtgccatctgcaaaagagagaatccgcacgacgccgtggtgttccatcccaagttcgtcggtaagaccctggagaccctgcccgagaagtccgtcgtgggaacgtcatcactgcgccgagcagctcagttacaacgtaagttcccccacttggaatttcgaagcattagaggcaatctcaataccagactgagaaaactggatgaacagcaggaatttagtgcaataattctagctaccgctggactgcaaagaatgggctggcacaaccgggttggtcagatcctccatccggaggaatgcatgtacgcagtagggcaaggtgcacttggtgtcgaagtgcgtgccaaggaccaagatatcctggatctggtaggcgttctccacgacccagagacgttgttgcggtgcattgccgagcgagcctttcttcgccatttggaaggtggctgctccgtccccgtggctgtccacacagcaatgaaagatggacagctttacctcactggaggcgtctggtccttagatggatcagactccattcaggagaccatgcaagcaacaatccatgtgccagcacaacatgaagatgggcctgaagacgatccccagctggtggggattactgcccgaaatatcccaagaggcccacagctggccgcacagaacctggggatcagtcttgctaatctcctgttgtcaaagggtgcaaagaacattcttgacgtcgcgagacagttgaacgacgcccactag

SEQ ID NO: 283499 - DNA, 1035 bp, Artificial Sequence
  derived and/or modified sequence
atgagagttatccgggttggaacccggaagtcccagcttgcccgtatccaaaccgacagcgttgtcgccactttaaaagcaagctaccccggtctgcagttcgagattattgcaatgtctaccacaggagacaaaattctggacactgccctgtcgaagatcggggagaaaagccttttcacaaaagagctggagcacgctctggaaaagaatgaggtggacctggtggtgcattcattaaaagacctccctacagtactgcctccagggttcacaatcggcgctatttgtaagcgggagaatcctcacgacgcggtggtatttcatccaaagttcgtgggcaagaccctcgagaccctccctgagaaaagtgtggttggcacttcttccctgcggagggccgctcagctgcaacggaagtttcctcacctcgagttccgttcaatacgtgggaacctgaacacacgcctgagaaagcttgatgagcaacaggaattctcagcaattatacttgcaaccgcgggactgcagcgcatggggtggcataatagggttgggcaaattctccacccagaggagtgtatgtatgctgtggggcaaggggcactgggtgtggaagttagagctaaagaccaggacatccttgatttggtaggcgtgcttcacgatccagagaccctgctcagatgtatcgctgagagggcatttctgaggcatttagagggtgggtgttccgtcccagttgctgtccacaccgcaatgaaagatggccagttgtaccttaccggcggtgtatggtctctggacggtagcgattcaatccaggagacaatgcaagccactatccacgtccctgcccagcatgaagacggccctgaagacgatccgcaactcgtcggaatcaccgctaggaacatacctcggggtcctcagctggctgcccagaacctcggaattagtctggcgaatctgctcctatcaaagggtgctaaaaatattctagacgtggccaggcaactgaatgatgcacactag

SEQ ID NO: 283500 - DNA, 1035 bp, Artificial Sequence
  derived and/or modified sequence
atgagggttatcagagtggggacaaggaaatcacagcttgctcgcatacagacagactctgttgtcgctacgttgaaggccagctatccaggtcttcaattcgaaatcattgctatgtcaaccacaggcgataaaatcctcgatactgccctcagcaagattggggaaaagtcgctctttacaaaggagttggagcacgctctggagaagaacgaagttgacttggttgtccactcactgaaagaccttccgaccgtgctgcccccagggtttaccatcggcgctatctgcaagagagagaacccacatgatgccgtcgtgtttcaccccaagtttgtcgggaaaaccctggaaactctgcccgagaaatccgtcgttgggacaagcagtctccgcagggcagcccagctccagcgcaagttccctcacttagaattccggtctatacggggtaatctaaatactcgtctcagaaaacttgatgagcaacaggaattttctgccatcatccttgccactgcaggtcttcagcggatgggttggcacaatcgcgtgggccagatactgcatcctgaagagtgcatgtacgctgtaggtcaaggtgctctgggcgttgaggtgagagctaaggatcaagatatcctcgacctcgtgggagtccttcacgatccagagaccttactgcgttgcattgctgaaagggccttcctcagacatctggaggggggatgcagcgtgcccgttgcagtccacacagctatgaaggacggacagctgtacctgacggggggagtctggagcttagacgggtccgactccatccaagagaccatgcaggctacaatccatgtccccgctcaacacgaagacggtccggaagacgacccacagctagtgggaatcactgctcgcaatataccgcgtggtccccaacttgcagcacagaatttggggatctctctggccaatctgctccttagcaagggcgcaaaaaatatcctcgatgtcgcacgacagctgaatgacgcccactag

SEQ ID NO: 283501 - protein, 189 aa, Artificial Sequence
  derived and/or modified sequence
MVLLAAAVCTKAGKAIVSRQFVEMTRTRIEGLLAAFPKLMNTGKQHTFVETESVRYVYQPMEKLYMVLITTKNSNILEDLETLRLFSRVIPEYCRALEENEISEHCFDLIFAFDEIVALGYRENVNLAQIRTFTEMDSHEEKVFRAVRETQEREAKAEMRRKAKELQQAQSVGITGMSHHAQLLLYFNP

SEQ ID NO: 283502 - DNA, 570 bp, Artificial Sequence
  derived and/or modified sequence
atggtcttgctggctgccgccgtgtgcacaaaggcaggcaaagccatcgtgagtcggcaattcgtggagatgactcggactaggatagagggactattggcagccttccctaaactcatgaatacaggcaagcagcacaccttcgtcgagaccgagagtgtacgatatgtgtaccagcctatggagaagctgtatatggtgttaatcactacaaaaaattctaatatcttagaagacctggagacacttcgtctcttctcaagagtaatacccgaatattgtcgggctctggaggagaacgagatcagcgagcattgtttcgatctcatctttgcgtttgatgagattgtggccctaggttatcgcgaaaacgtcaaccttgctcagatccggacatttacggagatggacagccacgaggaaaaagtgttccgagctgtgcgggaaacccaggagcgggaagccaaagccgagatgcggagaaaggccaaggagctgcaacaggcacagagcgtgggcatcacaggaatgtctcaccacgcccagctgttactgtattttaatccttag

SEQ ID NO: 283503 - DNA, 570 bp, Artificial Sequence
  derived and/or modified sequence
atggtgctgctggccgctgctgtgtgcaccaaggccggcaaggccatcgtgtcccggcagtttgtggagatgaccaggaccagaattgagggcctgctggccgccttccccaagctgatgaacacaggcaagcagcacacctttgtggagacagaatctgtgcgctacgtgtaccagcccatggagaagctgtacatggtgctgatcaccaccaagaacagcaacatcctggaggacctggagaccctgcggctcttcagcagggtcatccctgagtactgccgggccctggaggagaatgagatcagcgagcactgctttgacctgatctttgcctttgatgagatcgtggccctgggctacagagaaaatgtgaacctggcccagatccgcaccttcacagagatggacagccatgaggagaaggtgttccgggctgtgcgggagacccaggagcgggaggccaaggccgagatgaggaggaaggccaaggagctgcagcaggcccagagcgtgggcatcaccggcatgagccaccacgcccagctgctgctgtacttcaacccctag

SEQ ID NO: 283504 - DNA, 570 bp, Artificial Sequence
  derived and/or modified sequence
atggtgctgctggccgccgccgtgtgcaccaaggccggcaaggccattgtgtcaagacaatttgttgagatgacgagaacccggatcgaaggccttctggccgccttcccaaagctgatgaacaccgggaagcagcatacattcgttgagaccgagagcgtaaggtacgtctatcagcctatggaaaagctgtatatggtgctgataacgactaagaacagcaacatccttgaggatctggagacccttagattgttttcaagggtgatcccagaatactgtcgggccttggaagagaacgaaatcagcgagcactgctttgatttgattttcgccttcgacgaaatcgtagcccttggttacagagagaatgtaaatctagcccaaatccgtaccttcaccgagatggatagtcatgaggagaaagttttccgcgcggtgcgagaaacccaggaaagagaggcaaaggccgagatgcggcggaaagcgaaggaacttcaacaggctcagtccgtgggaatcaccggaatgtcacaccacgcccagctgctgttgtactttaatccttag

SEQ ID NO: 283505 - DNA, 570 bp, Artificial Sequence
  derived and/or modified sequence
atggtccttcttgcagcagccgtgtgcactaaagccggaaaggctattgtgtcccggcaatttgtggagatgacccggactaggattgagggtttgctggctgcattccctaaactcatgaatacaggtaagcagcacactttcgtggaaactgagagcgtccgctacgtgtaccagcctatggagaagctgtatatggtcttgatcactactaaaaactctaacatcctggaagatctggagacactacggctcttttcgagagtcattcccgagtattgtagggctctcgaggaaaatgagatatccgaacactgttttgatctgatcttcgctttcgacgaaatcgtggccctgggatatcgcgaaaacgtaaacctcgcccagattaggacattcacggagatggactctcacgaggagaaagtctttagggccgtccgggagacccaggagcgcgaagctaaagctgaaatgaggcggaaggctaaggaactgcaacaggctcagtctgtaggtattactgggatgtctcaccacgcccagttgttactctactttaatccgtag

SEQ ID NO: 283506 - DNA, 2238 bp, Artificial Sequence
  derived and/or modified sequence
gaagcggcagcggttcctgtcaagggggcagcaggtccagagctgctggtgctcccgttccccagaccctacccctatccccagtggagccggagtgcgggcgcgccccaccaccgccctcaccatggtgctgttggcagcagcggtctgcacaaaagcaggaaaggctattgtttctcgacagtttgtggaaatgacccgaactcggattgagggcttattagcagcttttccaaagctcatgaacactggaaaacaacatacgtttgttgaaacagagagtgtaagatatgtctaccagcctatggagaaactgtatatggtactgatcactaccaaaaacagcaacattttagaagatttggagaccctaaggctcttctcaagagtgatccctgaatattgccgagccttagaagagaatgaaatatctgagcactgttttgatttgatttttgcttttgatgaaattgtcgcactgggataccgggagaatgttaacttggcacagatcagaaccttcacagaaatggattctcatgaggagaaggtgttcagagccgtcagagagactcaagaacgtgaagctaaggctgagatgcgtcgtaaagcaaaggaattacaacaggcccaaagtgttgggattacaggcatgagccaccatgcccagctgctcctttattttaatccctaaatataatccctaaatatagttatatttcatacttagtttgtttttaaaaagttttctctgtagaaaattttaatcattcataccctttacctttaggtttttctttctatacattcagtcaggcactgggatcatctgtttacaggcattatatttatttggcactcctggaacaagtatatctaacccattcttgatttttggactattcaggtgaactatttgaggggtatggggtctagaagttaaaagatacgcatgtcttctgttcttttcccgtatcaattcattccttcatctctttgccaagttgttttcctttcagggcctgtccttccagtttagaacagtaccatgaatcccacttgtgtcaatattaaagatagctgagaagcacctttcaaatggcacagtccctcttcaagatgtctaaaagaatggttatgtctgtccagttagggatttcacatccacatgtaatcatgtctgctgctgttgctacccaaattttcatttctccacattttgggtacttaagctaaaacgtaatggccacagtctgtaatccattcacattcctcagtttcaccacctccctcttccagactgcactctctgtcatcagtcccctcctttctaacagaaatggggttatgattttgaaggctgtgggttcagggagtctttgccaatcctgttggccctaaactatcaaggaggctccatttcaccatttgattttttgcatttcaggaggcaactgattgtttcgatatgtacatattactcacgtataccccatttccttccagtcagcccaacattttccaccagtctgtccccatctctgaaatccttccttctctttccccctaagtcttttgagtgtcatcatgtactggtggtttctcggttccatctcatccatttccttttcaatggagactacagcgtcagccagctcagccttggcttttaactcaatattccagtccataggggtggttaaaagttgctgcaaggctgcaggcactggcagtgggaagaggcagacgactagatgacttctgcacttttagctggttgaaaagtaccactcccactctgaacatctggccgtccctgcaaagagtgtactgtgcttgaagcagagcactcacacataaatggctgtgtgtggaattgcttgccaaagaagtttctagcctttccctttcccctaactgcatcagggaagaattcttatctctagcttggtttccacatgaggtttttctgagaagggcttgggacaagaagtctgtcatgttagttaagcaggcaagaaatcctactaatccagttttgtttgaaagttgtttgtccgtatgattttttaaaagtcaagtttaatttcaaaaaaccttttttttctgagattacttttggggtaatatttaaaatgagagacattttgtaaccctgtaaaatacatagggaatataacattccagtgtatacaaagaaggcaaattctttaatcaaataaagcgcattataaaatg

SEQ ID NO: 283507 - DNA, 570 bp, Artificial Sequence
  derived and/or modified sequence
atggtgctgctggccgccgccgtgtgcaccaaggccggcaaggccatcgtgagcagacagttcgtggagatgaccagaaccagaatcgagggcctgctggccgccttccccaagctgatgaacaccggcaagcagcacaccttcgtggagaccgagagcgtgagatacgtgtaccagcccatggagaagctgtacatggtgctgatcaccaccaagaacagcaacatcctggaggacctggagaccctgagactgttcagcagagtgatccccgagtactgcagagccctggaggagaacgagatcagcgagcactgcttcgacctgatcttcgccttcgacgagatcgtggccctgggctacagagagaacgtgaacctggcccagatcagaaccttcaccgagatggacagccacgaggagaaggtgttcagagccgtgagagagacccaggagagagaggccaaggccgagatgagaagaaaggccaaggagctgcagcaggcccagagcgtgggcatcaccggcatgagccaccacgcccagctgctgctgtacttcaacccctag

SEQ ID NO: 283508 - protein, 355 aa, Artificial Sequence
  derived and/or modified sequence
MKTIQPKMHNSISWAIFTGLAALCLFQGVPVRSGDATFPKAMDNVTVRQGESATLRCTIDNRVTRVAWLNRSTILYAGNDKWCLDPRVVLLSNTQTQYSIEIQNVDVYDEGPYTCSVQTDNHPKTSRVHLIVQVSPKIVEISSDISINEGNNISLTCIATGRPEPTVTWRHISPKAVGFVSEDEYLEIQGITREQSGDYECSASNDVAAPVVRRVKVTVNYPPYISEAKGTGVPVGQKGTLQCEASAVPSAEFQWYKDDKRLIEGKKGVKVENRPFLSKLIFFNVSEHDYGNYTCVASNKLGHTNASIMLFEVKTTALTPWKGPGAVSEVSNGTSRRAGCVWLLPLLVLHLLLKF

SEQ ID NO: 283509 - DNA, 1068 bp, Artificial Sequence
  derived and/or modified sequence
atgaaaacgatccagccgaaaatgcacaactctatctcatgggccatttttacagggttggccgcgctatgcctgttccagggggtccctgtgagaagtggtgatgccacttttccaaaggccatggacaacgtcacagtacggcagggagaatctgccacattgcgctgcaccatcgacaaccgcgtaacacgtgtcgcttggttgaaccgctcgaccattctctatgctggcaacgataagtggtgcttggatcctagagtcgtccttctgagcaacacacagacccaatacagcatagagatacagaacgttgacgtgtatgatgagggcccgtacacatgcagtgttcagactgataatcacccaaagacaagccgggttcatctaatcgtccaggtgtcacctaagatagtggaaatttcttccgatatatctattaacgaggggaacaatattagtctgacatgcatcgctactggccgccccgaacccactgttacgtggaggcatatctcacctaaggcggttgggtttgtcagcgaggacgagtacctcgagattcaaggaattactagagaacagtctggtgattacgagtgttccgcgtctaatgacgtagcagctcccgtcgttcgccgggtgaaggtgaccgtgaattaccccccgtacatctccgaagcaaaaggtaccggggttccagttggccagaaggggaccctccagtgcgaggcttccgcggtccccagtgccgagtttcagtggtataaggacgacaaaaggttgatcgagggaaaaaaaggtgtaaaggtagagaatcggccttttctgtctaagctgatcttctttaacgtgtccgagcatgactacggcaactatacctgcgttgcatcgaataaacttggccatactaatgcttccattatgttattcgaggtcaagaccacagccctgacaccctggaagggccctggcgccgtctccgaggtgtccaacggaacgtcccgacgggccggatgcgtgtggctgctgccgctcctggtgctccatcttctgctaaagttttag

SEQ ID NO: 283510 - DNA, 1068 bp, Artificial Sequence
  derived and/or modified sequence
atgaagaccatccagcccaagatgcacaacagcatctcctgggccatcttcaccggcctggccgccctgtgcctcttccagggcgtgcctgtgcgctctggagatgccaccttccccaaggccatggacaacgtgacagtgcggcagggcgagagcgccaccctgcgctgcaccatcgacaacagagtgaccagggtggcctggctgaacagaagcaccatcctgtatgctggaaatgacaagtggtgcctggacccccgggtggtgctgctgagcaacacccagacccagtacagcattgagatccagaatgtggatgtgtatgatgagggcccctacacctgcagcgtgcagacagacaaccaccccaagaccagccgggtgcacctgattgtgcaggtgagccccaagatcgtggagatcagcagtgacatcagcatcaatgaaggcaacaacatcagcctgacctgcatcgccaccggccggcctgagcccaccgtgacctggaggcacatcagccccaaggctgtgggctttgtgtctgaagatgagtacctggagatccagggcatcacccgggagcagagcggggactatgagtgcagcgccagcaatgatgtggccgcccctgtggtgagaagagtgaaggtgacagtgaactacccaccctacatcagcgaggccaagggcactggagtgcctgtgggccagaagggcaccctgcagtgtgaggccagcgctgtgcccagcgctgagttccagtggtacaaggatgacaagaggctgattgagggcaagaagggcgtgaaggtggagaaccggcccttcctgagcaagctgatcttcttcaacgtgtctgaacatgactatggcaactacacctgtgtggccagcaacaagctgggccacaccaatgccagcatcatgctgtttgaggtgaagaccacagccctgaccccctggaagggccctggagctgtgtctgaggtgtccaatggcaccagccggcgggccggctgtgtgtggctgctgcccctgctggtgctgcacctgctgctgaagttctag

SEQ ID NO: 283511 - DNA, 1068 bp, Artificial Sequence
  derived and/or modified sequence
atgaagaccatccagcccaagatgcacaacagcatcagctgggccatctttaccggtctggcggcattgtgtctgttccagggagtgcccgtgaggtccggcgatgcgacgtttccaaaagctatggacaatgtcacggtccgacaaggggagtccgcaactttaaggtgcaccatcgataatcgcgttactcgggtggcatggctgaatagaagcacaattttgtatgccggaaatgacaaatggtgtctcgatcctagggtagtgctgctcagtaacacccagacacagtattcgatcgagatacagaatgttgacgtgtatgacgagggaccctacacttgctctgtgcagaccgacaaccaccccaaaacctcacgagtacacttgattgtccaagttagtcctaaaattgtcgaaatctctagtgatatctcaattaacgaaggtaataatatctctctaacctgtatcgccacaggcaggcccgagcccacagtcacatggcgacacattagcccaaaagccgtcggcttcgtttcagaggacgagtacctcgaaattcagggcataacacgggaacagtctggagactacgaatgcagcgcatcaaacgacgtggcggctccagtggtccggcgcgtaaaggtgaccgtcaattaccccccatatatttcagaagctaaaggcacaggggtgccggtgggtcagaaagggacgctgcagtgtgaagcaagcgcagtaccgtcggcagaatttcaatggtataaagatgacaagaggcttatcgaaggcaagaagggcgtgaaagtggaaaaccggcccttcttaagtaagctcatttttttcaatgtgtctgagcatgactacggaaattacacttgtgtagcttctaacaaattgggacacaccaatgcaagtattatgctcttcgaagtaaaaacaacggcgctcactccttggaaggggcccggagccgtatccgaagtgagcaacggaacttcccggcgggcggggtgcgtttggttattacccctgctcgtcctgcatctactgctgaaattttag

SEQ ID NO: 283512 - DNA, 1068 bp, Artificial Sequence
  derived and/or modified sequence
atgaaaaccatccagccaaaaatgcacaattctatctcttgggcaatcttcacggggctggctgctctgtgtctcttccaaggagtgcccgtgcgcagcggagatgccaccttccccaaagctatggacaacgtgacggtccggcagggggagagcgccaccctcaggtgcactattgacaaccgggtcacccgggtggcctggctaaaccgcagcaccatcctctatgctgggaatgacaagtggtgcctggatcctcgcgtggtccttctgagcaacacccaaacgcagtacagcatcgagatccagaacgtggatgtgtatgacgagggcccttacacctgctcggtgcagacagacaaccacccaaagacctctagggtccacctcattgtgcaagtatctcccaaaattgtagagatttcttcagatatctccattaatgaagggaacaatattagcctcacctgcatagcaactggtagaccagagcctacggttacttggagacacatctctcccaaagcggttggctttgtgagtgaagacgaatacttggaaattcagggcatcaccagggagcagtcaggggactacgagtgcagtgcctccaatgacgtggccgcgcccgtggtacggagagtaaaggtcaccgtgaactatccaccatacatttcagaagccaagggtacaggtgtccccgtgggacaaaaggggacactgcagtgtgaagcctcagcagtcccctcagcagaattccagtggtacaaggatgacaaaagactgattgaaggaaagaaaggggtgaaagtggaaaacagacctttcctctcaaaactcatcttcttcaatgtctctgaacatgactatgggaactacacttgcgtggcctccaacaagctgggccacaccaatgccagcatcatgctatttgaagtgaaaactacagccctgaccccttggaaaggtccaggcgccgtcagcgaggtgagcaacggcacgtcgaggagggcaggctgcgtctggctgctgcctcttctggtcttgcacctgcttctcaaattttga

SEQ ID NO: 283513 - DNA, 1068 bp, Artificial Sequence
  derived and/or modified sequence
atgaaaacaattcaacctaaaatgcataacagtatcagctgggcaatctttacagggctggccgcactctgtttgttccagggcgtacctgtgagatcgggtgacgccaccttcccaaaggctatggacaacgtgaccgtgcggcagggcgagtcagccactcttaggtgtacgatcgataaccgtgtcactcgggttgcctggctgaacaggagcacaattctttacgccggtaacgataagtggtgcctggacccacgtgtggtgctcttatcaaatacccagacacagtactccatcgagatacagaatgtagatgtctacgacgagggcccatatacctgttctgtgcagactgacaaccatcctaagactagtcgcgttcacctcatagtgcaggtgtcccctaaaatcgtggaaatttcatcagacatatcaatcaatgagggcaataatattagtctgacttgtatcgccactgggagaccagaacctaccgtgacctggcgccacattagcccaaaagccgtgggctttgtatctgaggacgaatatctggagatacaaggcatcacccgagaacagtcgggtgattatgagtgctcagcttccaacgacgtagcagcacccgtggtacgtcgggtgaaggttactgtcaactatcccccttatatttcagaggccaaaggaaccggcgttcccgtcggccagaaaggcaccctgcaatgtgaggccagcgccgtcccatccgctgagtttcaatggtataaagacgacaagaggttaattgagggaaagaagggggtgaaagtagaaaaccggccattcctgtctaagctgatcttctttaatgtctctgagcatgactacgggaactacacctgtgtggcttcaaataagctgggacacacaaatgcttcaattatgctgtttgaagtgaagaccacggccctgacaccttggaaaggtcctggggcagtgagcgaagtaagcaatgggactagtaggcgcgctggttgtgtatggctgctgccgctgctggtgctacatctgctcttgaaattctag

SEQ ID NO: 283514 - DNA, 1068 bp, Artificial Sequence
  derived and/or modified sequence
atgaagaccatccagcccaagatgcacaacagcatcagctgggccatcttcaccggcctggccgccctgtgcctgttccagggcgtgcccgtgagaagcggcgacgccaccttccccaaggccatggacaacgtgaccgtgagacagggcgagagcgccaccctgagatgcaccatcgacaacagagtgaccagagtggcctggctgaacagaagcaccatcctgtacgccggcaacgacaagtggtgcctggaccccagagtggtgctgctgagcaacacccagacccagtacagcatcgagatccagaacgtggacgtgtacgacgagggcccctacacctgcagcgtgcagaccgacaaccaccccaagaccagcagagtgcacctgatcgtgcaggtgagccccaagatcgtggagatcagcagcgacatcagcatcaacgagggcaacaacatcagcctgacctgcatcgccaccggcagacccgagcccaccgtgacctggagacacatcagccccaaggccgtgggcttcgtgagcgaggacgagtacctggagatccagggcatcaccagagagcagagcggcgactacgagtgcagcgccagcaacgacgtggccgcccccgtggtgagaagagtgaaggtgaccgtgaactaccccccctacatcagcgaggccaagggcaccggcgtgcccgtgggccagaagggcaccctgcagtgcgaggccagcgccgtgcccagcgccgagttccagtggtacaaggacgacaagagactgatcgagggcaagaagggcgtgaaggtggagaacagacccttcctgagcaagctgatcttcttcaacgtgagcgagcacgactacggcaactacacctgcgtggccagcaacaagctgggccacaccaacgccagcatcatgctgttcgaggtgaagaccaccgccctgaccccctggaagggccccggcgccgtgagcgaggtgagcaacggcaccagcagaagagccggctgcgtgtggctgctgcccctgctggtgctgcacctgctgctgaagttctag

SEQ ID NO: 283515 - protein, 226 aa, Artificial Sequence
  derived and/or modified sequence
MALSWFILHARYRVIHFIAVAVCLLGVGTMVGADILAGREDNSGSDVLIGDILVLLGASLYAISNVCEEYIVKKLSRQEFLGMVGLFGTIISGIQLLIVEYKDIASIHWDWKIALLFVAFALCMFCLYSFMPLVIKVTSATSVNLGILTADLYSLFVGLFLFGYKFSGLYILSFTVIMVGFILYCSTPTRTAEPAESSVPPVTSIGIDNLGLKLEENLQETHSAVL

SEQ ID NO: 283516 - protein, 327 aa, Artificial Sequence
  derived and/or modified sequence
MLSLCICGTAITSQYLAERYKVNTPMLQSFINYCLLFLIYTVMLAFRSGSDNLLVILKRKWWKYILLGLADVEANYVIVRAYQYTTLTSVQLLDCFGIPVLMALSWFILHARYRVIHFIAVAVCLLGVGTMVGADILAGREDNSGSDVLIGDILVLLGASLYAISNVCEEYIVKKLSRQEFLGMVGLFGTIISGIQLLIVEYKDIASIHWDWKIALLFVAFALCMFCLYSFMPLVIKVTSATSVNLGILTADLYSLFVGLFLFGYKFSGLYILSFTVIMVGFILYCSTPTRTAEPAESSVPPVTSIGIDNLGLKLEENLQETHSAVL

SEQ ID NO: 283517 - DNA, 681 bp, Artificial Sequence
  derived and/or modified sequence
atggccctgagctggttcatcctgcacgccagatacagagtgatccacttcatcgccgtggccgtgtgcctgctgggcgtgggcaccatggtgggcgccgacatcctggccggcagagaggacaacagcggcagcgacgtgctgatcggcgacatcctggtgctgctgggcgccagcctgtacgccatcagcaacgtgtgcgaggagtacatcgtgaagaagctgagcagacaggagttcctgggcatggtgggcctgttcggcaccatcatcagcggcatccagctgctgatcgtggagtacaaggacatcgccagcatccactgggactggaagatcgccctgctgttcgtggccttcgccctgtgcatgttctgcctgtacagcttcatgcccctggtgatcaaggtgaccagcgccaccagcgtgaacctgggcatcctgaccgccgacctgtacagcctgttcgtgggcctgttcctgttcggctacaagttcagcggcctgtacatcctgagcttcaccgtgatcatggtgggcttcatcctgtactgcagcacccccaccagaaccgccgagcccgccgagagcagcgtgccccccgtgaccagcatcggcatcgacaacctgggcctgaagctggaggagaacctgcaggagacccacagcgccgtgctgtag

SEQ ID NO: 283518 - DNA, 984 bp, Artificial Sequence
  derived and/or modified sequence
atgctgagcctgtgcatctgcggcaccgccatcaccagccagtacctggccgagagatacaaggtgaacacccccatgctgcagagcttcatcaactactgcctgctgttcctgatctacaccgtgatgctggccttcagaagcggcagcgacaacctgctggtgatcctgaagagaaagtggtggaagtacatcctgctgggcctggccgacgtggaggccaactacgtgatcgtgagagcctaccagtacaccaccctgaccagcgtgcagctgctggactgcttcggcatccccgtgctgatggccctgagctggttcatcctgcacgccagatacagagtgatccacttcatcgccgtggccgtgtgcctgctgggcgtgggcaccatggtgggcgccgacatcctggccggcagagaggacaacagcggcagcgacgtgctgatcggcgacatcctggtgctgctgggcgccagcctgtacgccatcagcaacgtgtgcgaggagtacatcgtgaagaagctgagcagacaggagttcctgggcatggtgggcctgttcggcaccatcatcagcggcatccagctgctgatcgtggagtacaaggacatcgccagcatccactgggactggaagatcgccctgctgttcgtggccttcgccctgtgcatgttctgcctgtacagcttcatgcccctggtgatcaaggtgaccagcgccaccagcgtgaacctgggcatcctgaccgccgacctgtacagcctgttcgtgggcctgttcctgttcggctacaagttcagcggcctgtacatcctgagcttcaccgtgatcatggtgggcttcatcctgtactgcagcacccccaccagaaccgccgagcccgccgagagcagcgtgccccccgtgaccagcatcggcatcgacaacctgggcctgaagctggaggagaacctgcaggagacccacagcgccgtgctgtag

SEQ ID NO: 283519 - DNA, 681 bp, Artificial Sequence
  derived and/or modified sequence
atggcgctgtcctggttcattttgcacgcgaggtatagagttatccatttcattgcagtggcagtgtgtttgctgggagttggcactatggtgggagcagatatcttagcagggagggaagacaactctggaagcgatgttctgatcggggacatccttgttttgctgggagcctccctgtatgccatttccaacgtgtgcgaagagtatatcgttaaaaagttgtccagacaggaattcctaggtatggtaggtctcttcgggaccatcattagtgggatccagctgctcatcgtggaatataaagatattgctagcattcactgggactggaagattgcactgctgtttgttgcattcgccctctgcatgttctgtttgtacagttttatgccactggtaatcaaggtgacgtccgccacaagcgtcaacctggggattctcaccgccgacctttattccttgttcgtagggctgttcctttttggctataaattctccgggctgtatattttgtcattcaccgtcataatggttgggttcatcctgtattgcagtacaccaaccagaaccgccgaacccgccgaaagcagcgtgccacctgttacctccattgggattgataacctcggactcaaactcgaggaaaacctgcaggaaacccactcagcggtgctttag

SEQ ID NO: 283520 - DNA, 984 bp, Artificial Sequence
  derived and/or modified sequence
atgctgtccctctgcatttgtgggaccgctatcactagtcagtatctggctgagagatacaaggtcaacactcctatgcttcagagctttattaactactgtcttctcttcctgatctacacagtcatgcttgctttcaggtctgggagcgacaacctcctggtgattctgaagagaaagtggtggaagtacattctgctggggctcgccgacgtggaggctaactatgtgatcgtgagagcttaccagtacacaactctaactagcgtccaactcctggactgcttcggtatccccgtgctcatggccctgtcctggttcattttacacgccaggtacagagttatccatttcattgcagtcgctgtttgcctgcttggggtgggcacaatggtgggagctgacatcttggccggacgggaagataactccgggtctgacgtcctgatcggagatattttggttctgcttggggcgtccttatatgctatttccaacgtctgcgaagagtacattgtcaagaagctatccagacaggagttcctcggcatggtgggactgttcgggaccataatttcaggtattcagctcctgattgtggagtataaggatatcgccagcattcactgggattggaagatcgcccttttgttcgtggcctttgctttgtgcatgttttgcctttactctttcatgccactcgtcatcaaagtgacatccgcaacctctgtgaatctggggatcctgaccgctgacctgtactctctgttcgttggcctctttctgtttgggtataagttcagtggcctgtacattctgagttttaccgtgataatggttggctttatcctgtattgtagtacccccacgcgtacggccgagccagctgagagttctgtaccgcctgtcaccagcatcgggatcgacaatctgggactgaaacttgaggaaaacctccaagaaacacacagtgcggtgctatag

SEQ ID NO: 283521 - DNA, 681 bp, Artificial Sequence
  derived and/or modified sequence
atggccctgtcctggttcatcctgcacgcccgctacagagtcatccacttcatcgctgtggccgtgtgcctgctgggcgtgggcaccatggtgggcgctgacatcctggccggccgggaggacaacagcggcagtgatgtgctgattggagacatcctggtgctgctgggcgccagcctgtatgccatcagcaatgtgtgtgaggagtacatcgtgaagaagctgagccggcaggagttcctgggcatggtgggcctgtttggcaccatcatcagcggcatccagctgctgattgtggagtacaaggacatcgccagcatccactgggactggaagatcgccctgctgtttgtggcctttgccctgtgcatgttctgcctgtacagcttcatgcccctggtgatcaaggtgaccagcgccacctctgtgaacctgggcatcctgacagctgacctgtacagcctgtttgtgggcctcttcctgtttggctacaagttcagcggcctgtacatcctgtccttcaccgtcatcatggtgggcttcatcctgtactgcagcacccccaccaggacagctgagcctgctgagagctctgtgccccctgtgaccagcattggaattgacaacctgggcctgaagctggaggagaacctgcaggagacccacagcgctgtgctgtag

SEQ ID NO: 283522 - DNA, 984 bp, Artificial Sequence
  derived and/or modified sequence
atgctgagcctgtgcatctgtggcacagccatcaccagccagtacctggccgagcgctacaaggtgaacacccccatgctgcagagcttcatcaactactgcctgctcttcctgatctacacagtgatgctggccttccgcagcggcagtgacaacctgctggtgatcctgaagaggaagtggtggaagtacatcctgctgggcctggctgatgtggaggccaactacgtgattgtgcgggcctaccagtacaccaccctgacctctgtgcagctgctggactgcttcggcatccctgtgctgatggccctgtcctggttcatcctgcacgcccgctacagagtcatccacttcatcgctgtggccgtgtgcctgctgggcgtgggcaccatggtgggcgctgacatcctggccggccgggaggacaacagcggcagtgatgtgctgattggagacatcctggtgctgctgggcgccagcctgtatgccatcagcaatgtgtgtgaggagtacatcgtgaagaagctgagccggcaggagttcctgggcatggtgggcctgtttggcaccatcatcagcggcatccagctgctgattgtggagtacaaggacatcgccagcatccactgggactggaagatcgccctgctgtttgtggcctttgccctgtgcatgttctgcctgtacagcttcatgcccctggtgatcaaggtgaccagcgccacctctgtgaacctgggcatcctgacagctgacctgtacagcctgtttgtgggcctcttcctgtttggctacaagttcagcggcctgtacatcctgtccttcaccgtcatcatggtgggcttcatcctgtactgcagcacccccaccaggacagctgagcctgctgagagctctgtgccccctgtgaccagcatcggcatcgacaacctgggcctgaagctggaggagaacctgcaggagacccacagcgctgtgctgtag

SEQ ID NO: 283523 - DNA, 681 bp, Artificial Sequence
  derived and/or modified sequence
atggccctgagctggttcatcctgcacgcccggtaccgggtgatccactttattgctgtagccgtctgcttgctgggagtaggtactatggtgggcgcggacatattagcgggccgcgaagataattcaggcagcgacgtgttgatcggggatattctggtgctgttaggggcctccttatatgccatctctaatgtgtgcgaggaatacattgtcaagaagctgtcgcgacaagaatttctgggcatggttgggctgttcggcacaatcatcagcgggatccagctcctgattgtagagtacaaggacatagcctcaattcactgggactggaagatcgctcttttatttgtcgcattcgctctgtgtatgttctgcttgtattcctttatgccgctggtgattaaggttaccagtgccacatcagttaatctgggaatactgaccgccgatctgtattcactgttcgtcggcctcttcctttttggctataaattttccggcctctacatcctgtctttcactgtcatcatggtggggtttatactgtattgcagcactcccacccggacagccgaaccagctgaatcttccgtccctccagtaacctccattggcatcgacaacctcggactgaagctagaggagaatttgcaagagacacattcggccgttctgtag

SEQ ID NO: 283524 - DNA, 984 bp, Artificial Sequence
  derived and/or modified sequence
atgctgagcctgtgcatctgcggcaccgccatcaccagccagtacctcgctgaacgctacaaggtgaacaccccaatgttgcagtcctttatcaactactgcctgctgttcctgatttatacggtgatgctcgccttccgctcgggatctgacaacttattggtcatacttaagcgaaagtggtggaaatatatcctgctagggttggccgacgtcgaggccaactatgtgatcgttagggcctatcaatatactactctgaccagtgtgcaactccttgactgcttcggaatacctgtgcttatggcacttagttggttcatactgcatgcccgatacagggtgatacacttcatcgccgtagctgtctgtctgctgggagttgggaccatggtgggcgccgacattctcgccggaagggaggataattccggctcagatgtacttatcggagatatcctcgtgctgttgggtgcctccctgtatgccatttcaaacgtttgtgaagagtacatagtgaagaaactttcacgccaggaattccttggaatggttggtctattcggtactattatttccggaattcaactcctgattgtggaatataaggacatagctagcattcattgggactggaagattgccctgctctttgttgcattcgccctgtgcatgttttgtctgtatagtttcatgcccctcgtgataaaagtcacgagcgcaacctcggtaaatttgggcatactcacagctgatctctactcactgtttgtcggtcttttcctctttgggtacaaatttagcgggctatatattttgtcattcacagtgataatggtaggattcattctttactgttccactcctactcggacggctgagccagccgaatctagtgtcccgcccgttacgagtatcggaattgacaacctcgggctgaaactggaggaaaatctgcaggagacacattcagccgtgctgtag

SEQ ID NO: 283525 - DNA, 681 bp, Artificial Sequence
  derived and/or modified sequence
atggctctatcatggtttatactgcacgctcgatacagggtgatccattttattgctgtggcagtgtgcttgctcggggtcggaactatggtaggcgcagacatactggcagggagggaggacaactcaggatctgacgtgctcatcggtgatatactcgtactgctaggggctagcctttatgccatctctaatgtatgtgaggagtatatcgtgaaaaagctgagcagacaggaattccttggcatggttggcctctttgggacgattatctcggggattcagctactgatcgtcgaatacaaagacatcgccagtattcattgggactggaaaatagccttactcttcgtggccttcgccctctgcatgttttgcttgtactcctttatgccattggtgattaaagtgacgagcgcaacatctgtgaatctgggtatcctcactgctgacctatactctttgtttgtgggactattccttttcgggtacaaatttagcggattatatattctgtccttcaccgttatcatggttggatttatcctctactgctctacccctacgagaacagccgagcccgctgaatcctccgtcccaccagtcacttcgatcggcattgataacctgggactcaaattagaggaaaatctccaagagacacacagcgccgtgctgtag

SEQ ID NO: 283526 - DNA, 984 bp, Artificial Sequence
  derived and/or modified sequence
atgctgtccctctgtatttgcggcacagctattactagccagtatttggccgagagatataaggtcaatacacctatgctccagagttttataaattactgcctcttgttcctgatctacacagtgatgctggcttttcggtcaggaagcgacaacctgttggttatcctaaagcgaaagtggtggaaatatatccttctgggtctggccgacgttgaggctaactatgtgattgtcagagcgtaccaatacacaaccttaacttccgtgcagctattagattgcttcggcatacccgtcctgatggcgctgagctggttcattctgcatgccagatatagggtcattcatttcattgcggtcgcagtgtgtctcctgggagtgggcaccatggtcggcgctgacatactagctggaagagaggataactctgggtctgacgtgcttattggcgacatactggtgcttcttggtgcatctctctatgccatttccaacgtctgcgaggaatacatagtcaaaaaactatccagacaagaattcttgggaatggtggggttgtttggcaccatcatctctggcattcagctgttgatcgttgagtataaagatatagctagcatacactgggattggaaaatcgcccttctcttcgttgctttcgcactgtgcatgttctgcttatattcattcatgcccctggttatcaaggtaaccagcgccaccagtgtgaacctggggattctgacagccgacctgtattctcttttcgtgggcctctttctgtttggatacaagttcagcgggctctatatcctctctttcacggtcataatggtgggtttcatcctgtactgcagcactcccacaaggaccgccgagcccgctgaatctagcgtgcctccggtgacatctattggaatcgacaatttgggtttaaaattagaagagaatctgcaggagactcatagcgcagtgctgtag

SEQ ID NO: 283527 - DNA, 993 bp, Artificial Sequence
  derived and/or modified sequence
gggcgccggagacgcgcaagggcgccgatggaggcagactcgccagcgggccccggcgccccagagcccctcgcggagggagcggcggccgagttctccagcctgctgcgcaggataaaaggcaaactcttcacctggcagtgataaccttttagtaatcttgaaaagaaaatggtggaagtacatcctgctgggactagcagatgtggaagctaattatgtgatcgtcagagcctaccagtacacaactctaaccagtgtccagcttttggattgctttgggattcctgtgttgatggctctgtcatggtttattcttcatgcaagatacagagtgatccacttcatcgccgtggctgtctgtctgttgggtgtaggaaccatggttggtgcagacatactagcagggagggaagacaattcagggagtgatgtattgattggtgacatcttggtccttcttggggcttccctctatgccatttcaaatgtttgtgaggaatacatcgtgaagaagctgagcagacaggagtttttaggaatggtgggcctgtttggaacaattatcagtggtatacagctattgattgtggaatataaggatattgccagcattcattgggactggaaaattgccctgctgttcgtggcatttgccctgtgtatgttttgcctgtacagcttcatgccattggtgattaaagtcactagtgccacttccgtcaacctgggcatcctgacagcggacctctacagcctttttgttggactctttctgtttggctataagttttcaggactctacatcctgtccttcactgtcatcatggtggggtttatcctgtactgctccacccctactcgcacggccgagccggctgaaagcagcgtgcctccagtcaccagcattgggattgacaacctggggctgaagctggaggagaacctccaggagacccactctgctgtcttgtagctggagaagatggcgca

SEQ ID NO: 283528 - protein, 731 aa, Artificial Sequence
  derived and/or modified sequence
MDQGNDEEKINTVQRLLDQLPRANVVLLRYLFGVLHNIEQHSSSNQMTAFNLAVCVAPSILWPPASSSPELENEFTKKVSLLIQFLIENCLRIFGEEITSLFREVSVRCDTRENASDISCFQLNDSSYDSLENELNEDVDAPCSDLVKKLGQGSRSMDSVLTLSDYDLDQPEVEGLLTLSDFDLAHSKDEDVQMKRPLESKPVNILVYTKIPLRDHARAPSAMCTPSYLSTAAANAAKSLRRHRRCSEPSIDYLDSKLSYLREFYQKKLRKSSCDAILSQKDEDYLKQNQPLQEEGKTCFKQSLVTGTDVSKKNATTQNTKKKSLSGSEGNHVKLFPKSKPVAISVASYSPMSSQDHSKNQPFDVNTSGYSPPHTADALKGPRTHRRCSEPNIEDQNRKLTYLRGIYSKKQHKTSCEAGLLHGEEDYLKRHKSLQMEGQKLINQSLVMGIEVGKSSATNQNTEKVLPPRLNLCPRTSYSSLSSPGTSPSGSSVSSQDSAFSQISEHSVFTPTETSSPIDCTFQAQRKREDLSPDFSNASHVSGMPGPSSGQACSRPAYTKKDTMEWHSQMHSVTLHPSTWLRNGVASLKNWSLKKKAKAARPEEEKIASPKGPLEPPPHASGVPEANSLQEEQKDLPLRAAEGLSPVQSAQRCSSSPFQDSERHCSSPFSLVESRLKLCMKSHEEIEPGSQSSSGSLPWERASASSWTLEDATSPDSGPTVVCDIEDRNCC

SEQ ID NO: 283529 - DNA, 2196 bp, Artificial Sequence
  derived and/or modified sequence
atggaccagggcaacgacgaggagaagatcaacaccgtgcagagactgctggaccagctgcccagagccaacgtggtgctgctgagatacctgttcggcgtgctgcacaacatcgagcagcacagcagcagcaaccagatgaccgccttcaacctggccgtgtgcgtggcccccagcatcctgtggccccccgccagcagcagccccgagctggagaacgagttcaccaagaaggtgagcctgctgatccagttcctgatcgagaactgcctgagaatcttcggcgaggagatcaccagcctgttcagagaggtgagcgtgagatgcgacaccagagagaacgccagcgacatcagctgcttccagctgaacgacagcagctacgacagcctggagaacgagctgaacgaggacgtggacgccccctgcagcgacctggtgaagaagctgggccagggcagcagaagcatggacagcgtgctgaccctgagcgactacgacctggaccagcccgaggtggagggcctgctgaccctgagcgacttcgacctggcccacagcaaggacgaggacgtgcagatgaagagacccctggagagcaagcccgtgaacatcctggtgtacaccaagatccccctgagagaccacgccagagcccccagcgccatgtgcacccccagctacctgagcaccgccgccgccaacgccgccaagagcctgagaagacacagaagatgcagcgagcccagcatcgactacctggacagcaagctgagctacctgagagagttctaccagaagaagctgagaaagagcagctgcgacgccatcctgagccagaaggacgaggactacctgaagcagaaccagcccctgcaggaggagggcaagacctgcttcaagcagagcctggtgaccggcaccgacgtgagcaagaagaacgccaccacccagaacaccaagaagaagagcctgagcggcagcgagggcaaccacgtgaagctgttccccaagagcaagcccgtggccatcagcgtggccagctacagccccatgagcagccaggaccacagcaagaaccagcccttcgacgtgaacaccagcggctacagccccccccacaccgccgacgccctgaagggccccagaacccacagaagatgcagcgagcccaacatcgaggaccagaacagaaagctgacctacctgagaggcatctacagcaagaagcagcacaagaccagctgcgaggccggcctgctgcacggcgaggaggactacctgaagagacacaagagcctgcagatggagggccagaagctgatcaaccagagcctggtgatgggcatcgaggtgggcaagagcagcgccaccaaccagaacaccgagaaggtgctgccccccagactgaacctgtgccccagaaccagctacagcagcctgagcagccccggcaccagccccagcggcagcagcgtgagcagccaggacagcgccttcagccagatcagcgagcacagcgtgttcacccccaccgagaccagcagccccatcgactgcaccttccaggcccagagaaagagagaggacctgagccccgacttcagcaacgccagccacgtgagcggcatgcccggccccagcagcggccaggcctgcagcagacccgcctacaccaagaaggacaccatggagtggcacagccagatgcacagcgtgaccctgcaccccagcacctggctgagaaacggcgtggccagcctgaagaactggagcctgaagaagaaggccaaggccgccagacccgaggaggagaagatcgccagccccaagggccccctggagccccccccccacgccagcggcgtgcccgaggccaacagcctgcaggaggagcagaaggacctgcccctgagagccgccgagggcctgagccccgtgcagagcgcccagagatgcagcagcagccccttccaggacagcgagagacactgcagcagccccttcagcctggtggagagcagactgaagctgtgcatgaagagccacgaggagatcgagcccggcagccagagcagcagcggcagcctgccctgggagagagccagcgccagcagctggaccctggaggacgccaccagccccgacagcggccccaccgtggtgtgcgacatcgaggacagaaactgctgctag

SEQ ID NO: 283530 - DNA, 2196 bp, Artificial Sequence
  derived and/or modified sequence
atggaccagggcaatgatgaggaaaaaataaacacagtacagcgcctgctggatcagcttcctagagctaatgtcgtgctcttgagatatctgtttggagtactacacaatatcgaacagcacagttcttctaaccagatgaccgcctttaatctggcggtgtgcgtcgctccttccatcctgtggccgccagcctcctcaagccccgaactggaaaacgaattcaccaaaaaagttagccttctgattcaattcttgatagaaaattgtcttcggatttttggggaagaaattaccagcctttttagagaagtgagcgtccgctgcgacacaagagagaacgcaagtgatatcagctgctttcaattgaatgattcctcgtacgacagcctggagaatgagttaaatgaagacgtggacgccccctgttccgacctcgtgaagaagctcggccagggatcgcggtccatggattcagtgttaactctgagcgactacgatctggatcaacctgaagtagagggcctgctcactctgtccgactttgatcttgctcattccaaggacgaagatgtccaaatgaagcggccacttgagagcaaaccggttaatatactcgtctacactaagatacctctgcgggatcacgctcgggcgccatcagccatgtgcactccatcctatctatctaccgccgctgccaacgccgccaagagtctgaggagacataggcgttgctccgagccctcaatcgattaccttgatagtaagctgtcatatctacgcgaattctaccagaagaagctgcgcaaatctagttgtgacgccattctgtcgcaaaaggacgaggactatctcaaacagaatcagcccctgcaagaggagggcaagacctgcttcaaacagagtctggtcacaggcacggatgtgagcaagaagaacgctactactcaaaataccaagaagaagtcactctccggaagcgagggaaaccatgtgaaattatttcccaagtcgaaacccgtggctatctccgtcgcgtcttatagcccaatgagctcccaggaccacagtaagaatcaaccattcgacgtgaataccagcggatattcacctccgcatacggccgacgcactcaagggccctcggacacaccgccgctgttctgagccaaatatcgaagatcagaatcgcaagctgacgtatttgcggggaatctatagtaagaaacaacataaaaccagttgtgaagcgggcctgctgcatggagaagaggactacctgaagcgacataaatcactccagatggaaggacaaaagctgatcaaccagtccctggtcatgggaattgaggtgggaaagtccagcgctaccaatcaaaacacggagaaggtgctgccaccccggctgaatctctgccctagaacgtcttactcctcccttagttctccgggcacttctcccagcggatcatcagtgtcctctcaggacagcgcgttttcacagatatcagagcacagtgtattcactccaaccgaaacctcatccccgatcgattgcaccttccaggctcagcgtaaaagagaggacctgtccccagactttagcaatgctagccatgtcagcgggatgcctggcccaagctcaggtcaggcctgcagccgacccgcttatacaaagaaggatacaatggaatggcattcccagatgcactcagttacgctgcatccatctacttggctgaggaacggcgtagccagtctgaagaactggtcccttaaaaagaaagctaaggctgctcgccctgaggaagagaagatcgcaagcccaaaggggccattggaaccccccccacacgctagtggcgtgccagaggcaaactctctgcaagaggagcagaaagatttgccccttcgggccgccgaaggacttagtcctgtccagtcagcacagagatgctcctcttccccattccaggatagcgagaggcactgctcaagtcctttctctttagttgagagtcggctcaagttgtgcatgaagtcccatgaggaaatcgaacctggctcacagagctcgagtggcagcctgccctgggaacgagcaagtgctagcagctggacgctggaggatgctacatctccggactcaggacccacagtggtatgcgacattgaagaccggaactgctgttag

SEQ ID NO: 283531 - DNA, 2196 bp, Artificial Sequence
  derived and/or modified sequence
atggaccagggcaatgatgaggagaagatcaacacagtgcagaggctgctggaccagctgccccgggccaacgtggtgctgctgcgctacctgtttggagtgctgcacaacatcgagcagcacagcagcagcaaccagatgacagccttcaacctggccgtgtgtgtggcccccagcatcctgtggcccccagccagcagcagccctgagctggagaatgagttcaccaagaaggtgtccctgctgatccagttcctgattgagaactgcctgcgcatctttggagaggagatcaccagcctcttccgggaggtgtctgtgcgctgtgacaccagagaaaatgccagtgacatcagctgcttccagctgaatgacagcagctatgacagcctggagaatgagctgaatgaagatgtggatgccccctgcagcgacctggtgaagaagctgggccagggcagccgctccatggattctgtgctgaccctgagtgactatgacctggaccagcctgaggtggagggcctgctgaccctgagtgactttgacctggcccacagcaaggatgaagatgtgcagatgaagaggcccctggagagcaagcctgtgaacatcctggtgtacaccaagatccccctgcgggaccacgcccgggcccccagcgccatgtgcacccccagctacctgagcacagctgctgccaatgctgccaagagcctgcggcggcaccggcgctgcagcgagcccagcattgactacctggacagcaagctgagctacctgcgggagttctaccagaagaagctgaggaagagcagctgtgatgccatcctgagccagaaggatgaggactacctgaagcagaaccagcccctgcaggaggagggcaagacctgcttcaagcagagcctggtgactggaacagatgtgtccaagaagaatgccaccacccagaacaccaagaagaagagcctgagcggcagcgagggcaaccacgtgaagctgttccccaagagcaagcctgtggccatctctgtggccagctacagccccatgagcagccaggaccacagcaagaaccagccctttgatgtgaacaccagcggctacagccccccccacacagcagatgccctgaagggccccaggacccaccggcgctgcagcgagcccaacatcgaggaccagaacaggaagctgacctacctgcggggcatctacagcaagaagcagcacaagaccagctgtgaggccggcctgctgcacggggaggaggactacctgaagaggcacaagagcctgcagatggagggccagaagctgatcaaccagagcctggtgatgggcatcgaggtgggcaagagcagcgccaccaaccagaacacagagaaggtgctgcccccccggctgaacctgtgccccaggaccagctacagcagcctgagcagccctggcaccagccccagcggcagctctgtgagcagccaggacagcgccttcagccagatcagcgagcacagcgtcttcacccccacagagaccagcagccccatcgactgcaccttccaggcccagaggaagcgggaggacctgagcccagacttcagcaatgccagccacgtgtctggcatgcctggccccagcagcggccaggcctgcagcaggcctgcctacaccaagaaggacaccatggagtggcacagccagatgcacagcgtgaccctgcaccccagcacctggctgagaaatggagtggccagcctgaagaactggagcctgaagaagaaggccaaggccgcccggcctgaggaggagaagatcgccagccccaagggccccctggagcccccacctcatgccagcggcgtgcctgaggccaacagcctgcaggaggagcagaaggacctgcccctgcgggctgctgagggcctgagccctgtgcagagcgcccagcgctgcagcagcagccccttccaggacagcgagcggcactgcagcagccccttcagcctggtggagagccggctgaagctgtgcatgaagagccatgaggagattgagcccggcagccagagcagcagcggcagcctgccctgggagcgggccagcgccagctcctggaccctggaggatgccaccagcccagattctggccccaccgtggtgtgtgacatcgaggacaggaactgctgctag

SEQ ID NO: 283532 - DNA, 2196 bp, Artificial Sequence
  derived and/or modified sequence
atggaccagggcaacgacgaggagaagatcaacaccgtgcagcggctgcttgaccagctgcctcgagctaacgtagtgcttcttagatacctgttcggcgtcctccacaatatagaacagcacagctcgagcaatcaaatgacagcctttaacctggcagtctgcgtcgctccaagcatcctgtggccccctgccagctcgagcccagaactagagaatgagttcaccaagaaagtgtcactcttgatacagttcttgatcgagaattgccttcgcattttcggcgaggaaatcacgtctttatttagggaagtatcagtgcgctgcgataccagagagaatgctagtgatatttcctgtttccagctgaatgactcttcgtatgacagtttggagaacgagctgaatgaggacgtagacgctccgtgttctgacctcgtcaagaagttgggccaagggtccagaagtatggatagcgtactgaccttgtcagattacgatctagatcagcccgaagtcgagggcctcctgaccctgtccgatttcgaccttgcccatagtaaggacgaggacgtgcagatgaaacggcccctcgaatcaaagccagtgaatatcctcgtttataccaagataccactgcgtgaccacgcgagagccccatcagcaatgtgtactccttcttatctgagcactgcggctgccaatgctgctaagtccctcaggcgtcacaggcgatgttccgagcctagtatcgactacttggatagcaagctctcatatctgcgggagttctaccagaagaaactgcgcaagtcctcgtgtgacgccattctgtcccagaaagacgaggactacctgaagcagaatcagcccctgcaggaagaaggaaagacttgctttaagcagtccctggtcaccgggaccgacgtgtctaagaagaatgctaccacccagaatactaaaaaaaagtccctatctgggagtgaggggaaccacgtgaagctgttccctaaatctaagcctgtggcgataagcgtggcttcctactctcctatgtcgtcgcaggaccattcgaaaaatcagccatttgacgttaacacttccggttacagcccaccccacaccgccgatgcccttaaggggccccgtacccatcggcgatgctctgaacccaacatagaagatcagaatcgcaaactgacttatcttagaggaatttactctaagaaacagcataagacatcctgtgaggctgggctcctgcacggagaggaggactatctgaaacgtcataagagtcttcagatggagggtcagaaactgataaaccaatctctagtcatgggaatcgaagtggggaagtcttccgccaccaaccaaaacaccgaaaaagtgttgcctccccggctgaatctgtgccctcggaccagttactcaagcctgtcttcccctggcacttcgccctcaggcagcagcgtcagttctcaggatagcgccttttcccagatctccgagcactctgtcttcacaccaaccgagacttctagtcccatcgattgcacttttcaggctcaacgcaagagagaggacctgtctcccgacttcagtaacgcctcacacgtctcaggcatgccaggtccttcttcggggcaggcttgcagtcggcctgcctacactaaaaaggataccatggagtggcacagccagatgcattccgtgaccctacacccaagtacctggttgcgtaacggcgtggcatctcttaaaaattggtctttgaaaaagaaagctaaggctgcccggcctgaggaggaaaagattgccagcccaaaggggcccctcgagccgcctccacacgcctctggcgttccagaagctaacagtctgcaggaggagcagaaagatctgccactgagagctgcagaaggattatcccccgtgcagtctgcgcagagatgttcttccagtcccttccaggattcagagcggcactgttcatctccttttagcctggtggaatcccgcttgaaactgtgtatgaagtcacatgaggagatcgaaccaggaagtcagtctagttctggcagtctgccctgggaaagggcctccgcttcctcttggacgctcgaggatgccacaagccctgacagcggaccgacagtggtatgcgatatagaggaccggaactgttgctag

SEQ ID NO: 283533 - DNA, 2196 bp, Artificial Sequence
  derived and/or modified sequence
atggaccaagggaatgatgaggaaaagatcaacacagtgcagcgactccttgaccagctcccacgggcaaacgtggtgctgttaaggtatttatttggggtcctacacaatattgagcagcattcgagctcaaatcagatgactgcattcaacctggcagtctgtgtagctccatctatcctgtggccaccagcaagctctagtcctgagcttgagaatgaattcactaagaaggtaagtctgctgatacaatttcttattgagaattgcctgagaatcttcggtgaggagataacaagcctgttcagggaagtgagcgtgcgctgcgatacacgggagaacgcctccgatatctcctgttttcaactgaacgactctagttacgacagcctggaaaacgagctgaacgaggacgtcgacgctccatgcagcgacctggtaaagaagctcggccagggaagccgcagcatggactcagtgctaaccctttctgattacgacctagaccaacccgaggtcgagggactgttgacgctgtccgacttcgatttggcccactctaaggatgaggatgtgcagatgaaaaggcccctggaatctaaaccagtgaacattcttgtgtatactaagatccccctgcgggaccatgcaagggccccttccgcgatgtgcacacctagttatctctctacagctgctgctaatgccgcaaaatcactgcggaggcaccgtcgttgtagcgagccttcgattgactacttagacagcaaactcagttacctccgcgaattttatcagaaaaaacttcgtaaatcgagctgcgatgctattctgtcccagaaagacgaggattatctgaaacaaaatcagcctcttcaggaagaaggcaagacttgctttaagcagtccttggtcacaggcaccgacgtgtcaaaaaagaatgctactacccagaatacaaagaagaaaagcctaagcggctccgagggcaaccacgtaaaactgtttccaaagagcaagccggtggcgatatccgtcgcgtcatacagtccgatgagttctcaggatcattcaaaaaatcagccttttgacgtcaataccagtggctattcaccaccgcacacagccgacgcacttaaaggcccaaggacacatagaaggtgttcggaacctaacattgaggaccagaacagaaaactcacgtatctcaggggtatctacagtaagaagcagcacaagaccagttgtgaagctggactcctccacggcgaagaagactatttgaaaaggcataagtctctccagatggaaggccagaagctgataaatcagtcactggtcatggggatcgaggtgggcaaatctagtgccactaatcaaaatacagagaaggtgctgccccctagactgaatttgtgtcctcgtacctcgtattcctccctaagtagccctggcacatcgccatcagggagttcagtctcttcccaggattccgctttcagccagataagtgagcacagcgttttcaccccaaccgaaacctcttctcctatcgattgcacgtttcaggcacagcgcaaacgggaggatctgtcaccagattttagcaatgcgtctcacgtaagcggaatgcccggaccaagctctggccaggcgtgtagcagacctgcctatacgaaaaaagatactatggagtggcacagtcaaatgcactcagtcactctccaccctagcacttggctccgtaatggagtggcatcactgaaaaattggtcgctaaagaaaaaggcaaaagcggcacgacccgaggaagaaaagatcgccagtcctaagggccctttagagccaccccctcacgcctcaggcgtccccgaagcaaactctttgcaggaggaacagaaagacctgcctctgcgcgcagccgagggactgtctccggttcagtccgctcagcggtgcagcagcagcccatttcaggattctgagcgccactgctcctcgcctttcagtttggtcgagtcccgccttaaactgtgtatgaaatctcacgaggagattgagcctggctcccagagtagctcaggaagcctcccgtgggaacgcgcaagtgcaagttcatggacattggaggatgctacatcgcccgactccgggccaaccgtggtctgcgatatcgaggatcgcaactgctgttag

SEQ ID NO: 283534 - protein, 1045 aa, Artificial Sequence
  derived and/or modified sequence
MTAELQQDDAAGAADGHGSSCQMLLNQLREITGIQDPSFLHEALKASNGDITQAVSLLTDERVKEPSQDTVATEPSEVEGSAANKEVLAKVIDLTHDNKDDLQAAIALSLLESPKIQADGRDLNRMHEATSAETKRSKRKRCEVWGENPNPNDWRRVDGWPVGLKNVGNTCWFSAVIQSLFQLPEFRRLVLSYSLPQNVLENCRSHTEKRNIMFMQELQYLFALMMGSNRKFVDPSAALDLLKGAFRSSEEQQQDVSEFTHKLLDWLEDAFQLAVNVNSPRNKSENPMVQLFYGTFLTEGVREGKPFCNNETFGQYPLQVNGYRNLDECLEGAMVEGDVELLPSDHSVKYGQERWFTKLPPVLTFELSRFEFNQSLGQPEKIHNKLEFPQIIYMDRYMYRSKELIRNKRECIRKLKEEIKILQQKLERYVKYGSGPARFPLPDMLKYVIEFASTKPASESCPPESDTHMTLPLSSVHCSVSDQTSKESTSTESSSQDVESTFSSPEDSLPKSKPLTSSRSSMEMPSQPAPRTVTDEEINFVKTCLQRWRSEIEQDIQDLKTCIASTTQTIEQMYCDPLLRQVPYRLHAVLVHEGQANAGHYWAYIYNQPRQSWLKYNDISVTESSWEEVERDSYGGLRNVSAYCLMYINDKLPYFNAEAAPTESDQMSEVEALSVELKHYIQEDNWRFEQEVEEWEEEQSCKIPQMESSTNSSSQDYSTSQEPSVASSHGVRCLSSEHAVIVKEQTAQAIANTARAYEKSGVEAALSEAFHEEYSRLYQLAKETPTSHSDPRLQHVLVYFFQNEAPKRVVERTLLEQFADKNLSYDERSISIMKVAQAKLKEIGPDDMNMEEYKKWHEDYSLFRKVSVYLLTGLELYQKGKYQEALSYLVYAYQSNAALLMKGPRRGVKESVIALYRRKCLLELNAKAASLFETNDDHSVTEGINVMNELIIPCIHLIINNDISKDDLDAIEVMRNHWCSYLGQDIAENLQLCLGEFLPRLLDPSAEIIVLKEPPTIRPNSPYDLCSRFAAVMESIQGVSTVTVK

SEQ ID NO: 283535 - DNA, 3138 bp, Artificial Sequence
  derived and/or modified sequence
atgaccgccgagctgcagcaggacgacgccgccggcgccgccgacggccacggcagcagctgccagatgctgctgaaccagctgagagagatcaccggcatccaggaccccagcttcctgcacgaggccctgaaggccagcaacggcgacatcacccaggccgtgagcctgctgaccgacgagagagtgaaggagcccagccaggacaccgtggccaccgagcccagcgaggtggagggcagcgccgccaacaaggaggtgctggccaaggtgatcgacctgacccacgacaacaaggacgacctgcaggccgccatcgccctgagcctgctggagagccccaagatccaggccgacggcagagacctgaacagaatgcacgaggccaccagcgccgagaccaagagaagcaagagaaagagatgcgaggtgtggggcgagaaccccaaccccaacgactggagaagagtggacggctggcccgtgggcctgaagaacgtgggcaacacctgctggttcagcgccgtgatccagagcctgttccagctgcccgagttcagaagactggtgctgagctacagcctgccccagaacgtgctggagaactgcagaagccacaccgagaagagaaacatcatgttcatgcaggagctgcagtacctgttcgccctgatgatgggcagcaacagaaagttcgtggaccccagcgccgccctggacctgctgaagggcgccttcagaagcagcgaggagcagcagcaggacgtgagcgagttcacccacaagctgctggactggctggaggacgccttccagctggccgtgaacgtgaacagccccagaaacaagagcgagaaccccatggtgcagctgttctacggcaccttcctgaccgagggcgtgagagagggcaagcccttctgcaacaacgagaccttcggccagtaccccctgcaggtgaacggctacagaaacctggacgagtgcctggagggcgccatggtggagggcgacgtggagctgctgcccagcgaccacagcgtgaagtacggccaggagagatggttcaccaagctgccccccgtgctgaccttcgagctgagcagattcgagttcaaccagagcctgggccagcccgagaagatccacaacaagctggagttcccccagatcatctacatggacagatacatgtacagaagcaaggagctgatcagaaacaagagagagtgcatcagaaagctgaaggaggagatcaagatcctgcagcagaagctggagagatacgtgaagtacggcagcggccccgccagattccccctgcccgacatgctgaagtacgtgatcgagttcgccagcaccaagcccgccagcgagagctgcccccccgagagcgacacccacatgaccctgcccctgagcagcgtgcactgcagcgtgagcgaccagaccagcaaggagagcaccagcaccgagagcagcagccaggacgtggagagcaccttcagcagccccgaggacagcctgcccaagagcaagcccctgaccagcagcagaagcagcatggagatgcccagccagcccgcccccagaaccgtgaccgacgaggagatcaacttcgtgaagacctgcctgcagagatggagaagcgagatcgagcaggacatccaggacctgaagacctgcatcgccagcaccacccagaccatcgagcagatgtactgcgaccccctgctgagacaggtgccctacagactgcacgccgtgctggtgcacgagggccaggccaacgccggccactactgggcctacatctacaaccagcccagacagagctggctgaagtacaacgacatcagcgtgaccgagagcagctgggaggaggtggagagagacagctacggcggcctgagaaacgtgagcgcctactgcctgatgtacatcaacgacaagctgccctacttcaacgccgaggccgcccccaccgagagcgaccagatgagcgaggtggaggccctgagcgtggagctgaagcactacatccaggaggacaactggagattcgagcaggaggtggaggagtgggaggaggagcagagctgcaagatcccccagatggagagcagcaccaacagcagcagccaggactacagcaccagccaggagcccagcgtggccagcagccacggcgtgagatgcctgagcagcgagcacgccgtgatcgtgaaggagcagaccgcccaggccatcgccaacaccgccagagcctacgagaagagcggcgtggaggccgccctgagcgaggccttccacgaggagtacagcagactgtaccagctggccaaggagacccccaccagccacagcgaccccagactgcagcacgtgctggtgtacttcttccagaacgaggcccccaagagagtggtggagagaaccctgctggagcagttcgccgacaagaacctgagctacgacgagagaagcatcagcatcatgaaggtggcccaggccaagctgaaggagatcggccccgacgacatgaacatggaggagtacaagaagtggcacgaggactacagcctgttcagaaaggtgagcgtgtacctgctgaccggcctggagctgtaccagaagggcaagtaccaggaggccctgagctacctggtgtacgcctaccagagcaacgccgccctgctgatgaagggccccagaagaggcgtgaaggagagcgtgatcgccctgtacagaagaaagtgcctgctggagctgaacgccaaggccgccagcctgttcgagaccaacgacgaccacagcgtgaccgagggcatcaacgtgatgaacgagctgatcatcccctgcatccacctgatcatcaacaacgacatcagcaaggacgacctggacgccatcgaggtgatgagaaaccactggtgcagctacctgggccaggacatcgccgagaacctgcagctgtgcctgggcgagttcctgcccagactgctggaccccagcgccgagatcatcgtgctgaaggagccccccaccatcagacccaacagcccctacgacctgtgcagcagattcgccgccgtgatggagagcatccagggcgtgagcaccgtgaccgtgaagtag

SEQ ID NO: 283536 - DNA, 3138 bp, Artificial Sequence
  derived and/or modified sequence
atgaccgccgaactccagcaggacgatgcagcaggcgcggccgatggccacgggagcagctgccagatgcttctcaatcaactccgggaaatcacagggattcaggacccatctttcttacacgaggcactcaaggctagtaacggtgacatcacacaggccgttagtctgctgaccgacgaacgggtgaaggaaccatcacaggacactgtggcaacagaacctagcgaggtggaaggctctgcggcaaacaaggaggtcctggccaaagtcattgatctgacccatgacaacaaagatgatctccaggcggccattgctctgtccctactggagagtccaaagatccaggctgacggccgcgacctgaatcgtatgcacgaagctacgtctgctgagacaaagaggtccaagcggaaacgatgcgaggtctggggagagaatcccaatcccaatgactggcgcagagtggacggatggcccgtcggcctgaagaatgtgggcaatacttgctggttttctgccgtgatccaatctctgtttcagctgcccgaattccgtcgcttggtcctgagctactccctgccgcagaatgtcctggaaaactgcagatctcacactgagaagcgcaacataatgttcatgcaggaactccagtatctgtttgcactgatgatggggtccaacaggaaattcgtcgatccctctgccgccctggacctgcttaagggtgcctttcggtcatctgaggaacagcagcaagacgtcagcgagttcacgcacaaactcctggactggttggaggacgcattccagttggctgtgaacgtgaactccccgagaaataaaagtgaaaatccaatggttcagctgttttatgggacattcttgaccgagggagtgagggagggtaaaccgttttgcaacaacgagaccttcggccagtatccgctccaggtgaacggctaccgtaacctcgacgagtgtttagagggagccatggtggaaggagacgtggagctgctgccatccgaccactctgttaaatacggtcaggaacggtggtttacaaagctcccccctgtcctcacttttgagctttccagatttgaattcaatcaaagcctgggacagccagagaagatccacaataaactcgagttccctcagatcatatacatggaccggtatatgtacagatcgaaggagttgatccggaataaacgggaatgcattcgcaagctcaaagaggaaatcaagatcctgcagcagaaattggagcggtatgttaagtacgggtcaggcccagctaggtttcccctgcctgatatgttgaagtacgtcatcgagttcgccagtacaaaacccgcctccgaatcatgcccgcctgagtcggatacacatatgacgctcccactaagcagcgtccactgctccgtgtctgatcagacttccaaagagagtacctcaacagaaagcagcagccaggacgtcgaaagtacattctcgagcccagaggactcgttgcccaagtccaaaccactgactagttctcgtagttctatggaaatgccctcgcagccagccccacgcactgtgaccgacgaagaaattaatttcgtgaagacgtgcctccagcggtggcgctccgagatcgaacaagatattcaggatctcaagacatgtatcgccagcacaacacaaacgatcgagcagatgtattgcgatccactcctgaggcaagttccgtaccggctccacgccgttctcgtgcacgaaggccaggctaacgctggacactattgggcctacatctataatcagccccggcagagctggctaaagtacaatgacatcagcgtcacagagagcagttgggaagaagtggagagagatagctatggcgggctcaggaacgtgagtgcttattgtctgatgtacattaatgacaaattaccgtatttcaacgccgaagctgctcccactgagtccgaccagatgtcagaagtggaggccctcagcgtcgagctgaaacattacattcaggaggacaattggcgcttcgagcaggaagttgaagaatgggaggaagagcagagctgtaaaattccccagatggaatcctccacaaatagctcaagtcaagactactctacatcccaagaaccaagcgtcgcctcaagccacggagtgcgctgtttatccagtgagcatgccgtgatagtgaaagaacagaccgcgcaggccattgctaatacggccagagcctatgaaaaatcgggtgtagaggcagccctgtctgaagcttttcacgaggagtattccagactgtaccaactggccaaagagactcctacctcccactctgatccccggttacaacacgtgttggtgtatttcttccagaacgaggccccgaagagggtcgtggagaggaccttgctggagcagttcgctgacaagaacctatcgtacgacgaaaggtctatctcaatcatgaaggtggcccaggcaaagctaaaagagataggtccagacgacatgaatatggaagagtacaaaaaatggcacgaagactacagtctgtttcgcaaggtcagcgtttacctgttgacaggcctggagttgtaccagaaagggaagtatcaggaagccctgagctacctggtgtatgcctaccagagtaacgccgctttgcttatgaaaggaccccgaaggggtgtgaaagaatctgtcatagcgctgtaccggcgtaagtgtctgctggagctgaacgccaaggcggcatcacttttcgagaccaatgacgaccatagcgtaacggaaggtatcaacgtaatgaacgagctgattattccatgtatccacttgatcatcaacaacgatataagtaaggacgatctagacgctattgaggttatgcgaaaccactggtgttcttacctgggacaggacatcgcggagaatcttcagctatgtctgggcgagttcctgcccagattattagacccgtccgccgagattatcgtgcttaaagagccaccgactattcgccccaattcgccttacgatctgtgttctcggtttgccgctgtgatggaaagtattcagggcgtcagcaccgtaactgttaaatag

SEQ ID NO: 283537 - DNA, 3138 bp, Artificial Sequence
  derived and/or modified sequence
atgacagctgagctgcagcaggatgatgctgctggagctgctgatggccacggcagcagctgccagatgctgctgaaccagctgcgggagatcaccggcatccaggaccccagcttcctgcacgaggccctgaaggccagcaatggagacatcacccaggccgtgtccctgctgacagatgagcgggtgaaggagcccagccaggacacagtggccacagagcccagcgaggtggagggcagcgctgccaacaaggaggtgctggccaaggtgattgacctgacccatgacaacaaggatgacctgcaggccgccatcgccctgagcctgctggagagccccaagatccaggctgatggccgggacctgaacaggatgcatgaggccaccagcgctgagaccaagaggagcaagaggaagagatgtgaggtgtggggcgagaaccccaaccccaatgactggaggagagtggatggctggcctgtgggcctgaagaatgtgggcaacacctgctggttctctgctgtgatccagagcctcttccagctgcctgagttccggcggctggtgctgagctacagcctgccccagaatgtgctggagaactgccgcagccacacagagaagaggaacatcatgttcatgcaggagctgcagtacctgtttgccctgatgatgggcagcaacaggaagtttgtggaccccagcgctgccctggacctgctgaagggggccttccgcagcagcgaggagcagcagcaggatgtgtctgagttcacccacaagctgctggactggctggaggatgccttccagctggccgtgaatgtgaacagccccaggaacaagtctgagaaccccatggtgcagctgttctacggcaccttcctgacagagggcgtgcgggagggcaagcccttctgcaacaatgagaccttcggccagtaccccctgcaggtgaatggctacagaaacctggatgagtgcctggagggcgccatggtggagggagatgtggagctgctgcccagcgaccacagcgtgaagtatggccaggagcgctggttcaccaagctgccccctgtgctgacctttgagctgagcagatttgagttcaaccagagcctgggccagcctgagaagatccacaacaagctggagttcccccagatcatctacatggaccgctacatgtaccgcagcaaggagctgatccggaacaagcgggagtgcatcaggaagctgaaggaggagatcaagatcctgcagcagaagctggagagatatgtgaagtatggcagcggccctgcccgcttccccctgcctgacatgctgaagtatgtgattgaatttgccagcaccaagccagccagcgagagctgccccccagagagtgacacccacatgaccctgcccctgagctctgtgcactgcagcgtgtctgaccagaccagcaaggagagcaccagcacagagagcagcagccaggatgtggagagcaccttcagcagccctgaggacagcctgcccaagagcaagcccctgaccagcagccgcagctccatggagatgcccagccagcctgcccccaggacagtgacagatgaggagatcaactttgtgaagacctgcctgcagcgctggaggagtgaaattgagcaggacatccaggacctgaagacctgcatcgccagcaccacccagaccatcgagcagatgtactgtgaccccctgctgcggcaggtgccctaccgcctgcatgctgtgctggtgcatgagggccaggccaatgccggccactactgggcctacatctacaaccagccccggcagagctggctgaagtacaatgacatctctgtgacagagagctcctgggaggaggtggagcgggacagctatggaggcctgagaaatgtgtctgcctactgcctgatgtacatcaatgacaagctgccctacttcaatgctgaggccgcccccacagaaagtgaccagatgtctgaggtggaggccctgtctgtggagctgaagcactacatccaggaggacaactggaggtttgagcaggaggtggaggagtgggaggaggagcagagctgcaagatcccccagatggagagcagcaccaacagcagcagccaggactacagcaccagccaggagcccagcgtggccagcagccatggagtgcgctgcctgagcagcgagcacgctgtgattgtgaaggagcagacagcccaggccatcgccaacacagcccgggcctatgagaagagcggcgtggaggccgccctgtctgaggccttccacgaggagtacagccggctgtaccagctggccaaggagacccccaccagccacagcgacccccggctgcagcacgtgctggtgtacttcttccagaatgaggcccccaagagggtggtggagaggaccctgctggagcagtttgctgacaagaacctgtcctatgatgagaggagcatcagcatcatgaaggtggcccaggccaagctgaaggagattggaccagatgacatgaacatggaggagtacaagaagtggcatgaggactacagcctcttcaggaaggtgtctgtgtacctgctgaccggcctggagctgtaccagaagggcaagtaccaggaggccctgagctacctggtgtatgcctaccagagcaatgctgccctgctgatgaagggccccaggagaggagtgaaggagagcgtgattgccctgtacagaaggaagtgcctgctggagctgaatgccaaggccgccagcctgtttgagaccaatgatgaccacagcgtgacagagggcatcaacgtgatgaatgagctgatcatcccctgcatccacctgatcatcaacaatgacatcagcaaggatgacctggatgccatcgaggtgatgaggaaccactggtgcagctacctgggccaggacattgctgagaacctgcagctgtgcctgggggagttcctgccccggctgctggaccccagcgctgagatcatcgtgctgaaggagccccccaccatccggcccaacagcccctatgacctgtgcagcagatttgctgctgtgatggagagcatccagggcgtgtccacagtgacagtgaagtag

SEQ ID NO: 283538 - DNA, 3138 bp, Artificial Sequence
  derived and/or modified sequence
atgaccgccgagctgcagcaggacgacgccgccggcgccgccgacggccatggaagttcttgccagatgctattaaaccagcttagggaaatcactgggattcaggacccttccttcctgcacgaagccttgaaggcaagtaacggcgatattactcaggctgtgtcactgcttaccgatgagagagtgaaagaaccatcccaagacaccgtcgcaacggaacccagcgaggtcgaagggagtgcagccaacaaggaagtgttagctaaggtcatagacctgactcatgacaacaaggatgatctgcaggctgctattgctctaagtttactcgagtctcctaagatccaagcagacggacgggatctcaaccgaatgcacgaggccacaagtgcagagaccaagcgcagtaagcggaagcggtgtgaagtgtggggtgagaatcccaatccaaatgactggcggagagtggatggctggcctgtggggttgaagaatgtcggcaatacttgttggttttccgccgtgattcaaagcctgttccaattaccggagtttcgcagactagtgctaagttattccctaccgcagaatgtacttgaaaactgcaggagccacacggagaaacggaatattatgttcatgcaggaactccaataccttttcgcattgatgatgggatcaaacaggaagttcgttgacccatccgctgcacttgatttactgaagggtgccttccggagtagtgaagaacagcaacaggatgtgtccgaatttacccacaagctgctggactggcttgaagatgcctttcagctggcagtgaatgtcaatagtccaaggaacaaatcagagaaccctatggtccaactcttctacggcacctttctgacagaaggagtgcgcgagggtaagccgttctgtaacaacgaaacgttcggacagtaccctctccaggtcaacggatatcgtaatctggatgagtgtctcgaaggcgctatggttgagggagacgtggagcttctcccatctgatcattcagtgaagtacgggcaggagaggtggtttacaaagctcccccctgtgctgacattcgagctgagtcggttcgagtttaaccagtccctgggccagccagagaagatccacaataagctggagttcccacagataatctacatggaccgctacatgtacagaagcaaagaactcatacgcaataaacgggagtgtatccggaagctgaaggaagaaattaaaatcctgcaacagaaattggagagatatgtgaaatatggttccgggccagcgcggtttccactgcctgatatgctcaaatacgtgatagagttcgcgtctaccaagccagcaagcgaatcttgcccaccagagagcgatacacacatgacacttcccctgtcctctgtgcattgttccgttagcgaccaaacctcaaaggaatctaccagcaccgagagttcttcacaggatgtcgaaagtactttctctagcccggaagactctctcccaaagagtaaaccactgacaagctcccgcagctctatggagatgccttcacagccagcaccacggacggtaacagacgaagaaatcaatttcgtgaaaacctgtctgcagcggtggaggagtgagattgagcaggacatccaggatctgaagacatgcatagcatccactacacagactattgagcagatgtattgtgacccgctcctgcgccaggtcccatacagactgcatgccgtgctggtccatgagggccaggcgaatgccgggcactattgggcatacatttacaaccagccacggcagtcttggctcaagtacaatgacatttccgtgaccgaatcgagttgggaggaggttgagcgggactcgtacgggggacttagaaacgtgagcgcatactgtctcatgtatataaatgacaagctgccctattttaatgccgaggctgcccctacggagtctgatcagatgagtgaagtagaagctttatctgttgaattgaagcattatatccaggaagacaattggaggtttgagcaagaagtggaggaatgggaggaggagcaaagttgcaaaatcccacaaatggagtcctctaccaacagctcatcccaggactattccacctcgcaggagccctcagttgccagttcccacggtgtacgatgtctcagtagtgagcatgcggtcattgttaaagagcagacagctcaggcaattgcaaacactgccagggcatacgagaagtctggcgtggaagctgcactttctgaggctttccatgaagaatacagccggttatatcagctcgccaaggaaacgcccactagccactccgatccacggctccagcacgtcctggtatacttctttcagaacgaggcacctaaacgtgtcgtggagcggaccctgttagagcagtttgccgataagaacctctcctatgatgagcgatccatctctataatgaaagtagctcaggctaaactgaaagagatcggcccggatgatatgaacatggaagaatataagaaatggcatgaagactacagtttgttccgtaaggtctccgtctacctccttaccggtctagagctgtaccagaaggggaaatatcaggaggccttatcctatctggtgtatgcctatcaaagcaacgccgcgctgttgatgaaaggaccccgccgaggtgtgaaggagtccgttattgccctctacagacgtaaatgcctgttggaattgaacgccaaggcagcatccttgtttgaaacaaacgatgaccattcggtaaccgaggggataaatgtgatgaacgaattgataatcccctgcatccatctgatcattaataatgacataagcaaggacgacctggacgctattgaggtgatgcgaaaccattggtgttcctaccttgggcaagatattgctgagaatctccagctgtgtttgggagagttcttgccacgccttctcgatccctcagctgaaatcatagttctcaaggagcctcctaccatcaggccaaactccccatatgatttgtgttcacggtttgccgccgttatggagtccatccagggggtgtctacagtcacagtgaagtag

SEQ ID NO: 283539 - DNA, 3138 bp, Artificial Sequence
  derived and/or modified sequence
atgactgcggaacttcaacaggatgatgccgctggggctgctgatgggcacggcagctcttgccagatgcttctcaaccagctgcgcgagatcaccggcatccaggaccctagcttcctgcacgaagccctaaaggcatctaacggagacatcacccaggccgtatcactgcttacagacgaaagggtgaaagagccgtcccaggatactgtggccacagagccgtcagaggtggaaggatccgcggcaaataaagaggttctcgccaaggtcattgaccttacacatgacaataaggacgacttgcaagccgctatagccttatcattgttggagagtcctaaaattcaggccgatggccgagatctaaataggatgcacgaggccacgtcagcagagactaagcgctcgaaaaggaagcggtgtgaggtatggggtgaaaatcccaatccaaacgactggagacgcgtggatggatggcctgttgggttgaagaatgtcggcaacacttgctggtttagcgcagtcattcagtcgctattccaactgcccgagtttaggagactagttttgtcttattccctgcctcaaaacgtgctcgagaactgtaggtcccacactgagaagcgcaacataatgttcatgcaagagctacaatacttatttgccctcatgatgggttcaaaccggaaatttgtagacccctccgccgctttggatctgttgaaaggggcatttcgttccagtgaagagcagcaacaagacgtgagtgagtttactcacaaattactcgattggctggaggacgccttccaactagctgtcaacgtaaactctcctagaaataagtctgagaaccccatggtacagctattctacggaacctttctcaccgagggagtgagagaggggaaacctttttgtaataatgagaccttcggccaataccctctgcaggtgaatggttacagaaatttagatgagtgccttgagggtgctatggtcgagggtgatgttgagcttctgccttctgaccatagtgtcaagtacggtcaggagcggtggtttactaagctccctccggtgttaacgttcgagctttcgcgtttcgagtttaatcagagtctaggacagcccgaaaagattcacaataagctggagttcccacaaatcatttacatggatcgttatatgtatagaagtaaagaactgatcaggaataagagagagtgcattagaaaactcaaggaggaaatcaagattctgcagcagaagttggagcggtacgtaaagtacgggtctggtccagcccgatttcccttgcccgatatgctcaaatacgtgatcgaatttgcgagtaccaaacctgccagcgaatcgtgtccacccgaaagcgatacccacatgaccttacccctcagctccgtccactgctctgtgtctgaccagactagcaaggagagtacctccaccgagtcgtcctctcaggacgtggaaagtacatttagctctcctgaggattcactgcctaagtccaaacctttgacttctagtcgcagctcaatggaaatgccatcacagccggctccacgaaccgtgactgacgaggaaatcaattttgtgaaaacatgcctacaacgttggagaagtgaaattgaacaggacattcaagatctcaagacgtgcattgcttcaacaacgcagactatcgaacagatgtactgtgatcctctcctccgtcaagttccctataggcttcacgctgtactggttcatgaaggacaggccaacgccggacactattgggcctatatctataatcagcctagacagagctggttgaagtacaatgacatttcggtgacagaaagcagttgggaagaggtggaaagggattcctatggtggattgcgtaatgtctcagcttactgtttgatgtatataaacgataagctgccttactttaatgcggaagcagcccctacagaaagtgatcaaatgagcgaggttgaagccctgagtgtcgagttgaagcactacatacaggaggacaactggcggttcgagcaagaagtggaggagtgggaagaagagcagtcctgcaaaattccacagatggaatcatcaacgaattctagcagccaggactacagcaccagccaggaaccatccgtggcgtcaagtcatggggtccggtgcttgagcagtgagcacgctgtgattgtgaaggagcagacagcacaggcaattgccaataccgctcgcgcttacgagaaatctggggtggaggcagctctgagcgaggcttttcacgaggagtattccagactgtaccagttggccaaggaaacacctacctcccattcagaccctagattacagcacgtccttgtctatttcttccagaatgaagcgcctaagagagtggtagaacgcactctgctggaacagtttgcagataaaaacctgtcttacgatgagcggtcgatatctattatgaaggtcgcccaggccaagctgaaagaaattgggcctgatgatatgaacatggaggaatataagaagtggcacgaagactattctctcttcagaaaagtcagcgtgtatctgctgacaggcctggagctgtatcagaagggcaaataccaagaggcactcagctatcttgtttatgcttaccagtccaacgccgctctgcttatgaaggggccaaggcggggtgtgaaggagtcggtaatcgcattatataggcgaaagtgtctgttggagctcaatgcgaaggcagccagcctgtttgaaacaaatgacgaccatagcgttacagaaggcatcaacgttatgaatgagctgattatcccctgcattcacctgatcattaataatgacatcagcaaggatgacctggatgcaatcgaagtgatgcgcaatcattggtgctcttatctgggccaggacatcgccgaaaacttacagctgtgtctgggtgagttcctccctaggctgttggacccatcagctgagattattgtactgaaggagccacccaccatcagacccaacagtccatacgacttatgcagcagattcgcagctgtgatggaaagcattcaaggtgtctctactgtcaccgtaaaatag

SEQ ID NO: 283540 - DNA, 4535 bp, Artificial Sequence
  derived and/or modified sequence
gagaccggtgacccgcggctgggcgcctcggccatgactgcggagctgcagcaggacgacgcggccggcgcggcagacggccacggctcgagctgccaaatgctgttaaatcaactgagagaaatcacaggcattcaggacccttcctttctccatgaagctctgaaggccagtaatggtgacattactcaggcagtcagccttctcactgatgagagagttaaggagcccagtcaagacactgttgctacagaaccatctgaagtagaggggagtgctgccaacaaggaagtattagcaaaagttatagaccttactcatgataacaaagatgatcttcaggctgccattgctttgagtctactggagtctcccaaaattcaagctgatggaagagatcttaacaggatgcatgaagcaacctctgcagaaactaaacgctcaaagagaaaacgctgtgaagtctggggagaaaaccccaatcccaatgactggaggagagttgatggttggccagttgggctgaaaaatgttggcaatacatgttggtttagtgctgttattcagtctctctttcaattgcctgaatttcgaagacttgttctcagttatagtctgccacaaaatgtacttgaaaattgtcgaagtcatacagaaaagagaaatatcatgtttatgcaagagcttcagtatttgtttgctctaatgatgggatcaaatagaaaatttgtagacccgtctgcagccctggatctattaaagggagcattccgatcatctgaggaacagcagcaagatgtgagtgaattcacacacaagctcctggattggctagaggacgcattccagctagctgttaatgttaacagtcccaggaacaaatctgaaaatccaatggtgcagctgttctatggtactttcctgactgaaggggttcgtgaaggaaaacccttttgtaacaatgagaccttcggccagtatcctcttcaggtaaacggttatcgcaacttagacgagtgtttggaaggggccatggtggagggtgatgttgagcttcttccctccgatcactcggtgaagtatggacaagagcgttggtttacaaagctacctccagtgttgacctttgaactctcaagatttgagtttaatcagtcccttgggcagccagagaaaattcacaataagctggaatttcctcagattatttatatggacaggtacatgtacaggagcaaggagcttattcgaaataagagagagtgtattcgaaagttgaaggaggaaataaaaattctgcagcaaaaattggaaaggtatgtgaaatatggctcaggcccagctcggttcccgctcccggacatgctgaaatatgttattgaatttgctagtacaaaacctgcctcagaaagctgtccacctgaaagtgacacacatatgacattaccactttcttcagtgcactgctcggtttctgaccagacatccaaggaaagtacaagtacagaaagctcttctcaggatgttgaaagtaccttttcttctcctgaagattctttacccaagtctaaaccactgacatcttctcggtcttccatggaaatgccttcacagccagctccacgaacagtcacagatgaggagataaattttgttaagacctgtcttcagagatggaggagtgagattgaacaagatatacaagatttaaagacttgtattgcaagtactactcagactattgaacagatgtactgcgatcctctccttcgtcaggtgccttatcgcttgcatgcagttcttgttcatgaaggacaagcaaatgctggacactattgggcctatatctataatcaaccccgacagagctggctcaagtacaatgacatctctgttactgaatcttcctgggaagaagttgaaagagattcctatggaggcctgagaaatgttagtgcttactgtctgatgtacattaatgacaaactaccctacttcaatgcagaggcagccccaactgaatcagatcaaatgtcagaagtggaagccctatctgtggaactcaagcattacattcaggaggataactggcggtttgagcaggaagtagaggagtgggaagaagagcagtcttgcaaaatccctcaaatggagtcctccaccaactcctcatcacaggactactctacatcacaagagccttcagtagcctcttctcatggggttcgctgcttgtcgtctgagcatgctgtgattgtaaaggagcaaactgcccaggctattgcaaacacagcccgtgcctatgagaagagcggtgtagaagcggcactgagtgaggcattccatgaagaatactccaggctctatcagcttgccaaagagacccccacctctcacagtgatcctcgacttcagcatgtccttgtctactttttccaaaatgaagcacccaaaagggtagtagaacgaacccttctggaacagtttgcagataaaaatcttagctatgatgaaagatcaatcagcattatgaaggtggctcaagcgaaactgaaggaaattggtccagatgacatgaatatggaagagtacaagaagtggcatgaagattatagtttgttccgaaaagtgtctgtgtatctcctaacaggcctagaactctatcaaaaaggaaagtaccaagaggcactttcctacctggtatatgcctaccagagcaatgctgccctgctgatgaaggggccccgccggggggtcaaagaatccgtgattgctttataccgaagaaaatgccttctggagctgaatgccaaagcagcttctctttttgaaacaaatgatgatcactccgtaactgagggcattaatgtgatgaatgaactgatcatcccctgcattcaccttatcattaataatgacatttccaaggatgatctggatgccattgaggtcatgagaaaccattggtgctcttaccttgggcaagatattgcagaaaatctgcagctgtgcctaggggagtttctacccagacttctagatccttctgcagaaatcatcgtcttgaaagagcctccaacaattcgacccaattctccctatgacctatgtagccgatttgcagctgtcatggagtcaattcagggagtttcaactgtgacagtgaaataagctcccacatgttcaaggcccattctggttcctggctgcctgcctcttgcacagaagttcgttgtcatagtgctcaccttgggaaaaggattaggtgggcacataagattccgatcagaccccaaccatgctgcatgtgtaaagaaggattgaaaataaaattgcactttttaggtacaaaatcataaaagctgtttcactagaaaaggcagaaagcagtgtattaaggtgttgaattacgccagaagacctgaaatgccttgtacctacaacaatgcttaggcttttctaagcctcttgccacttttaaaattatccttcaggcataaatatttttgacagcagaatagaagaatgattcatgagaacctgaaccagatgaacagctactagttattttatcaaatacagatgacatttaaaaattcttaactacaagagattagaaatataaaccttgcctggctcttgccaggagataacaaaatgggttgctgatgaactgcacccttttacatgtgggtagaatataagctcacatggcagtgagatgttgaaaagtcaaaagagacctgtctctctcctttcttttctatctttaaaccagaaaacctcatactcagtcctcagtgaaagaaagtaaagtattaaggactttagacagaagagcattgtgtaacttgactgaagatcatccattaatagttattaggcatttaggtaaaattttctaatacctaaaaattgtcaaaaacagtcaatagggctactgctggcccaaagaccatttaggtccacctcctcttttttgctctttttttttttctgtgacagtttcactgtgtcgcccaggctggcgttcagtggtgcaatctcagctcactgcaaactctgtctcctgggctcaagtgattctcgtgcctcagcctcccgaatagctggaattacgggcatgcaccaccacacctggctaatttttgtatttttaatagagatggggtttcaccatattggccaggctgatctctaactcctggcctcaagtgatctatctgcctccctcagcctcccaaagtctgggattgcagacaagtcatcgtacccggccttcttttttgcccttaaaagtaagggatgtgggtttgtacaaaaaaaaaaaaaaaaaaaaaaaaaccagcatacatatgcaaaactatatatatatgtatatgtagagaaaaatacttcccattgatcatttttaaaaggcttctgattggatattgtgttttaaccaaattttaaagattaatggaatcatgaaagggaaaaaaattgatacaactatgcagattttataaatgtgcaataaaagtatttgtttt

SEQ ID NO: 283541 - protein, 443 aa, Artificial Sequence
  derived and/or modified sequence
MTATAQPPSKAQAVHISAPSAAASTPVPSAPIDPQAQLEADKRAVYRHPLFPLLTLLFEKCEQATQGSECITSASFDVDIENFVHQQEQEHKPFFSDDPELDNLMVKAIQVLRIHLLELEKVNELCKDFCNRYITCLKTKMHSDNLLRNDLGGPYSPNQPSINLHSQDLLQNSPNSMSGVSNNPQGIVVPASALQQGNIAMTTVNSQVVSGGALYQPVTMVTSQGQVVTQAIPQGAIQIQNTQVNLDLTSLLDNEDKKSKNKRGVLPKHATNIMRSWLFQHLMHPYPTEDEKRQIAAQTNLTLLQVNNWFINARRRILQPMLDASNPDPAPKAKKIKSQHRPTQRFWPNSIAAGVLQQQGGAPGTNPDGSINLDNLQSLSSDSATMAMQQAMMAAHDDSLDGTEEEDEDEMEEEEEEELEEEVDELQTTNVSDLGLEHSDSLE

SEQ ID NO: 283542 - DNA, 1332 bp, Artificial Sequence
  derived and/or modified sequence
atgaccgctaccgcccagccccctagtaaagctcaggccgtccacatttccgccccctcagccgccgcaagcacacccgttccctccgcccccatagacccgcaagcgcagctggaagccgacaagagggcagtgtaccgccatcctctgttccctcttttaacactgctttttgaaaagtgcgagcaggccacccaaggatccgagtgcattacctctgcctcattcgacgtcgacatcgaaaactttgtgcatcagcaggagcaggaacacaaacccttcttttcagatgaccccgaactcgataacctgatggtgaaggctatccaggtactccgcatccacctcctcgagcttgaaaaggtaaatgagctctgtaaggacttctgtaacaggtatatcacctgcctgaaaactaaaatgcattctgataacctcttgaggaacgatctcggggggccgtactctccaaaccaaccatctattaacctgcattcccaagacctgctccagaattctcctaattcaatgtctggggtgtcaaacaatcctcagggaatcgtcgtaccagcctctgcactgcagcaagggaatatcgctatgacaacggtgaactcccaggtagtgtctggtggtgctttatatcagcctgtcactatggtgaccagccagggccaggtggtgactcaagcaattcctcagggggccatccagattcagaacacccaagttaacctcgacctcacttctctgctggataatgaagacaaaaaaagcaagaacaagagaggagtcttgccaaagcatgccactaatatcatgcgctcgtggctattccagcatctcatgcacccctaccctaccgaagacgagaagagacagatagccgcccagaccaacttaacgctgctgcaggtcaacaattggttcatcaatgccagaagacgcattctgcagccaatgctggacgcgtccaaccccgaccccgcacctaaggcgaagaaaattaaaagtcaacatcggcctacacagcgcttctggcccaattccattgcagccggagtgctccagcagcagggcggagcccccggcactaatcccgatgggtccataaatctggacaatctgcaatccctgagcagcgactccgcaaccatggccatgcagcaagctatgatggcggcgcacgacgactcccttgacggtactgaggaggaggacgaagacgaaatggaggaagaggaggaggaagagctcgaggaggaagtggacgagctacagacaacaaatgtgtccgacctaggacttgagcattctgattcactcgagtag

SEQ ID NO: 283543 - DNA, 1332 bp, Artificial Sequence
  derived and/or modified sequence
atgaccgccaccgcccagccaccgtccaaagctcaggcagtacacattagcgcgccctccgcagccgcatctacacctgtcccatctgctcccatagacccgcaggctcagctcgaagccgacaagcgggctgtctaccgtcaccctctttttccactgctaacgctgttgtttgagaaatgcgagcaggccactcagggatcagagtgcattacctctgcctctttcgatgtcgacatcgaaaacttcgtgcaccagcaggagcaggagcataagcctttcttcagcgatgatccagagctggacaacttaatggtcaaagccattcaagtcctccggatccatctactggaactagagaaggttaatgagttgtgcaaggacttctgtaatcggtacataacctgtctgaagacaaagatgcactccgacaatcttctgagaaacgaccttggggggccttactccccaaatcagccatccattaatctgcattcacaggaccttctccagaactcccccaattccatgtcaggcgtaagcaataatcctcagggcattgtggttccagccagtgccttgcaacaagggaatatcgccatgaccacagtgaattctcaggtggtgtccggtggtgccctgtatcagcctgtaactatggttactagccagggtcaggttgtaactcaggcaataccacagggcgcaatccagatccagaatacacaagtcaacctcgacctcaccagcttacttgataatgaggataagaaaagcaagaacaaacgaggagttctgcctaaacatgccactaacattatgagatcctggctgtttcagcacctgatgcacccctacccaactgaagatgagaaacggcagatcgctgcccagactaatctgactttactgcaagttaataactggttcatcaatgctagacgcagaattctgcagccaatgcttgacgctagtaacccagatcctgctccaaaggccaaaaagatcaagtcccagcatagaccaacccagcggttttggcccaattccattgccgcaggagtgttgcagcagcagggaggtgctcctggcaccaatcctgatggttccataaacttagacaatctgcagtctctgtcttccgacagcgccactatggccatgcagcaggccatgatggcggctcatgacgattcactggacggaacggaggaagaagatgaagatgaaatggaggaggaggaagaggaggaactcgaagaggaagtggatgagctacaaacgaccaatgtctctgatttagggctggagcattcggactctttggaatag

SEQ ID NO: 283544 - DNA, 1227 bp, Artificial Sequence
  derived and/or modified sequence
atgagtcggcctcatccaactcgcacagcccaccgccatcccctgttccctctcctcacattgctgttcgagaaatgtgagcaggccacacagggcagcgagtgcattacctccgcaagttttgacgtggacattgagaatttcgtccaccagcaggagcaggaacataagccttttttttcagatgatcctgagcttgacaatctgatggtgaaggctattcaggtgttacgcattcacctactcgagctggaaaaagtcaatgagctatgtaaggacttctgcaacaggtacattacttgcttgaagacgaagatgcattccgataatctgctcaggaatgacctaggggggccttacagccccaaccagccatcaatcaacttacattcccaagatctattgcagaacagtcccaacagcatgtctggggtctctaataacccccaaggtatcgttgttcccgcctccgcacttcagcaaggcaatattgcaatgacaaccgttaattcccaggttgtgtccgggggagcactctaccagccagtcacgatggtgactagtcaaggtcaagtggtgactcaggctattccccagggtgccatccagatccagaatacacaagtgaatcttgatttaacgtctctgctggacaatgaggataagaagagcaagaacaagagaggcgtgctgccaaagcacgcaaccaacataatgcgcagttggctcttccagcatcttatgcatccctacccgacagaggatgagaaaaggcagatcgcggcgcagactaatttaacgctgctgcaggtgaataactggttcatcaatgcaaggcgtagaatcttacagcccatgctggacgctagcaatccagaccccgctcccaaagcaaaaaaaatcaagtcccagcaccggccaacgcagagattctggcccaactcaattgccgccggggtcctacagcagcaggggggggcaccaggaaccaaccctgacggatctattaatttggacaatctgcagagtctctcctccgactccgccacgatggccatgcagcaggctatgatggcggcgcacgacgacagcttagacggaaccgaggaagaagacgaggacgaaatggaggaagaagaagaggaggagctcgaagaggaagtggacgaactccaaaccaccaacgtgtcagatctggggcttgagcacagcgatagcctcgagtag

SEQ ID NO: 283545 - DNA, 1332 bp, Artificial Sequence
  derived and/or modified sequence
atgacagccacagcccagccccccagcaaggcccaggccgtgcacatcagcgcccccagcgctgctgccagcacccctgtgcccagcgcccccatcgacccccaggcccagctggaggccgacaagagagctgtgtaccgccaccccctcttccccctgctgaccctgctgtttgagaagtgtgagcaggccacccagggcagcgagtgcatcaccagcgccagctttgatgtggacattgaaaattttgtgcaccagcaggagcaggagcacaagcccttcttcagtgatgatcctgagctggacaacctgatggtgaaggccatccaggtgctgcgcatccacctgctggagctggagaaggtgaatgagctgtgcaaggacttctgcaaccgctacatcacctgcctgaagaccaagatgcacagcgacaacctgctgagaaatgacctgggcggcccctacagccccaaccagcccagcatcaacctgcacagccaggacctgctgcagaacagccccaacagcatgtctggagtgagcaacaacccccagggcatcgtggtgcctgccagcgccctgcagcagggcaacatcgccatgaccaccgtgaacagccaggtggtgtctgggggcgccctgtaccagcctgtgaccatggtgaccagccagggccaggtggtgacccaggccatcccccagggcgccatccagatccagaacacccaggtgaacctggacctgaccagcctgctggacaatgaagacaagaagagcaagaacaagaggggcgtgctgcccaagcacgccaccaacatcatgaggtcctggctgttccagcacctgatgcacccctaccccacagaagatgagaagaggcagattgctgcccagaccaacctgaccctgctgcaggtgaacaactggttcatcaatgcccggcggcgcatcctgcagcccatgctggatgccagcaacccagaccctgcccccaaggccaagaagatcaagagccagcaccggcccacccagcgcttctggcccaacagcattgctgctggggtgctgcagcagcagggcggggcccctggcaccaacccagatggcagcatcaacctggacaacctgcagagcctgagcagtgacagcgccaccatggccatgcagcaggccatgatggccgcccatgatgacagcctggatggaacagaggaggaggatgaagatgagatggaggaggaggaggaggaggagctggaggaggaggtggatgagctgcagaccaccaacgtgtctgacctgggcctggagcacagcgacagcctggagtag

SEQ ID NO: 283546 - DNA, 1227 bp, Artificial Sequence
  derived and/or modified sequence
atgagccggccccaccccaccaggacagcccaccgccaccccctcttccccctgctgaccctgctgtttgagaagtgtgagcaggccacccagggcagcgagtgcatcaccagcgccagctttgatgtggacatcgagaactttgtgcaccagcaggagcaggagcacaagcccttcttcagtgatgatcctgagctggacaacctgatggtgaaggccatccaggtgctgcgcatccacctgctggagctggagaaggtgaatgagctgtgcaaggacttctgcaaccgctacatcacctgcctgaagaccaagatgcacagcgacaacctgctgagaaatgacctgggcggcccctacagccccaaccagcccagcatcaacctgcacagccaggacctgctgcagaacagccccaacagcatgtctggagtgagcaacaacccccagggcatcgtggtgcctgccagcgccctgcagcagggcaacatcgccatgaccaccgtgaacagccaggtggtgtctggaggagccctgtaccagcctgtgaccatggtgaccagccagggccaggtggtgacccaggccatcccccagggcgccatccagatccagaacacccaggtgaacctggacctgaccagcctgctggacaatgaagacaagaagagcaagaacaagaggggcgtgctgcccaagcacgccaccaacatcatgaggtcctggctgttccagcacctgatgcacccctaccccacagaagatgagaagaggcagattgctgcccagaccaacctgaccctgctgcaggtgaacaactggttcatcaatgcccggcggcgcatcctgcagcccatgctggatgccagcaacccagaccctgcccccaaggccaagaagatcaagagccagcaccggcccacccagcgcttctggcccaacagcattgctgctggggtgctgcagcagcagggcggggcccctggcaccaacccagatggcagcatcaacctggacaacctgcagagcctgagcagtgacagcgccaccatggccatgcagcaggccatgatggccgcccatgatgacagcctggatggaacagaggaggaggatgaagatgagatggaggaggaggaggaggaggagctggaggaggaggtggatgagctgcagaccaccaacgtgtctgacctgggcctggagcacagcgacagcctggagtag

SEQ ID NO: 283547 - DNA, 1332 bp, Artificial Sequence
  derived and/or modified sequence
atgaccgccaccgcccagccccccagcaaggcccaggccgtgcacatctctgcccctagtgccgccgcatctacacccgtgccctcggcccctatcgatccacaggcccagttggaagctgacaaacgggctgtgtaccggcatcccctgttcccgttactgaccctgctgttcgaaaagtgcgagcaggcaactcagggttctgaatgtatcacttcagcatccttcgacgtcgatatcgagaatttcgtgcatcagcaggagcaggaacataagccctttttctccgacgatccggagttggataatttgatggtgaaggctatccaggttctgcgaatccatttgctggagctggaaaaagtaaatgagctctgtaaggatttctgcaatcgatacataacgtgtctcaagaccaagatgcacagcgataatctgctccgcaatgacctgggaggaccctacagtcccaaccagccatctatcaatctgcactctcaggatctgctccagaactccccaaattctatgtctggcgtcagcaacaatccccagggaattgtagttcccgccagcgccctgcagcaaggtaacatagccatgaccacggtgaactcacaggtggtctctggtggcgccctctaccagccggtcaccatggttacctctcaggggcaggtggtgacacaggcaattccacagggcgctatccagatccaaaacacccaggtgaacctggatttgacctccctgctggacaatgaggataagaagtcgaagaacaaaaggggagtgctgcccaagcacgccaccaatatcatgcgatcttggctattccagcacctgatgcatccataccctacagaggacgagaagcggcagatagccgcccagacaaacctgactctcttgcaggttaataattggttcatcaacgctcgccggagaatcttacagcctatgctcgatgcctcaaatcccgatccagcccctaaggctaaaaagatcaaaagccaacaccgcccgacgcaaagattctggcccaacagtattgctgctggagtcctacagcagcagggcggggcaccaggaaccaaccctgatggtagcattaatctagataacctgcaaagcctctctagtgattccgcaacaatggccatgcaacaagccatgatggccgcccatgacgactcattggacggcacagaggaagaggatgaggatgagatggaggaggaggaggaagaagaactggaggaagaagtagatgaacttcagaccacaaatgtgtctgatctcgggttggaacactccgactctctcgagtag

SEQ ID NO: 283548 - DNA, 1332 bp, Artificial Sequence
  derived and/or modified sequence
atgaccgccaccgcccagccccccagcaaggcccaggccgtgcacatatctgcccctagcgctgccgcgtcaacccctgtacccagcgccccaattgatcctcaggcccagctggaggcggacaagcgggcagtgtatcgtcatcccctgtttcccctactgactcttctctttgaaaaatgcgagcaggctacacaaggttctgagtgtattacctccgcatcatttgatgtggacatagagaattttgtacaccagcaggaacaagagcacaaacccttctttagcgatgaccctgaactggacaacctgatggtgaaagccatccaagtgctccgcattcatctacttgagttggaaaaggtgaatgaattgtgtaaagacttttgtaatcgatacatcacttgcctgaagactaagatgcattctgacaacttgttgcgcaacgacttagggggcccatactcacctaatcagccgtccataaaccttcattcacaggatctgctgcaaaactcacccaatagcatgtccggggtctcgaataatccgcaggggattgtggtgcctgccagcgctctgcagcaggggaacattgcaatgaccactgtaaacagtcaagtcgtatcgggaggagccctgtaccagcctgtaaccatggtgacgagccaggggcaggtcgttacccaggctataccgcagggagcgattcagatccagaacacccaagtcaatctggaccttacaagtctcctggacaacgaggacaaaaaaagcaagaataaacggggagtgctgccgaagcatgccacgaacatcatgcggtcatggctgtttcagcacctaatgcatccctatcccacagaagacgaaaaacggcaaattgctgctcagactaatctgaccctcctccaagtcaacaactggtttattaacgcacggaggcggattctgcagcccatgttagacgcgtctaaccccgacccggcgcccaaggctaagaaaattaagtcccaacaccggcccacccagagattctggcccaattcaatcgctgccggtgtgctgcagcagcagggaggagcgcccggcaccaatcccgacggctcaattaacctcgataatctccagagcctgtccagtgattcagctaccatggctatgcaacaggccatgatggctgcgcatgacgattccctggatggaacagaagaggaggacgaagacgaaatggaagaagaagaggaggaagagctcgaagaggaggtggacgagttacagaccacaaacgtgagtgacctaggtttagagcattctgatagcctggaatag

SEQ ID NO: 283549 - DNA, 1227 bp, Artificial Sequence
  derived and/or modified sequence
atgagccggccccaccccacccggaccgcccaccggcaccccctgtttccactcctcacactgttgttcgagaagtgtgagcaggccacacagggatccgaatgtataacctcggcgagctttgatgtggacattgaaaattttgtccatcagcaggagcaggagcataaacctttcttctcagacgatccagagctggataacctcatggttaaggcaattcaggtgttgcgaattcacctgttagagttggaaaaggttaacgagctgtgtaaggatttttgtaatcgctacattacctgtcttaaaaccaagatgcattcggacaaccttcttaggaatgaccttgggggcccatatagtccaaatcagcccagcatcaatctacatagccaggaccttctgcagaattcacctaatagtatgtcgggcgtctctaataaccctcaagggatagtcgtccctgcttcagcactgcagcagggaaacatagcaatgacgacagttaattcccaggtggtctcaggaggcgccttgtatcagcccgtgaccatggtgacctcacagggacaagtggtaacccaggcaatccctcagggcgcgattcagattcaaaatacccaggtaaacctagacctgacatccctactcgacaacgaagacaagaagagcaagaacaaacggggggtacttcctaaacatgcaacgaatattatgagatcctggttattccagcacttgatgcatccttaccccacagaagatgagaaacgacagattgctgctcagaccaatctcaccctgttgcaagtcaacaactggtttatcaatgcgaggaggagaatactgcagcccatgctggacgcttcgaatccagaccctgccccaaaagccaagaagattaagtcacagcataggcctacccagcggttctggccaaatagcatcgctgccggcgtacttcagcaacagggcggcgctccaggaactaacccagacgggagcatcaatctggacaacctgcaatctctatccagcgactccgccaccatggcaatgcaacaggctatgatggccgctcacgacgactctctggatggcacggaggaggaagatgaagacgagatggaggaagaggaggaagaggaactggaagaggaagtggatgagctgcagaccacaaacgtttcagacctcggtcttgaacacagcgattctttggaatag

SEQ ID NO: 283550 - DNA, 1709 bp, Artificial Sequence
  derived and/or modified sequence
gggtccctgtgccgctgacgtcccgagcagtgctgggaagtataggctgtgttgtcacgccggtgtcagtctgatgaagattggcatcaggtgaagtctggagcaggacttctgaggctttctatcctccatgctgctcactagaaaaggggctgtgaactgtgctttggctctagcagacaggaagaaattctggcccagctggaagtagaaagaggggagtgagtctcctgaggaccatctcagaggccccgggatcacccgaacaatgacggcaaccgcccagccaccctccaaggcccaggctgtccacatctctgccccctcagctgctgccagcacacctgtgcccagtgcccccatcgacccccaggcccagctggaggctgacaagcgagctgtatacaggcaccctcttttcccgctcctgacgctgctgtttgagaaatgtgaacaggccacccagggctctgagtgcatcacctccgccagctttgatgtggacatcgagaactttgtccaccagcaggaacaggagcacaaacccttcttcagcgatgacccagaactggacaatctgatggtgaaggcaatccaggtcctgagaatccacctgctggagctggagaaagtcaatgaactctgcaaggacttttgtaaccgttacatcacctgcctcaaaaccaagatgcacagcgacaacctgctcaggaatgatctaggggggccctactcccccaaccagccctccatcaaccttcactcacaggacctcctgcagaattcccccaattccatgtccggagtctccaataacccccaggggattgtggtcccagcctcagcgctccagcagggcaacatcgccatgacaaccgtcaactcacaagttgtgtcaggtggagccttataccaaccggttaccatggtaacctcccagggtcaggtggtcacccaagcaatcccccagggagccatccagatccagaacacacaggttaaccttgacctcacctccctcctggacaatgaggataagaagtccaagaacaaacgaggagtcttgcccaagcatgccaccaatataatgcgttcttggctcttccagcatctcatgcacccctaccccacggaggatgagaagaggcagatcgcagcccagaccaacctcaccctcctgcaagtaaacaactggttcatcaatgcccggaggcgcatcctgcagcccatgcttgatgccagcaacccagatcctgcccccaaagccaagaagatcaagtctcagcaccggcccacccaaagattctggcccaactccatcgctgcgggggtgctgcagcagcagggcggtgccccagggacaaaccccgatggttccatcaacttggacaacctgcagtccctgtcctcagacagtgccaccatggccatgcagcaggctatgatggctgcacacgatgactcattggatgggacagaagaagaggatgaggatgagatggaagaggaggaggaggaggagctggaggaggaggtcgacgagctgcagacgacaaatgtcagcgacctgggcttggaacacagtgactccctggagtagtcgggcagcccagatggcactgatcactgagcaggagaggagtgtcgccgggaggccttcagggtgggggggaaggggacatgggcaggaagcaccgagggagttgggc

SEQ ID NO: 283551 - DNA, 1673 bp, Artificial Sequence
  derived and/or modified sequence
gtgccgctgacgtcccgagcagtgctgggaagtataggctgtgttgtcacgccggtgtcagtctgatgaagattggcatcaggtgctttggctctagcagacaggaagaaattctggcccagctggaagtagaaagaggggagtgagtctcctgaggaccatctcagaggccccgggatcacccgaacaatgacggcaaccgcccagccaccctccaaggcccaggctgtccacatctctgccccctcagctgctgccagcacacctgtgcccagtgcccccatcgacccccaggcccagctggaggctgacaagcgagctgtatacaggcaccctcttttcccgctcctgacgctgctgtttgagaaatgtgaacaggccacccagggctctgagtgcatcacctccgccagctttgatgtggacatcgagaactttgtccaccagcaggaacaggagcacaaacccttcttcagcgatgacccagaactggacaatctgatggtgaaggcaatccaggtcctgagaatccacctgctggagctggagaaagtcaatgaactctgcaaggacttttgtaaccgttacatcacctgcctcaaaaccaagatgcacagcgacaacctgctcaggaatgatctaggggggccctactcccccaaccagccctccatcaaccttcactcacaggacctcctgcagaattcccccaattccatgtccggagtctccaataacccccaggggattgtggtcccagcctcagcgctccagcagggcaacatcgccatgacaaccgtcaactcacaagttgtgtcaggtggagccttataccaaccggttaccatggtaacctcccagggtcaggtggtcacccaagcaatcccccagggagccatccagatccagaacacacaggttaaccttgacctcacctccctcctggacaatgaggataagaagtccaagaacaaacgaggagtcttgcccaagcatgccaccaatataatgcgttcttggctcttccagcatctcatgcacccctaccccacggaggatgagaagaggcagatcgcagcccagaccaacctcaccctcctgcaagtaaacaactggttcatcaatgcccggaggcgcatcctgcagcccatgcttgatgccagcaacccagatcctgcccccaaagccaagaagatcaagtctcagcaccggcccacccaaagattctggcccaactccatcgctgcgggggtgctgcagcagcagggcggtgccccagggacaaaccccgatggttccatcaacttggacaacctgcagtccctgtcctcagacagtgccaccatggccatgcagcaggctatgatggctgcacacgatgactcattggatgggacagaagaagaggatgaggatgagatggaagaggaggaggaggaggagctggaggaggaggtcgacgagctgcagacgacaaatgtcagcgacctgggcttggaacacagtgactccctggagtagtcgggcagcccagatggcactgatcactgagcaggagaggagtgtcgccgggaggccttcagggtgggggggaaggggacatgggcaggaagcaccgagggagttgggccctagcttccccaaatcagtagcttgaagaaaggcaaaggaga

SEQ ID NO: 283552 - DNA, 1870 bp, Artificial Sequence
  derived and/or modified sequence
agtctgatgaagattggcatcaggtgaagtctggagcaggacttctgaggctttctatcctccatgctgctcactagaaaaggggctgtgaactgtgctttggctctagcagacaggaagaaattctggcccagctggaagtagaaagaggggagtgagtctcctgaggaccatctcagaggccccgggatcacccgaacagtcctccatgtgaatcaatcccatgatgcaacatgcctccccagcccccgctctgacgatgatggccacgcagaatgtcccgcccccaccctaccaggacagcccacaggcaccctcttttcccgctcctgacgctgctgtttgagaaatgtgaacaggccacccagggctctgagtgcatcacctccgccagctttgatgtggacatcgagaactttgtccaccagcaggaacaggagcacaaacccttcttcagcgatgacccagaactggacaatctgatggtgaaggcaatccaggtcctgagaatccacctgctggagctggagaaagtcaatgaactctgcaaggacttttgtaaccgttacatcacctgcctcaaaaccaagatgcacagcgacaacctgctcaggaatgatctaggggggccctactcccccaaccagccctccatcaaccttcactcacaggacctcctgcagaattcccccaattccatgtccggagtctccaataacccccaggggattgtggtcccagcctcagcgctccagcagggcaacatcgccatgacaaccgtcaactcacaagttgtgtcaggtggagccttataccaaccggttaccatggtaacctcccagggtcaggtggtcacccaagcaatcccccagggagccatccagatccagaacacacaggttaaccttgacctcacctccctcctggacaatgaggataagaagtccaagaacaaacgaggagtcttgcccaagcatgccaccaatataatgcgttcttggctcttccagcatctcatgcacccctaccccacggaggatgagaagaggcagatcgcagcccagaccaacctcaccctcctgcaagtaaacaactggttcatcaatgcccggaggcgcatcctgcagcccatgcttgatgccagcaacccagatcctgcccccaaagccaagaagatcaagtctcagcaccggcccacccaaagattctggcccaactccatcgctgcgggggtgctgcagcagcagggcggtgccccagggacaaaccccgatggttccatcaacttggacaacctgcagtccctgtcctcagacagtgccaccatggccatgcagcaggctatgatggctgcacacgatgactcattggatgggacagaagaagaggatgaggatgagatggaagaggaggaggaggaggagctggaggaggaggtcgacgagctgcagacgacaaatgtcagcgacctgggcttggaacacagtgactccctggagtagtcgggcagcccagatggcactgatcactgagcaggagaggagtgtcgccgggaggccttcagggtgggggggaaggggacatgggcaggaagcaccgagggagttgggccctagcttccccaaatcagtagcttgaagaaaggcaaaggagacacctgttccttcccaaccaccgagcttcaatgaggaccccagccccacttccctggaactgccgaggactctgtttggcggggccagtcgagcagcctgtgtggaaagacaggagtgagatctggactcaccaaatccctgaggatagatggcacccatggcccccacccacggaaggacttgagttgtttacaagccctgcactgaggcagatt

SEQ ID NO: 283553 - DNA, 1332 bp, Artificial Sequence
  derived and/or modified sequence
atgaccgcaaccgctcagccgccatcaaaggcacaagcggtccatatcagtgctccctctgccgcagcctccactccagtgcccagtgcccctatagacccccaggcccagctagaagcagacaagagggccgtgtaccgccacccactctttcctctcctcacactgttatttgagaagtgtgaacaggctactcaggggagcgaatgcattacttcagccagttttgatgtcgatatagagaatttcgtgcaccagcaggaacaggagcacaagccctttttttccgatgatccagagctggataaccttatggtaaaggccattcaggtgttgcgaatccacttgctggagctggagaaagtcaacgaactttgcaaggatttttgcaaccgttatattacatgtctgaagactaaaatgcactcagataacctgttacgcaatgatctgggcggaccatattctccaaatcaaccctctataaaccttcactcgcaagacctgctccagaacagtcccaacagtatgtccggagtgagcaacaacccccagggtatcgtggtgccggcttcagcgctccaacaggggaacattgccatgaccaccgtaaacagccaggtagttagcgggggagctctctatcagcccgtgaccatggttacgagccaggggcaggtggtgacccaggcgatcccccagggagccatacagatccaaaatacccaggtcaacctcgatcttacatcacttctggacaacgaagacaaaaagtccaaaaataagaggggggtgctgccaaagcacgccaccaatataatgagatcatggctattccagcacctcatgcatccctatccgactgaggatgagaagcgacaaatagctgcccagaccaatctgacgctgttacaggtgaataactggttcatcaacgcccgacggaggattctgcagcctatgctggatgcttccaacccggacccagccccaaaagctaaaaagatcaaatctcagcaccggccaacgcagcgtttttggcccaattccattgctgcaggagtgctgcaacagcaggggggagcacccggtacaaacccagacgggtctatcaatctggacaacctccaaagtttgtcgtcagactcagccactatggcaatgcagcaggccatgatggccgcacacgatgacagtttggatggaacagaggaggaagacgaggatgagatggaagaggaagaagaggaagagctcgaagaagaggttgatgagttgcagaccactaatgtttctgacctcggcctcgagcactccgactcactagagtag

SEQ ID NO: 283554 - DNA, 1332 bp, Artificial Sequence
  derived and/or modified sequence
atgactgcgaccgcccaacccccatccaaagctcaggccgttcatatctctgcacctagtgccgctgcaagtacccccgtcccaagcgctcccatcgaccctcaggctcagctggaggccgataaaagggctgtgtacaggcatcccttatttccactactcacccttctcttcgaaaaatgcgaacaggctacacaaggttccgagtgcatcacctcagcatcattcgacgtggacattgaaaacttcgttcaccagcaagaacaggagcacaagccattttttagtgacgaccccgagctggacaaccttatggttaaggccattcaagtgctgagaatccacttactcgagctcgagaaagttaacgaattgtgcaaagacttttgtaacaggtatatcacttgtctgaaaaccaaaatgcactcagacaacctcctcaggaacgatctcggcggaccctattcacccaaccagccctctattaacctccattctcaggatctccttcagaattctcccaattctatgtcgggcgtgtccaataacccccaggggattgtcgtgcctgcatctgccctccaacagggtaacattgcaatgaccaccgtgaacagccaagtcgtctctggaggagccctctatcagcccgttactatggtcacatcccaggggcaagttgtgacccaagcaatcccgcagggcgcaatccagatccaaaacacacaagtcaatctagatctgactagcctgctggataatgaggataaaaagtcgaaaaacaagcggggtgtactaccaaagcacgccactaacatcatgagatcctggctgtttcagcatttgatgcacccctacccaaccgaggacgagaagcgtcagatcgccgcacagacaaacttgacccttctgcaggtcaacaactggtttattaacgcgcgacgacgtattctgcagccgatgcttgacgcttccaatccggatccagctccaaaggctaagaagatcaagtcacagcacaggcccacacaaaggttctggccaaatagtatcgccgcaggggttctgcaacagcaagggggagcccctgggactaaccccgatggatccataaatttggataatttacagtcgctcagctctgattccgctaccatggcaatgcagcaggccatgatggctgcccatgacgacagcttggacggcaccgaggaggaggacgaagacgagatggaagaagaggaggaggaggagctcgaggaggaagtcgatgagctccaaaccaccaacgtctcagatcttgggttggaacacagtgacagcctggagtag

SEQ ID NO: 283555 - DNA, 1227 bp, Artificial Sequence
  derived and/or modified sequence
atgtcacgccctcacccgacaagaacagcgcataggcaccccctttttccactcctgacactgctcttcgagaagtgcgagcaagccactcagggctcagaatgcattacttcagcctctttcgacgtggatattgaaaattttgtccatcaacaggagcaggaacataaacctttcttctctgatgatcccgaactggacaatctgatggtcaaggccattcaagtcctacgtattcatctcctggagttggaaaaagtgaatgagttatgcaaggacttttgcaatcgatacattacatgccttaaaacgaaaatgcactcagataatctgctacggaacgacctaggtggaccttacagccccaaccagccctcaattaatctccactcccaggatcttctacaaaactcaccaaattccatgagcggagtgtcaaataacccacaagggatcgtagtgccggcttctgctttgcagcaaggtaacatcgcaatgaccacagtcaattcacaggtcgtgtctggcggtgcattataccagccagttactatggttacaagccaagggcaggttgtcacacaagcaattccacagggtgcaatccagatccagaacacccaggttaacctcgacttaacctctctattggacaacgaagataaaaagtcgaaaaataaacggggagtactcccgaaacacgccaccaatatcatgagatcatggctgtttcaacacctgatgcacccttatcctaccgaggacgagaagcgccagatcgctgcgcagactaaccttaccctgcttcaggtgaataactggtttataaacgcgagaaggaggatcctgcagcctatgctggacgcatccaacccagaccccgctcccaaggccaaaaaaatcaagagtcaacacagacccacccagcgcttctggccaaactccatagccgctggcgtcctccaacagcaaggaggagctcccggaaccaatccagacgggagtattaacctggacaacctgcagagcctgtcaagcgattccgccaccatggcgatgcagcaagctatgatggccgctcatgacgacagtctggatgggactgaggaggaggacgaagacgagatggaggaggaggaagaggaggagttggaggaagaagtggacgaattgcagaccacaaacgtgagcgaccttggcttggagcatagcgactcattggaatag

SEQ ID NO: 283556 - DNA, 1332 bp, Artificial Sequence
  derived and/or modified sequence
atgaccgccaccgcccagccccccagcaaggcccaggccgtgcacatcagcgcccccagcgccgccgccagcacccccgtgcccagcgcccccatcgacccccaggcccagctggaggccgacaagagagccgtgtacagacaccccctgttccccctgctgaccctgctgttcgagaagtgcgagcaggccacccagggcagcgagtgcatcaccagcgccagcttcgacgtggacatcgagaacttcgtgcaccagcaggagcaggagcacaagcccttcttcagcgacgaccccgagctggacaacctgatggtgaaggccatccaggtgctgagaatccacctgctggagctggagaaggtgaacgagctgtgcaaggacttctgcaacagatacatcacctgcctgaagaccaagatgcacagcgacaacctgctgagaaacgacctgggcggcccctacagccccaaccagcccagcatcaacctgcacagccaggacctgctgcagaacagccccaacagcatgagcggcgtgagcaacaacccccagggcatcgtggtgcccgccagcgccctgcagcagggcaacatcgccatgaccaccgtgaacagccaggtggtgagcggcggcgccctgtaccagcccgtgaccatggtgaccagccagggccaggtggtgacccaggccatcccccagggcgccatccagatccagaacacccaggtgaacctggacctgaccagcctgctggacaacgaggacaagaagagcaagaacaagagaggcgtgctgcccaagcacgccaccaacatcatgagaagctggctgttccagcacctgatgcacccctaccccaccgaggacgagaagagacagatcgccgcccagaccaacctgaccctgctgcaggtgaacaactggttcatcaacgccagaagaagaatcctgcagcccatgctggacgccagcaaccccgaccccgcccccaaggccaagaagatcaagagccagcacagacccacccagagattctggcccaacagcatcgccgccggcgtgctgcagcagcagggcggcgcccccggcaccaaccccgacggcagcatcaacctggacaacctgcagagcctgagcagcgacagcgccaccatggccatgcagcaggccatgatggccgcccacgacgacagcctggacggcaccgaggaggaggacgaggacgagatggaggaggaggaggaggaggagctggaggaggaggtggacgagctgcagaccaccaacgtgagcgacctgggcctggagcacagcgacagcctggagtag

SEQ ID NO: 283557 - DNA, 1227 bp, Artificial Sequence
  derived and/or modified sequence
atgagcagaccccaccccaccagaaccgcccacagacaccccctgttccccctgctgaccctgctgttcgagaagtgcgagcaggccacccagggcagcgagtgcatcaccagcgccagcttcgacgtggacatcgagaacttcgtgcaccagcaggagcaggagcacaagcccttcttcagcgacgaccccgagctggacaacctgatggtgaaggccatccaggtgctgagaatccacctgctggagctggagaaggtgaacgagctgtgcaaggacttctgcaacagatacatcacctgcctgaagaccaagatgcacagcgacaacctgctgagaaacgacctgggcggcccctacagccccaaccagcccagcatcaacctgcacagccaggacctgctgcagaacagccccaacagcatgagcggcgtgagcaacaacccccagggcatcgtggtgcccgccagcgccctgcagcagggcaacatcgccatgaccaccgtgaacagccaggtggtgagcggcggcgccctgtaccagcccgtgaccatggtgaccagccagggccaggtggtgacccaggccatcccccagggcgccatccagatccagaacacccaggtgaacctggacctgaccagcctgctggacaacgaggacaagaagagcaagaacaagagaggcgtgctgcccaagcacgccaccaacatcatgagaagctggctgttccagcacctgatgcacccctaccccaccgaggacgagaagagacagatcgccgcccagaccaacctgaccctgctgcaggtgaacaactggttcatcaacgccagaagaagaatcctgcagcccatgctggacgccagcaaccccgaccccgcccccaaggccaagaagatcaagagccagcacagacccacccagagattctggcccaacagcatcgccgccggcgtgctgcagcagcagggcggcgcccccggcaccaaccccgacggcagcatcaacctggacaacctgcagagcctgagcagcgacagcgccaccatggccatgcagcaggccatgatggccgcccacgacgacagcctggacggcaccgaggaggaggacgaggacgagatggaggaggaggaggaggaggagctggaggaggaggtggacgagctgcagaccaccaacgtgagcgacctgggcctggagcacagcgacagcctggagtag

SEQ ID NO: 283558 - protein, 148 aa, Artificial Sequence
  derived and/or modified sequence
MDLTKMGMIQLQNPSHPTGLLCKANQMRLAGTLCDVVIMVDSQEFHAHRTVLACTSKMFEILFHRNSQHYTLDFLSPKTFQQILEYAYTATLQAKAEDLDDLLYAAEILEIEYLEEQCLKMLETIQASDDNDTEATMADGGAEEEEDR

SEQ ID NO: 283559 - protein, 115 aa, Artificial Sequence
  derived and/or modified sequence
MDLTKMGMIQLQNPSHPTGLLCKANQMRLAGTLCDVVIMVDSQEFHAHRTVLACTSKMFEILFHRNSQHYTLDFLSPKTFQQILEYAYTATLQAKAEDLDDLLYAAEILEIEYLE

SEQ ID NO: 283560 - DNA, 447 bp, Artificial Sequence
  derived and/or modified sequence
atggacctgaccaagatgggcatgatccagctgcagaaccccagccaccccaccggcctgctgtgcaaggccaaccagatgagactggccggcaccctgtgcgacgtggtgatcatggtggacagccaggagttccacgcccacagaaccgtgctggcctgcaccagcaagatgttcgagatcctgttccacagaaacagccagcactacaccctggacttcctgagccccaagaccttccagcagatcctggagtacgcctacaccgccaccctgcaggccaaggccgaggacctggacgacctgctgtacgccgccgagatcctggagatcgagtacctggaggagcagtgcctgaagatgctggagaccatccaggccagcgacgacaacgacaccgaggccaccatggccgacggcggcgccgaggaggaggaggacagatag

SEQ ID NO: 283561 - DNA, 348 bp, Artificial Sequence
  derived and/or modified sequence
atggacctgaccaagatgggcatgatccagctgcagaaccccagccaccccaccggcctgctgtgcaaggccaaccagatgagactggccggcaccctgtgcgacgtggtgatcatggtggacagccaggagttccacgcccacagaaccgtgctggcctgcaccagcaagatgttcgagatcctgttccacagaaacagccagcactacaccctggacttcctgagccccaagaccttccagcagatcctggagtacgcctacaccgccaccctgcaggccaaggccgaggacctggacgacctgctgtacgccgccgagatcctggagatcgagtacctggagtag

SEQ ID NO: 283562 - DNA, 447 bp, Artificial Sequence
  derived and/or modified sequence
atggacctgaccaaaatgggtatgattcagcttcagaatcctagccatcctacaggtctcctgtgtaaagcaaaccagatgaggctggccgggaccctgtgcgacgtggtaatcatggtcgactcccaggagtttcatgcccatagaaccgtcctagcttgcacctctaagatgtttgagatcctttttcatagaaatagccagcattacacccttgattttcttagtccaaaaaccttccagcaaatactggagtatgcttacacagccacccttcaggcaaaagccgaggatttggacgacttgctgtacgccgctgaaattttagaaatcgaatacttggaggaacaatgccttaaaatgcttgaaacaattcaagcttcagacgataacgacacagaggccaccatggccgacgggggtgcagaggaggaggaagatcgctag

SEQ ID NO: 283563 - DNA, 348 bp, Artificial Sequence
  derived and/or modified sequence
atggacctgacaaagatgggaatgattcagttgcaaaatccctcacatccaacggggctgctttgcaaggccaatcagatgaggctagctggaactctctgcgatgtggttatcatggttgatagccaagaattccacgcccacaggacggtcctcgcatgtacttcgaaaatgtttgagatcctgttccaccgcaattcacagcactatactttggacttcttgtcccctaaaacattccagcagatccttgaatacgcatacactgccaccttgcaagccaaggccgaagatttggatgatttactgtacgcagccgagattctggaaatcgagtacctcgaatag

SEQ ID NO: 283564 - DNA, 447 bp, Artificial Sequence
  derived and/or modified sequence
atggacctgaccaagatgggcatgatccagctgcagaaccccagccaccccaccggcctgctgtgcaaggccaaccagatgaggctggccggcaccctgtgtgatgtggtgatcatggtggacagccaggagttccacgcccacaggacagtgctggcctgcaccagcaagatgtttgagatcctcttccacaggaacagccagcactacaccctggacttcctgagccccaagaccttccagcagatcctggagtatgcctacacagccaccctgcaggccaaggccgaggacctggatgacctgctgtatgctgctgagatcctggagattgagtacctggaggagcagtgcctgaagatgctggagaccatccaggccagtgatgacaatgacacagaggccaccatggctgatggaggagctgaggaggaggaggacagatag

SEQ ID NO: 283565 - DNA, 348 bp, Artificial Sequence
  derived and/or modified sequence
atggacctgaccaagatgggcatgatccagctgcagaaccccagccaccccaccggcctgctgtgcaaggccaaccagatgaggctggccggcaccctgtgtgatgtggtgatcatggtggacagccaggagttccacgcccacaggacagtgctggcctgcaccagcaagatgtttgagatcctcttccacaggaacagccagcactacaccctggacttcctgagccccaagaccttccagcagatcctggagtatgcctacacagccaccctgcaggccaaggccgaggacctggatgacctgctgtatgctgctgagatcctggagattgagtacctggagtag

SEQ ID NO: 283566 - DNA, 447 bp, Artificial Sequence
  derived and/or modified sequence
atggacctgaccaagatgggcatgatccagctgcagaaccccagccatcccactggcttgctgtgcaaagccaaccagatgcgactagctgggacactctgcgacgtggtaattatggtagattctcaggagtttcacgcccatcgcaccgttctagcttgcaccagtaaaatgtttgagatcctttttcaccggaattcccaacactacaccctggacttcctgtcaccaaaaacatttcagcagatcctggaatatgcttacaccgccacactccaagccaaggccgaggacctcgatgacctgctgtatgccgccgagattctggagatcgagtatttggaggagcaatgcctgaaaatgttggaaaccattcaagcttccgacgataacgataccgaggcgacaatggctgacggaggagcagaggaggaggaggacaggtag

SEQ ID NO: 283567 - DNA, 348 bp, Artificial Sequence
  derived and/or modified sequence
atggacctgaccaagatgggcatgatccagctgcagaaccccagccatcccaccgggttactgtgtaaggctaaccaaatgcgactagctggtactctgtgtgacgtcgtgatcatggtagattctcaggaatttcacgcccacagaaccgttctggcatgcacaagtaagatgtttgaaattctctttcatcgcaacagccagcactacacgctggactttctttcgccaaaaacatttcagcagatccttgaatatgcgtacaccgccaccctccaggccaaggcggaagacctggacgacctgctatacgcagcagaaatcctggagatcgaatacctggaatag

SEQ ID NO: 283568 - DNA, 447 bp, Artificial Sequence
  derived and/or modified sequence
atggacctcactaagatgggcatgatacagctgcagaatccatcacacccaaccgggttgctttgtaaggccaatcagatgagacttgctggcaccctgtgtgatgtcgtgataatggtagacagccaggagttccatgcacatagaacagtgctggcctgtaccagcaagatgtttgaaattcttttccaccggaatagccagcattacactttggactttctgtccccaaagacttttcagcagattctcgaatacgcatacacggccacactgcaggcgaaagcagaggaccttgacgacctactttacgccgcagagatcttggagatcgagtacctcgaagaacagtgtctcaagatgcttgaaacaatccaggcctcagacgacaacgacactgaagccacaatggctgacggcggtgccgaggaggaggaggaccgatag

SEQ ID NO: 283569 - DNA, 348 bp, Artificial Sequence
  derived and/or modified sequence
atggacctgacaaagatgggcatgatccaattacaaaatcctagccacccaacgggcctactgtgcaaagccaaccagatgaggctggccggaaccttgtgtgacgtagtgattatggtggatagccaggaatttcacgctcatcgtaccgtgctcgcctgcacatcaaaaatgttcgagatcttatttcaccgtaactcccaacattatactttggattttctgtcacccaaaaccttccagcagatcctggaatatgcctacacagccactcttcaggctaaagcagaagacttggatgaccttctatatgctgcagagatactggagatagaatatctagaatag

SEQ ID NO: 283570 - DNA, 572 bp, Artificial Sequence
  derived and/or modified sequence
tcttatgtatgcggaccggtgcgcgggcgcaagataagcctcctctattggcccaggaagcccacccagccccgccacgcagagcccagaaggaaagaaagcctcatgcctgagccgaggggagcaccatggatctgacaaaaatgggcatgatccagctgcagaaccctagccaccccacggggctactgtgcaaggccaaccagatgcggctggccgggactttgtgcgatgtggtcatcatggtggacagccaggagttccacgcccaccggacggtgctggcctgcaccagcaagatgtttgagatcctcttccaccgcaatagtcaacactatactttggacttcctctcgccaaagaccttccagcagattctggagtatgcatatacagccacgctgcaagccaaggcggaggacctggatgacctgctgtatgcggccgagatcctggagatcgagtacctggaggaacagtgcctgaagatgctggagaccatccaggcctcagacgacaatgacacggaggccaccatggccgatggcggggccgaggaagaagaggaccgc

SEQ ID NO: 283571 - DNA, 773 bp, Artificial Sequence
  derived and/or modified sequence
agcgggtactgcgaactgccgggcgatgctgtcgctgccgccgtgatacggagagcaacagttccccagcaacacccctccccgacacaggcacacaccccccgacaggcacgcacacccaccccacagtgcccggctcggctgcgttctcagaaaccccgatgtctgcgggaaagcacgcggtggctcggctcggctgaatgctcatcccaaccttgacggcctccgtccccaccccggggcgggcagcaaaaatgtcttgaccagccgtcctgtgaatcctttctgcgtgagcttggtggctcctgaactgatagagctccttctgggggtggagcctcctctattggcccaggaagcccacccagccccgccacgcagagcccagaaggaaagaaagcctcatgcctgagccgaggggagcaccatggatctgacaaaaatgggcatgatccagctgcagaaccctagccaccccacggggctactgtgcaaggccaaccagatgcggctggccgggactttgtgcgatgtggtcatcatggtggacagccaggagttccacgcccaccggacggtgctggcctgcaccagcaagatgtttgagatcctcttccaccgcaatagtcaacactatactttggacttcctctcgccaaagaccttccagcagattctggagtatgcatatacagccacgctgcaagccaaggcggaggacctggatgacctgctgtatgcggccgagatcctggagatcgagtacctggagg

SEQ ID NO: 283572 - DNA, 783 bp, Artificial Sequence
  derived and/or modified sequence
atggtgtggcccgccctgtgggagctgtacagagagctgggcctgttccagggccccgccctgggcctgagaaaccacctgggcagaaagctgagaagaagaaagaagaagaaggccaagagaaccaccaactggaagatcatcaccgacagacccggcttccacgacgagagcgccatctaccccgtgggctactgcagcaccagaatctacgccagcatgaagtgccccgaccagaagtgcctgtacacctgccagatcaaggacggcggcgtgcagccccagttcgagatcgtgcccgaggacgacccccagaacgccatcgtgagcagcagcgccgacgcctgccacgccgagctgctgagaaccatcagcaccaccatgggcaagctgatgcccaacctgctgcccgccggcgccgacttcttcggcttcagccaccccgccatccacaacctgatccagagctgccccggcgccagaaagtgcatcaactaccagtgggtgaagttcgacgtgtgcaagcccggcgacggccagctgcccgagggcctgcccgagaacgacgccgccatgagcttcgaggccttccagagacagatcttcgacgaggaccagaacgaccccctgctgcccggcagcctggacctgcccgagctgcagcccgccgccttcgtgagcagctaccagcccatgtacctgacccacgagcccctggtggacacccacctgcagcacctgaagagccccagccagggcagccccatccagagcagcgactag

SEQ ID NO: 283573 - DNA, 783 bp, Artificial Sequence
  derived and/or modified sequence
atggtgtggcctgccttatgggaactgtaccgcgagctgggactctttcagggacccgcactgggcctaagaaatcacctgggaagaaagctgagacgaagaaaaaagaagaaagcaaaaagaacgaccaactggaaaatcattacagaccgcccagggttccacgacgagagtgccatctatcctgtgggatattgcagcacacgcatctacgcctcgatgaaatgccccgaccagaagtgtctgtatacatgccagataaaagacgggggcgtacaaccacagtttgaaatcgtccccgaggacgatccgcaaaacgcaattgtctccagctccgcagacgcgtgccatgccgagctcttgcgaaccataagcactacaatggggaaactcatgccgaatctgttgcctgcgggagcggacttttttggcttctcacaccctgcaatccacaacctcattcagtcatgccctggcgcacgaaagtgcatcaattatcaatgggtgaaattcgacgtatgcaagcctggagacgggcaattgcctgagggactccccgagaatgatgccgctatgagcttcgaagcctttcagcggcaaatctttgatgaagaccagaatgaccctctcctaccaggcagtctggacttgcccgagctccagccagccgccttcgtttccagctatcaaccaatgtacctcactcacgagcctctcgttgatacccatttgcaacacctcaagagcccctcccagggctctcctattcaatcaagcgactag

SEQ ID NO: 283574 - DNA, 783 bp, Artificial Sequence
  derived and/or modified sequence
atggtgtggccagccctgtgggagctgtaccgggagctgggcctcttccagggccctgccctgggcctgaggaaccacctgggcaggaagctgcggcggaggaagaagaagaaggccaagaggaccaccaactggaagatcatcacagaccggcccggcttccatgatgagagcgccatctaccctgtgggctactgcagcacccgcatctatgcctccatgaagtgcccagaccagaagtgcctgtacacctgccagatcaaggatggaggagtgcagccccagtttgagatcgtgcctgaagatgacccccagaatgccatcgtgagcagcagcgcagatgcctgccacgccgagctgctgcggaccatcagcaccaccatgggcaagctgatgcccaacctgctgcctgctggagctgacttcttcggcttcagccacccagccatccacaacctgatccagagctgccctggggccaggaagtgcatcaactaccagtgggtgaagtttgatgtgtgcaagccaggagatggccagctgcctgagggcctgcctgaaaatgatgctgccatgagctttgaggccttccagaggcagatctttgatgaggaccagaatgaccccctgctgcccggcagcctggacctgcctgagctgcagcctgctgcctttgtgagcagctaccagcccatgtacctgacccatgagcccctggtggacacccacctgcagcacctgaagagccccagccagggcagccccatccagagcagtgactag

SEQ ID NO: 283575 - DNA, 783 bp, Artificial Sequence
  derived and/or modified sequence
atggtgtggcccgccctgtgggagctgtaccgggagctgggcctgtttcaggggcccgcccttggtctgcgtaatcatctgggaagaaagctccgccggcgtaagaaaaaaaaagccaagcggacgaccaattggaagatcattacggatcggccaggatttcacgacgagagcgctatatatcccgtcggctactgttccactagaatttacgcaagtatgaagtgcccagaccaaaagtgcctgtatacatgtcaaataaaggacggtggggtgcagcctcagttcgagatcgtgccggaggacgatccccagaacgcgattgtgagctcgtctgccgacgcttgtcatgcagagctgttaagaaccatatccaccacgatgggcaagctgatgcctaatctcctgccagccggagctgactttttcggtttttctcatccggccatccataacctcattcagtcatgtcccggtgctagaaaatgtataaactaccagtgggtaaagttcgacgtgtgcaagcctggcgacgggcagctcccagagggtctcccagaaaacgatgctgccatgtccttcgaagccttccaacggcaaatatttgacgaagaccagaacgacccgctgctgcctgggagtctggatttacctgagctgcagcctgccgcttttgtgagcagctaccagcctatgtatcttacccacgagcccctcgtcgacacccacctgcagcatttgaagagccctagccaaggtagccctatccaatccagtgactag

SEQ ID NO: 283576 - DNA, 783 bp, Artificial Sequence
  derived and/or modified sequence
atggtttggcccgctctctgggagctataccgggagctcggactttttcaagggcctgcactaggcctgcggaaccacctgggccgtaagttaagaaggcgcaaaaagaagaaggccaagcgaactacaaattggaaaataataaccgaccgccctggcttccatgatgagtcagccatttatccagtggggtactgttctactcgaatatacgctagcatgaagtgccctgaccaaaaatgcttgtatacttgtcagatcaaggatgggggagtgcagccccagtttgaaatagtgccagaggatgacccccagaatgccatcgtgagtagttccgctgacgcatgccatgctgaactgctgaggaccatcagcacgacaatgggtaaactgatgcccaaccttctgcctgcgggagcagacttcttcggattcagtcaccctgccatccacaacctgatacagtcctgtccaggagctagaaagtgtatcaattatcagtgggtcaagttcgatgtctgtaaacctggggatggccagttgcccgagggtttgcctgaaaatgacgccgctatgagctttgaggcattccagagacagatttttgacgaggatcagaatgatcctctcctgcctggctccctggatttgcccgaactccaacctgccgcatttgtctcctcatatcagccaatgtatctaacccacgaacctctcgtcgatacacacctccagcacttgaaatcaccaagtcagggctcaccaatccaatcctcagactag

SEQ ID NO: 283577 - DNA, 1483 bp, Artificial Sequence
  derived and/or modified sequence
gccgggagcccgttcggttgcgggtgtctctggccctgcggtcagccctgggaacgtcccggagagctagattcctagaggcccgattccgctagcccggaacagacaaagccagcgctcccgcccgctccccgacttaggatccgatgccggcagcgtcctggggcccccgtagcggggctggaccatgagcctgctggacggcctcgcttcctcgccgcgggctccgctgcagtccagcaaggccaggatgaaaaagctcccgaagaagagccagaatgagaagtaccggctgaagtacctgcggctgcgcaaagcggccaaggccacggtgtttgaaaatgctgctatttgtgatgaaattgctcgtcttgaggaaaaatttcttaaagcaaaagaagaaagaaggtacttgctaaagaagctcctccagcttcaggctctaactgaaggggaagtacaggctgcagctccttcccacagttccagtttgcccctgacttatggtgtggccagctctgtgggaactatacagggagctgggcctatttcagggcccagcactggggctgaggaaccatttgggaagaaaactaagaaggagaaaaaagaaaaaggcaaagagaacaacaaactggaagatcatcaccgaccgacctggctttcatgatgagagtgccatctaccccgtgggctattgcagtactcgaatatatgccagcatgaagtgcccagaccagaagtgtctatatacctgtcagatcaaggatggtggtgtgcagcctcagtttgaaattgttcctgaagatgacccccagaatgccattgtcagctcttctgcagatgcttgtcatgcagaactgctcaggactataagcactactatggggaaactaatgcctaacctgcttccagctggagctgacttttttggattttctcatccagccatccacaacctgatccagagctgtccaggagctcgaaaatgcatcaattaccagtgggtgaaatttgatgtgtgcaaacctggagatgggcagctacctgaggggctgccggagaatgatgcagctatgagctttgaagcctttcagagacagatctttgatgaagatcagaatgatccccttctgccaggatccttggacctcccagagcttcagcctgcagcctttgtgtcttcttaccagcccatgtacctgacacatgaacccttggtagatactcacctgcagcacttgaagtctccatcacagggtagcccaattcagtcttcagattgaacaagaagggatcagatgccacatcgtttttgtcgtgattaatttaacttaaactaaaattttgggtatatgaaagaaggcagcaattcagaagtaaagaagatactaacgtatttcatcatggaaggtcctgtggtgatggttttccctgggaaaaccttcagctgctttatttttagtaataaatttctcttgtc

SEQ ID NO: 283578 - protein, 141 aa, Artificial Sequence
  derived and/or modified sequence
MISLPGPLVTNLLRFLFLGLSALDVIRGSLSLTNLSSSMAGVYVCKAHNEVGTAQCNVTLEVSTGPGAAVVAGAVVGTLVGLGLLAGLVLLYHRRGKALEEPANDIKVRSPLGLSFSAPKMEWLWKWRDAHFYRDSYLSKW

SEQ ID NO: 283579 - DNA, 426 bp, Artificial Sequence
  derived and/or modified sequence
atgatttcccttcccggaccgctcgtgactaacctcctacgcttcctgttcctggggttgtctgcccttgacgtcataagaggctcgctctcactcactaacttgagctcatcgatggccggcgtgtacgtgtgcaaggcccacaatgaagtgggcacagctcagtgcaatgtaacccttgaagtgtctacggggccaggggcggccgtcgtggccggagccgtcgttggcactctggtgggtctcggtttgctggccggcctggtcttgttgtaccacagaagaggcaaggcattagaagaacctgcaaacgatattaaggtgcgctcccccctgggcctatcattcagcgcccccaagatggagtggctgtggaaatggcgagatgcgcatttttaccgagattcgtatctgtccaaatggtag

SEQ ID NO: 283580 - DNA, 426 bp, Artificial Sequence
  derived and/or modified sequence
atgatcagcctgcccggccccctggtgaccaacctgctgcgcttcctgttcctgggcctgagcgccctggatgtgatccggggcagcctgagcctgaccaacctgagcagctccatggccggcgtgtatgtgtgcaaggcccacaatgaggtgggcacagcccagtgcaatgtgaccctggaggtgtccacaggccctggagctgctgtggtggccggggctgtggtgggcaccctggtgggcctgggcctgctggccggcctggtgctgctgtaccaccggcggggcaaggccctggaggagcccgccaatgacatcaaggtgcgcagccccctgggcctgtccttcagcgcccccaagatggagtggctgtggaagtggagagatgcccacttctacagagacagctacctgagcaagtggtag

SEQ ID NO: 283581 - DNA, 426 bp, Artificial Sequence
  derived and/or modified sequence
atgatcagcctgcccggccccctggtgaccaacctgctgcggttcctcttcctggggctgtccgcattggatgtcatacggggatcgctgtccctgacaaacttgtcctcatctatggccggggtatatgtgtgtaaggcccataacgaggtgggtaccgcacagtgcaacgtaacccttgaggtgtccacggggccaggtgcagctgtcgtggcaggggcagtagtgggaactcttgtcggattaggcctactcgctggtctggtcctgctctatcatcggcggggaaaggctctggaggaaccagctaatgatattaaagtcagatctccactgggactttctttcagcgcgcccaaaatggaatggttatggaagtggcgggatgcccatttctaccgagatagttatctgagtaagtggtag

SEQ ID NO: 283582 - DNA, 426 bp, Artificial Sequence
  derived and/or modified sequence
atgatcagcttgcctggccctctggtgaccaatctcctgcggttcctcttcctgggattatcagccctggacgtgataagaggatcactcagtctgacaaatctctcttcaagcatggcaggagtatacgtatgcaaagcacacaatgaggtcggtacggcccagtgcaatgttaccctggaagtgtctacgggccctggcgctgcagtggtggcaggggcagttgtggggacactggttggcctggggctcctcgccggtctcgtgctgctctaccatcgacgcggaaaggcgctggaggaacccgcaaatgacatcaaggtaaggtcccctctgggactgtcattcagcgccccaaaaatggagtggttgtggaaatggagggatgcccacttctatcgggatagctacctatccaaatggtag

SEQ ID NO: 283583 - DNA, 426 bp, Artificial Sequence
  derived and/or modified sequence
atgatcagcctgcccggccccctggtgaccaacctgctgagattcctgttcctgggcctgagcgccctggacgtgatcagaggcagcctgagcctgaccaacctgagcagcagcatggccggcgtgtacgtgtgcaaggcccacaacgaggtgggcaccgcccagtgcaacgtgaccctggaggtgagcaccggccccggcgccgccgtggtggccggcgccgtggtgggcaccctggtgggcctgggcctgctggccggcctggtgctgctgtaccacagaagaggcaaggccctggaggagcccgccaacgacatcaaggtgagaagccccctgggcctgagcttcagcgcccccaagatggagtggctgtggaagtggagagacgcccacttctacagagacagctacctgagcaagtggtag

SEQ ID NO: 283584 - protein, 605 aa, Artificial Sequence
  derived and/or modified sequence
MSQLSSTLKRYTESARYTDAHYAKSGYGAYTPSSYGANLAASLLEKEKLGFKPVPTSSFLTRPRTYGPSSLLDYDRGRPLLRPDITGGGKRAESQTRGTERPLGSGLSGGSGFPYGVTNNCLSYLPINAYDQGVTLTQKLDSQSDLARDFSSLRTSDSYRIDPRNLGRSPMLARTRKELCTLQGLYQTASCPEYLVDYLENYGRKGSASQVPSQAPPSRVPEIISPTYRPIGRYTLWETGKGQAPGPSRSSSPGRDGMNSKSAQGLAGLRNLGNTCFMNSILQCLSNTRELRDYCLQRLYMRDLHHGSNAHTALVEEFAKLIQTIWTSSPNDVVSPSEFKTQIQRYAPRFVGYNQQDAQEFLRFLLDGLHNEVNRVTLRPKSNPENLDHLPDDEKGRQMWRKYLEREDSRIGDLFVGQLKSSLTCTDCGYCSTVFDPFWDLSLPIAKRGYPEVTLMDCMRLFTKEDVLDGDEKPTCCRCRGRKRCIKKFSIQRFPKILVLHLKRFSESRIRTSKLTTFVNFPLRDLDLREFASENTNHAVYNLYAVSNHSGTTMGGHYTAYCRSPGTGEWHTFNDSSVTPMSSSQVRTSDAYLLFYELASPPSRM

SEQ ID NO: 283585 - DNA, 1818 bp, Artificial Sequence
  derived and/or modified sequence
atgagtcaactgtcctccactttgaagagatatactgagagcgcaagatataccgacgcgcattacgccaaatctggctatggtgcatacaccccatcctcctatggagcgaacttagcagccagcctcctggagaaagaaaaacttggcttcaagccagtccctacttctagcttcctgacacggccacgaacatatggaccttcaagtttgctggattacgatagggggcgtcctctactgagacccgacatcacgggcgggggcaagagggcagaatcccagacgagggggacggagcggcctctggggtcagggctgtctggaggatcagggtttccgtatggggtaaccaataattgtctgtcttacctccctatcaacgcctatgatcaaggtgtaacgctgactcaaaaacttgatagccagtcagatttggctcgcgatttttcttccttaagaaccagtgattcctaccgaattgatccaaggaatctggggcgatcacctatgctcgcccgcacaaggaaggagctctgcacgctgcagggtctgtaccagacagcgtcttgtccagagtatctcgtggactacctggaaaattatggccggaagggcagtgcctctcaggttccctcccaggctccaccttctagggtccccgaaatcatttctccaacgtacaggccaatcggacggtatactctctgggagacaggaaagggccaggcccccgggccctctcgtagttccagccctgggcgcgacgggatgaattcgaaaagcgctcagggactggccggcctgagaaacctaggcaacacttgttttatgaattcaattttgcagtgtttgtctaatactcgggagctgcgggactactgcttgcaacgcctgtacatgcgggatcttcaccacggaagtaatgctcataccgccctggtcgaggaatttgcaaagctgattcagacgatatggacctcctctccgaatgacgtggttagtccctccgaattcaaaacccaaatccaaagatacgccccccggtttgtaggatacaaccagcaggatgcgcaggaatttcttaggttcctccttgatggactgcataacgaggtgaatagggtaactttgagaccaaagtcaaatcctgaaaacctggatcacctgccagacgacgaaaagggtcgccaaatgtggcggaagtatttggaaagggaggactcccggatcggcgatctgttcgtgggccagctgaagtcctctttgacttgtacggactgtgggtattgctcaacagtgtttgatccattctgggacctgagtcttccaatcgctaagcgtggataccccgaagtgactctgatggactgtatgaggttattcaccaaggaagacgtcctcgatggtgacgaaaaaccaacttgctgtcgatgtcgcggcaggaaacggtgtatcaagaagttctccatccaaagatttcccaagattctggtcctgcacctcaagagattctcggaaagccgtatccgcacctcaaaactgaccacctttgttaatttccctctgcgggacctggacctgcgcgagtttgccagcgagaatacaaaccatgcagtgtacaacctttatgcagtgagtaatcactcaggtacaacaatgggaggccactacacagcctattgtcgaagtcccgggacgggtgagtggcatacatttaacgatagctctgtgactccaatgagcagttcacaggtgcgcacatctgacgcatatctgcttttctatgaactcgcctcccccccttctagaatgtag

SEQ ID NO: 283586 - DNA, 1818 bp, Artificial Sequence
  derived and/or modified sequence
atgagccagctgagcagcaccctgaagcgctacacagagagcgcccgctacacagatgcccactacgccaagagcggctatggagcctacacccccagcagctatggagccaacctggccgccagcctgctggagaaggagaagctgggcttcaagcctgtgcccaccagcagcttcctgacccggcccaggacctacggccccagcagcctgctggactatgaccggggccggcccctgctgcggccagacatcaccggcggcggcaagagagctgagagccagacccggggcacagagcggcccctgggcagcggcctgagcggcggcagcggcttcccctatggagtgaccaacaactgcctgagctacctgcccatcaatgcctatgaccagggcgtgaccctgacccagaagctggacagccagagcgacctggcccgggacttcagcagcctgcggaccagtgacagctacagaattgaccccaggaacctgggccgcagccccatgctggcccggaccaggaaggagctgtgcaccctgcagggcctgtaccagacagccagctgcccagagtacctggtggactacctggagaactacggcaggaaaggaagtgccagccaggtgcccagccaggccccacccagccgggtgcctgagatcatcagccccacctaccggcccatcggccgctacaccctgtgggagaccgggaagggccaggcccctggccccagccgcagcagcagccctggaagagatggcatgaacagcaagagcgcccagggcctggccggcctgaggaacctgggcaacacctgcttcatgaacagcatcctgcagtgcctgagcaacacccgggagctgcgggactactgcctgcagaggctgtacatgagggacctgcaccacggcagcaatgcccacacagccctggtggaggagtttgccaagctgatccagaccatctggaccagcagccccaatgatgtggtgagccccagcgagttcaagacccagatccagagatatgcccccaggtttgtgggctacaaccagcaggatgcccaggagttcctgcgcttcctgctggatggcctgcacaatgaggtgaacagagtgaccctgcggcccaagagcaaccctgagaacctggaccacctgcctgatgatgagaagggccggcagatgtggaggaagtacctggagcgggaggacagcagaattggagacctgtttgtgggccagctgaagagcagcctgacctgcacagactgtggctactgcagcacagtgtttgaccccttctgggacctgagcctgcccatcgccaagaggggctacccagaggtgaccctgatggactgcatgaggctcttcaccaaggaggatgtgctggatggagatgagaagcccacctgctgccgctgccggggcaggaagcgctgcatcaagaagttcagcatccagcgcttccccaagatcctggtgctgcacctgaagcgcttcagcgagagccgcatccgcaccagcaagctgaccacctttgtgaacttccccctgcgggacctggacctgcgggagtttgccagcgagaacaccaaccacgctgtgtacaacctgtatgctgtgagcaaccacagcggcaccaccatgggcggccactacacagcctactgccgcagccctggcactggagagtggcacaccttcaatgacagctctgtgacccccatgagcagcagccaggtgaggaccagtgatgcctacctgctcttctatgagctggccagcccccccagcaggatgtag

SEQ ID NO: 283587 - DNA, 1818 bp, Artificial Sequence
  derived and/or modified sequence
atgagccagctgagcagcaccctgaagcggtacaccgagagcgccaggtatacagatgctcactacgctaagtccggttacggagcttatacgcccagtagctacggggctaacctggccgcgagcctccttgagaaagaaaaactgggtttcaagccagtacctacttcctcttttttaacccgtccccggacatatggcccatcaagcctgctggactatgatagggggcgcccgttattgcgacctgatatcacaggtggaggtaagcgcgcagagagccagacacgcgggacagagcgtccgctgggttcgggacttagcggcgggagtggcttcccatatggggtaactaacaattgtctaagctaccttcctattaatgcgtatgatcagggcgtgacactgacacagaagctggattctcagagtgatttggcacgcgatttttcgtctctgcgcacgtccgactcttaccgcattgatcctaggaatctgggacgctcgcccatgctcgcgagaacgcggaaggagctctgtaccctgcagggactgtatcaaaccgcctcatgtcctgaataccttgtcgattatctcgaaaactatggccgcaagggtagtgcatctcaggtaccatcacaggccccaccaagcagggtgccagagatcatttcacctacatacaggcccattgggcgatatacactgtgggaaaccggcaagggccaggctcccggtccttcccgctcctccagtcctggcagggatgggatgaattctaagtccgcccaggggctcgccggacttagaaacctgggaaatacttgtttcatgaacagcatcctccagtgtctatcaaatacaagggagcttagggattattgcctccagcggctgtacatgcgggatttgcatcatggttccaacgcacacacagccctagtggaagaatttgcgaaactcattcagactatttggacctcttcgcctaatgatgtggtttctccttcggagttcaaaacccagattcagagatacgcacctcgatttgtggggtacaaccagcaggacgctcaggaattcctgcgctttcttctggacggcctgcacaatgaagtgaatagggttactttgcgcccaaagagtaacccggagaatttggatcatttgcccgacgatgaaaaggggagacaaatgtggcggaagtatttggaacgggaggatagcaggattggggatctgtttgttgggcagctcaagtctagcttgacttgcacagattgcgggtattgttccaccgtgttcgaccctttctgggacctgagcttacccattgctaagagaggttaccccgaggtgactttaatggactgcatgaggctgttcactaaagaggacgtgcttgatggggatgagaaacccacatgctgccggtgcagaggtcggaagcgctgcatcaaaaaattcagcattcagcgcttcccaaagattctggtcctgcatctcaagagattcagtgaatctcgaatccgaacatcgaagcttactacgttcgtgaatttcccgctcagagacttggacctccgagagttcgcctcagagaacacaaatcacgctgtgtataatctgtacgcagtgtccaaccactcagggacaaccatgggagggcactatactgcatactgccgaagcccagggaccggtgagtggcacaccttcaacgatagcagcgtgacccctatgagttccagtcaggtccggacctccgacgcatatcttcttttctacgagttagcgtctccgcctagtagaatgtag

SEQ ID NO: 283588 - DNA, 1818 bp, Artificial Sequence
  derived and/or modified sequence
atgagccaattatcgtctaccctgaagcgctacacagaatctgcacggtataccgacgcacactacgcgaagtccggatacggcgcatacaccccctcaagttacggagccaacctcgcagcgtcgctcctggaaaaggaaaaattaggctttaagcccgttcccaccagctcattcctgacacggccaagaacatatgggccttcatcactgttagactacgacagaggtcggccactcttgcgtcctgacatcaccggcggagggaaacgtgctgaatcccagaccagaggcaccgagcgacctctggggagcgggctgagtggtggaagcggcttcccctacggggttacgaacaactgcctgtcctacctgccgataaatgcctatgatcagggagtgaccctgactcagaagctggactctcagagcgatctcgccagagacttttcaagtctgcgaacttctgacagctaccgaattgacccaagaaacctggggagatctccaatgttagccagaacccgaaaagagctttgcaccctccaaggcctgtaccagacagccagctgccctgagtatctggtggactatcttgagaactacgggcgtaaggggtctgcctcacaagtcccaagccaggcaccacctagtagagtaccggagattatcagccccacataccggcctatagggaggtacaccctgtgggaaaccggtaaaggccaggctcccggacctagcagatcctcaagccccggtagagatgggatgaattccaaatctgctcaaggcctcgctggtctgagaaatttggggaacacttgctttatgaattcaatcttgcagtgcctgtctaatacgagagagctgagggattattgtctacaacgcctgtacatgcgggacctccatcacggttcaaacgctcataccgctctagtggaggaatttgcaaagctcatccagacaatctggacaagcagcccaaacgatgtggtgagtccttccgagttcaagacccaaattcagaggtatgcacctaggtttgtgggctacaatcaacaggatgctcaggagtttcttaggttcctgcttgatggcctgcacaacgaggtgaacagggttaccttgaggcctaagagcaatcctgaaaatcttgaccacctcccggacgatgaaaaggggagacagatgtggcgcaagtacctggagcgggaggattcaagaatcggggatctgtttgtcggacaattaaagagctcacttacttgcacagactgcggatactgtagcaccgtgttcgaccctttttgggacctgtcactgcccattgcgaaacggggatatccagaggtcacattgatggattgcatgagattgtttactaaggaagatgtgttggacggggatgagaagcctacatgctgcagatgccgagggagaaagcgctgtataaagaagtttagcatacagcgttttcccaaaattttggtcctccacctgaagcgctttagtgagagtcgcatacgtacaagcaaattgacaaccttcgtgaacttcccactgcgtgatctggacttgcgagaattcgccagcgagaatactaatcacgcggtttacaatctgtacgcggtgtcgaaccactccgggacaaccatgggaggtcactacaccgcttactgtcgatctccagggaccggagagtggcataccttcaatgactcatctgtcacacccatgtccagctcccaagtcagaacctccgacgcttacttgttgttttacgagctcgccagccccccttctcgaatgtag

SEQ ID NO: 283589 - DNA, 3732 bp, Artificial Sequence
  derived and/or modified sequence
agtgacgcgagacgcggggtgtggctctgccggcccaggcgcgatgaggcggctgcccgctgggtggcgccgatttcccggggaggtcccttctgggcccccggcggaggtgggagagagtcaggcaggagccgaggccggggagccctcttcgtcagctggtgctcactgcgccgcgccagcgccagccgggactcacccgcagctccatgcttgtgcccggttcgactcgtccatactccaagaagaggcagcccatgaggctcccagtccccactgagtgccaccctgaaggatgtcccagctctcctccaccctgaagcgctacacagaatcggcccgctacacagatgcccactatgccaagtcgggctatggtgcctacaccccgtcctcctatggggccaatctggctgcctccttactggagaaggagaaacttggtttcaagccggtccccaccagcagcttcctcacccgtccccgtacctatggcccctcctccctcctggactatgaccggggccgccccctgctgagacccgacatcactgggggtggtaagcgggcagagagccagacccggggtactgagcggcctttaggcagtggcctcagcgggggcagcggattcccttatggagtgaccaacaactgcctcagctacctgcccatcaatgcctatgaccagggggtgaccctaacccagaagctggacagccaatcagacctggcccgggatttctccagcctccggacctcagatagctaccggatagaccccaggaacctgggccgcagccccatgctggcccggacgcgcaaggagctctgcaccctgcaggggctctaccagacagccagctgccctgaatacctggtcgactacctggagaactatggtcgcaagggcagtgcatctcaggtgccctcccaggcccctccctcacgagtccctgaaatcatcagcccaacctaccgacccattggccgctacacgctgtgggagacgggaaagggtcaggcccctgggcccagccgctccagctccccgggaagagacggcatgaattctaagagtgcccagggtctggctggtcttcgaaaccttgggaacacgtgcttcatgaactcaattctgcagtgcctgagcaacactcgggagttgagagattactgcctccagaggctctacatgcgggacctgcaccacggcagcaatgcacacacagccctcgtggaagagtttgcaaaactaattcagaccatatggacttcatcccccaatgatgtggtgagcccatctgagttcaagacccagatccagagatacgcaccgcgctttgttggctataatcagcaggatgctcaggagttccttcgctttcttctggatgggctccataacgaggtgaaccgagtgacactgagacctaagtccaaccctgagaacctcgatcatcttcctgatgacgagaaaggccgacagatgtggagaaaatatctagaacgggaagacagtaggatcggggatctctttgttgggcagctaaagagctcgctgacgtgtacagattgtggttactgttctacggtcttcgaccccttctgggacctctcactgcccattgctaagcgaggttatcctgaggtgacattaatggactgcatgaggctcttcaccaaagaggatgtgcttgatggagatgaaaagccaacatgctgtcgctgccgaggcagaaaacggtgtataaagaagttctccatccagaggttcccaaagatcttggtgctccatctgaagcggttctcagaatccaggatccgaaccagcaagctcacaacatttgtgaacttccccctaagagacctggacttaagagaatttgcctcagaaaacaccaaccatgctgtttacaacctgtacgctgtgtccaatcactccggaaccaccatgggtggccactatacagcctactgtcgcagtccagggacaggagaatggcacactttcaacgactccagcgtcactcccatgtcctccagccaagtgcgcaccagcgacgcctacctgctcttctacgaactggccagcccgccctcccgaatgtagcgccaggagccacgtcccttctcccttccccgtggtggccccgctccctaaattttttaaaaagacaaaaacaaaacaacaacaacaacacacaaacctgacaagagaaaaacaaacctgaagctgccgagcaggagtggatgcagcctgatcagggtctggagcaaggagccgggctttcctgagctgtggcccggcagggaagatcgcctggacgtggagccagcatcgccccgtgccctcggcgtttgcatttgtaaacttgtggtcttcctatgtgtcagaaacaactgtgtcttgggggggaagaccctcgctgcgccgcttcccgccgcagcgcccgcgcctccgaggggacagcgccctctggagctcgctgggagcatcaccgcctggacgcccgcgccgcggaggagccggcgcccatctccacccgcacggctcgccggtccagagccatgagccaagagccctcttcacgctgctaactccaggggacagacgaagggacatctttggaaaacgctggttttggtttttaaaaagcccaactttttttttttaatttccataactaaagtgttcagactggagtgctctccttcaggcctcttcatagctgggacgttgcactggtccttttattgcttttccaagtacaactttctaatgctagccctccgtggtgctaggtgggcgttggccaggccccaagcacagccacagtagacctgggatctaaaacaagtttctgttttgggggtttgggttttttttttttttttttaatgttttgaatggaatttagttgcctccaagaattgtgccttatagcatttggggaccagggggtaactgcccctcctgaaatatccctcagcctcttcccttttccccagtgctctgttcaaacccgcctgggaaagggatcctgcccttagccctggctcgttgtgcattgcagtgaggcaaagaagaaagcaggtagattccttccgacagggcatcaagttcttcccgcccacgtcctctagcccacccctggtctgctccccagctgtttgaaggatagcacaagcccctcgtccctagagcttctctcccttttatttattctcttaacatccctttccccctggccttcctgcccccgcccccttctcagagcctcctagacaataggccctttggaccgagtttctcagggatgcccaggccacccctcagctcttcttagcgctggtctccagtcctgccctgggagctggagcctgggtatttggggacatcttgcctcagttgtatggttctttcctgtgggctcaattttgccctacatagttggataaaactctgtgctgtcctggagagtaaagctgttcacccacacagctgggcccggcttgtgccccgtggagcctggcacattccaggctcctaggaggaggcatcagagaaagacaccctgagttttactggcctgacacccttctccagagaagacctgtgaacctgagcccaagggcaagtgtacacttgtttactgtgtaagcaagagtagaagaatgtctaatgtacagtggaaccttgtacagaataaataatagctttgagaaatc

SEQ ID NO: 283590 - DNA, 1818 bp, Artificial Sequence
  derived and/or modified sequence
atgagccagctgagcagcaccctgaagagatacaccgagagcgccagatacaccgacgcccactacgccaagagcggctacggcgcctacacccccagcagctacggcgccaacctggccgccagcctgctggagaaggagaagctgggcttcaagcccgtgcccaccagcagcttcctgaccagacccagaacctacggccccagcagcctgctggactacgacagaggcagacccctgctgagacccgacatcaccggcggcggcaagagagccgagagccagaccagaggcaccgagagacccctgggcagcggcctgagcggcggcagcggcttcccctacggcgtgaccaacaactgcctgagctacctgcccatcaacgcctacgaccagggcgtgaccctgacccagaagctggacagccagagcgacctggccagagacttcagcagcctgagaaccagcgacagctacagaatcgaccccagaaacctgggcagaagccccatgctggccagaaccagaaaggagctgtgcaccctgcagggcctgtaccagaccgccagctgccccgagtacctggtggactacctggagaactacggcagaaagggcagcgccagccaggtgcccagccaggccccccccagcagagtgcccgagatcatcagccccacctacagacccatcggcagatacaccctgtgggagaccggcaagggccaggcccccggccccagcagaagcagcagccccggcagagacggcatgaacagcaagagcgcccagggcctggccggcctgagaaacctgggcaacacctgcttcatgaacagcatcctgcagtgcctgagcaacaccagagagctgagagactactgcctgcagagactgtacatgagagacctgcaccacggcagcaacgcccacaccgccctggtggaggagttcgccaagctgatccagaccatctggaccagcagccccaacgacgtggtgagccccagcgagttcaagacccagatccagagatacgcccccagattcgtgggctacaaccagcaggacgcccaggagttcctgagattcctgctggacggcctgcacaacgaggtgaacagagtgaccctgagacccaagagcaaccccgagaacctggaccacctgcccgacgacgagaagggcagacagatgtggagaaagtacctggagagagaggacagcagaatcggcgacctgttcgtgggccagctgaagagcagcctgacctgcaccgactgcggctactgcagcaccgtgttcgaccccttctgggacctgagcctgcccatcgccaagagaggctaccccgaggtgaccctgatggactgcatgagactgttcaccaaggaggacgtgctggacggcgacgagaagcccacctgctgcagatgcagaggcagaaagagatgcatcaagaagttcagcatccagagattccccaagatcctggtgctgcacctgaagagattcagcgagagcagaatcagaaccagcaagctgaccaccttcgtgaacttccccctgagagacctggacctgagagagttcgccagcgagaacaccaaccacgccgtgtacaacctgtacgccgtgagcaaccacagcggcaccaccatgggcggccactacaccgcctactgcagaagccccggcaccggcgagtggcacaccttcaacgacagcagcgtgacccccatgagcagcagccaggtgagaaccagcgacgcctacctgctgttctacgagctggccagcccccccagcagaatgtag

SEQ ID NO: 283591 - DNA, 675 bp, Artificial Sequence
  derived and/or modified sequence
atggattctaatcaccagtctaattataagctcagcaagactgaaaaaaaatttttacgtaaacagattaaggctaaacacacactgcttcgtcacgagggtattgagactgtgagctacgcaacccagtcccttgtcgtggccaacgggggacttggcaacggagtgtctcgcaaccagctcctgccagtacttgagaaatgcggtcttgttgatgcattacttatgcctcccaacaaaccgtatagtttcgcccgctacagaaccacagaagaatccaaacgtgcatacgtcaccctcaacggaaaggaggtggtggacgacctgggacagaaaatcacattgtacctaaactttgtcgagaaggtgcagtggaaagagttgcggccccaagcattaccgcccggacttatggtggttgaggagattatcagcagcgaagaggagaaaatgctcctcgaatctgttgactggaccgaagatactgataatcagaatagtcaaaaaagcctgaagcaccgccgggtgaagcatttcgggtacgagtttcattacgaaaacaacaacgttgataaagataaacctctctcaggtggtcttcctgatatctgcgagtcatttttagaaaagtggctgaggaaagctgagaaaaacctggaggtaggcatacactag

SEQ ID NO: 283592 - DNA, 675 bp, Artificial Sequence
  derived and/or modified sequence
atggacagcaaccaccagagcaactacaagctgagcaagacagagaagaagttcctgaggaagcagatcaaggccaagcacaccctgctgcggcatgagggcattgaaacagtgtcctatgccacccagagcctggtggtggccaatggaggcctgggcaatggagtgtccaggaaccagctgctgcctgtgctggagaagtgtggcctggtggatgccctgctgatgccacccaacaagccctacagctttgcccgctaccgcaccacagaggagagcaagagggcctacgtgaccctgaatggcaaggaggtggtggatgacctgggccagaagatcaccctgtacctgaactttgtggagaaggtgcagtggaaggagctgcggccccaggccctgcccccaggcctgatggtggtggaggagatcatcagcagcgaggaggagaagatgctgctggagagcgtggactggacagaggacacagacaaccagaacagccagaagagcctgaagcaccggcgggtgaagcacttcggctatgagttccactatgagaacaacaacgtggacaaggacaagcccctgagcggcggcctgcctgacatctgtgagagcttcctggagaagtggctgaggaaggccgagaagaacctggaggtgggcatccactag

SEQ ID NO: 283593 - DNA, 2296 bp, Artificial Sequence
  derived and/or modified sequence
agttttctccaacatggccgcgcccaggggagatggcgtgcaagtatccgctgcggtgttctggtgctagagtggagaggctggcaaagaagaaggcacacgcatggtgagaatccggcctgagccgaagcggagtttgctatggacagcaaccatcaaagtaattacaaactcagtaaaactgagaagaagttcttaaggaaacagattaaagccaagcatactttgctgagacatgaaggcattgagacagtatcctatgccactcagagcctggttgttgccaatggtggtttgggtaatggtgtgagtcggaaccagctgctcccggttttagagaaatgtggactggtggatgctctcttaatgccacctaacaagccgtactcatttgcaagatacagaactacagaagaatctaagagagcctatgttaccctcaatggaaaagaagtagtggatgatttaggacaaaagatcactctgtatttgaattttgtggaaaaagtgcagtggaaggagttgaggcctcaagccttaccaccaggactcatggtagtagaagaaataatttcttctgaggaggagaaaatgcttttggaaagtgttgattggacagaagatacagacaatcaaaactctcaaaaatccttaaaacacagaagagtaaagcattttggttatgagttccactatgagaacaacaatgtagataaagataagccattatctgggggtcttcctgacatttgtgaaagctttttggagaaatggttgaggaaagctgagaaaaatttggaagtagggattcattaggagacattcaaatgtctcctgttggctgacatcacagatgtggtgttggctcctcctacttccctaggagaggtggtttctaaaagtgattgaagcagtttgtgcagtgtttgtaattcttgggtaagagcccaggattttgaagataatagttttttagtaaagtgctactaaatgtagtaaatcatgtaggattttagggatgtaattatatgttaatacagaaaatagtcctggtcaatagaaaattgtctgaagttttacctatgatttttagctctgtaaaatcatagacaataaccattctatttccatgcctgactagcccagggctggacgtatagcgggtgtccaataacgtttagtcaatcagataatacccagaacttagtaggagtttcattcaaaaactattttttgaacccaaccatgtaccagttactattttaagtactgataatgaagcagtgaataagaaagagcaaagctcttgcccttatggtgcttacattctagacggggagacagacagcaggcaaatcaataaatagatactatgtgccagatagtgataaatgccatgaaaaacataaaatgagagacgattcaccttggagcaaaagattacttttaagtgactgaaataactactaatcctgactaatttattatcaagagttaattggtattccaaattcattgagcagggtgctaaaaacaacccaaatgtgctcctttaactcctttgtttaaatgacaaaagttagaatgtggtcactcagacctaactgtgcccttagagccaaagctgtggtgtcattattggttatttctagttgattcatagtttgtcccaatccaggttcaatcgggttatttttaagatctgtacaatattgcataatagtaacccagttaacttaccacttaggttagatttcctggaggaacaaaggtagaaattcaaccataggtcaaattatcacatagaaggaaaaggctttttttcaaagaaaaaattttttgaacactttactcccagtatgcattacttttgtagtagtaatgcttaagactgttttaaagaaaaattgctttctgtttaattaatgtttactgttattaatgctagtgatacttaatcttgaagcatcaagttttcagaaacctatagtgatcaataatgggtctcagatgagaggatgattatttttttcatggaatttcagtccaacatcctggtgtactggtccctctgggatgaatttataaggctcatgatataggaaaaggaatatagggctaaaaatagttttatttctgatataaattctggtacttgacaccaaagtttgaagtcaagtcatgccaataaattttaacatccaaatgaaatagatgattttctatgaagatgaaaaataccaaaattgactcaagaagggagagaaaatggaagatgttgaaaaatagcatagga

SEQ ID NO: 283594 - DNA, 675 bp, Artificial Sequence
  derived and/or modified sequence
atggacagcaaccaccagagcaactacaagctgagcaagaccgagaagaaatttctccgcaagcaaatcaaggccaagcataccttactccgccacgagggcattgagaccgtctcatatgcaacacagagcctggtggtggcgaatggaggactggggaatggggtgtctcggaaccaactcttgcctgttctcgagaagtgtggcctggtagatgcactgctcatgccgcccaacaagccttactcttttgctcggtaccggaccaccgaggaatcgaaacgggcctacgtcactctgaacggcaaagaggtcgtggacgacctggggcaaaagattactctctacctaaatttcgtcgaaaaagtccagtggaaggagctgagacctcaggcgctgcccccagggttgatggttgtggaagaaataattagctcagaggaggagaaaatgctgctggagtctgtagactggaccgaagatacagacaaccagaatagccagaagtctctgaagcaccgtagggtcaagcattttgggtatgagttccactatgaaaataacaacgtggacaaggacaagccactcagtgggggcctgcctgacatctgcgagtcctttctggagaagtggctgcgcaaggccgagaaaaacctggaggtgggaattcactag

SEQ ID NO: 283595 - DNA, 675 bp, Artificial Sequence
  derived and/or modified sequence
atggatagcaatcatcaatctaactacaaactgagcaagacggagaagaaatttctgcgaaagcagattaaggccaaacatactctccttcggcacgagggcatcgaaactgtgagctatgcaactcagtccctggtggtcgccaatgggggacttggcaacggggtaagcagaaatcagctccttcccgtgctggagaagtgcgggctggtggatgctttacttatgcctcctaacaagccttattcgtttgccaggtaccgcactactgaggaatctaaacgggcatacgttacccttaatggcaaagaagtggtggacgatctgggacaaaaaatcaccctgtatctgaattttgtggaaaaggtccagtggaaggagttacgccctcaggccctgcctcccggactgatggtcgtggaagagattatttccagtgaggaagaaaagatgctgctggagagtgtcgattggacggaagacaccgataaccaaaactcacaaaagtcactgaaacatagacgcgtgaagcacttcggttatgagtttcattacgaaaacaacaacgttgataaggacaagccgctgtccgggggtttgcccgacatttgcgagtctttcttggaaaagtggctcaggaaggccgagaaaaacctcgaggtaggcattcactag

SEQ ID NO: 283596 - DNA, 675 bp, Artificial Sequence
  derived and/or modified sequence
atggacagcaaccaccagagcaactacaagctgagcaagaccgagaagaagttcctgagaaagcagatcaaggccaagcacaccctgctgagacacgagggcatcgagaccgtgagctacgccacccagagcctggtggtggccaacggcggcctgggcaacggcgtgagcagaaaccagctgctgcccgtgctggagaagtgcggcctggtggacgccctgctgatgccccccaacaagccctacagcttcgccagatacagaaccaccgaggagagcaagagagcctacgtgaccctgaacggcaaggaggtggtggacgacctgggccagaagatcaccctgtacctgaacttcgtggagaaggtgcagtggaaggagctgagaccccaggccctgccccccggcctgatggtggtggaggagatcatcagcagcgaggaggagaagatgctgctggagagcgtggactggaccgaggacaccgacaaccagaacagccagaagagcctgaagcacagaagagtgaagcacttcggctacgagttccactacgagaacaacaacgtggacaaggacaagcccctgagcggcggcctgcccgacatctgcgagagcttcctggagaagtggctgagaaaggccgagaagaacctggaggtgggcatccactag

SEQ ID NO: 283597 - protein, 31 aa, Artificial Sequence
  derived and/or modified sequence
MNASEFRRRGKEMVDYMANYMEGIEGRQVYP

SEQ ID NO: 283598 - DNA, 96 bp, Artificial Sequence
  derived and/or modified sequence
atgaacgctagtgagtttcggaggaggggcaaggagatggtggactatatggctaactacatggagggcatagaggggcggcaggtctatccgtag

SEQ ID NO: 283599 - DNA, 96 bp, Artificial Sequence
  derived and/or modified sequence
atgaatgccagcgagttcagaagaagaggcaaggagatggtggactacatggccaactacatggagggcatcgagggccggcaggtgtacccctag

SEQ ID NO: 283600 - DNA, 96 bp, Artificial Sequence
  derived and/or modified sequence
atgaacgccagcgagttccggcggcggggcaaggagatggtggactacatggccaattatatggaggggatcgaaggcagacaggtctacccatag

SEQ ID NO: 283601 - DNA, 96 bp, Artificial Sequence
  derived and/or modified sequence
atgaacgccagcgaatttcgccgaagggggaaagagatggtggactatatggccaattacatggagggcatcgaggggcgacaagtctacccttag

SEQ ID NO: 283602 - DNA, 96 bp, Artificial Sequence
  derived and/or modified sequence
atgaacgccagcgagttcagaagaagaggcaaggagatggtggactacatggccaactacatggagggcatcgagggcagacaggtgtacccctag

SEQ ID NO: 283603 - DNA, 460 bp, Artificial Sequence
  derived and/or modified sequence
gcaatccagtgtgtaggtccagggcgacaagcgctgctcccatggctggggtaagtccctccagcattcagccttgctccctgtgcttatctggatgcggtgtaggatgaagatgaccctatagaactctaccctggaagtcctggcaaagtggatatgtgacatttttgaaaccagggacatgttggtgctgcttaatatttaaatcataattttcagactcttaaaaattactaaataagtttgaagagacacagccatctgcctacagtgccacccctgagcttcacgccaccctggtctccaggaaaggggagagtctcaggaatattgaatgcagttttcacctctgacagagcccagacaccatgaacgcaagtgaattccgaaggagagggaaggagatggtggattacatggccaactacatggaaggcattgagggacgccaggtctaccc

SEQ ID NO: 283604 - protein, 469 aa, Artificial Sequence
  derived and/or modified sequence
MDAPRASAAKPPTGRKMKARAPPPPGKAATLHVHSDQKPPHDGALGSQQNLVRMKEALRASTMDVTVVLPSGLEKRSVLNGSHAMMDLLVELCLQNHLNPSHHALEIRSSETQQPLSFKPNTLIGTLNVHTVFLKEKVPEEKVKPGPPKVPEKSVRLVVNYLRTQKAVVRVSPEVPLQNILPVICAKCEVSPEHVVLLRDNIAGEELELSKSLNELGIKELYAWDNRRETFRKSSLGNDETDKEKKKFLGFFKVNKRSNSKGCLTTPNSPSMHSRSLTLGPSLSLGSISGVSVKSEMKKRRAPPPPGSGPPVQDKASEKVSLGSQIDLQKKKRRAPAPPPPQPPPPSPLIPNRTEDKEENRKSTMVYGAAEAVIRLLSLLLNTTAPGTAKPRTLWMSEGRSSLHNPEIKCSCFSSSSPFPQSLLSLLLGLSSICECMCTLRHTHAHTHNPSCVLPTSEILAFGRQSLIS

SEQ ID NO: 283605 - DNA, 1002 bp, Artificial Sequence
  derived and/or modified sequence
atgcatccacaggcacacgagccgggggtgcgacgggaagggcatcggcgtcatagatggcggcagttgcagcctggtggaggagctggcgctgctcgtagccacgctgagggcggcggacaccctgcccagggcctgcgcgcccctcagcatcagatgaaacgtggtgaactgttcgactatcttacagaaaaggtaaccctgagtgaaaaagaaacccggaagatcatgcgggctctgctggaagttatctgtacactccataaactcaacattgtgcaccgggacctgaagcctgagaacatactcttggatgataacatgaacattaagctaaccgactttggattttcctgccagcttgaaccgggggagagattacgggaagtctgcggcacgccatcgtacctagctccagagataattgaatgttcaatgaatgaagaccaccctggatacggcaaggaggtggatatgtggagcactggggttatcatgtacaccctgttggccggcagcccaccattctggcaccgcaaacagatgctgatgctccgcatgattatgtcaggcaactaccagtttggctctcctgaatgggacgactattccgataccgtcaaggacctcgtttcccggttcctagtggtgcagcctcaaaatcgctacaccgcggaagaggcgcttgcccatccattttttcaacagtatctcgtggaggaagttagacacttctcccctagaggcaagtttaaggtcatagctttaaccgtgttggcgtccgtgagaatttactaccagtatcggagggtcaaacccgtgaccagggagattgtcattagagatccatacgcactgcgccccctgagaaggcttattgacgcgtacgccttccggatttatggccactgggttaaaaaaggccagcagcagaatcgggcggcgctttttgagaacacacctaaggcagtgctgttgtcactggcggaggaagattattag

SEQ ID NO: 283606 - DNA, 1002 bp, Artificial Sequence
  derived and/or modified sequence
atgcacccccaggcccacgagcccggggtgagaagagagggccaccggcggcaccgctggaggcagctgcagcccggcggcggggccggggccgcccggagccacgccgagggcggcggccacccagcccagggcctgcgggccccccagcaccagatgaagagaggagagctgtttgactacctgacagagaaggtgaccctgtctgagaaggagaccaggaagatcatgagggccctgctggaggtgatctgcaccctgcacaagctgaacatcgtgcaccgggacctgaagccagagaacatcctgctggatgacaacatgaacatcaagctgacagactttggcttcagctgccagctggagcctggagagcggctgcgggaggtgtgtggcacccccagctacctggcccctgagatcattgaatgttccatgaatgaagaccaccctggctacggcaaggaggtggacatgtggagcactggagtcatcatgtacaccctgctggccggcagcccccccttctggcacaggaagcagatgctgatgctgaggatgatcatgagcggcaactaccagtttggcagccctgagtgggatgactacagcgacacagtgaaggacctggtgagccgcttcctggtggtgcagccccagaaccgctacacagctgaggaggccctggcccaccccttcttccagcagtacctggtggaggaggtgcgccacttcagcccccggggcaagttcaaggtgattgccctgactgtgctggcctctgtgcgcatctactaccagtacagaagagtgaagcctgtgacccgggagatcgtcatccgggacccctatgccctgcggcccctgcggcggctgattgatgcctatgccttccgcatctacggccactgggtgaagaagggccagcagcagaacagagctgccctgtttgagaacacccccaaggctgtgctgctgagcctggccgaggaggactactag

SEQ ID NO: 283607 - DNA, 1002 bp, Artificial Sequence
  derived and/or modified sequence
atgcacccccaggcccacgagcccggcgtgcggcgggagggccaccgaaggcacaggtggcggcagctccagccgggcgggggcgctggagcggcgcggtctcacgccgaggggggcgggcaccccgctcaaggcttgcgggcccctcagcaccagatgaagcggggagagctgtttgattacttgaccgagaaggtcacacttagtgaaaaggagacaaggaagattatgagggccctgcttgaagtgatttgcactctccacaagcttaatattgtgcacagagacttgaaacccgagaatattctgttggacgacaatatgaacattaaacttacagacttcggattttcatgccagctcgagccaggtgaacgattgcgtgaagtttgtggcacaccatcctaccttgccccggagataatagaatgcagcatgaacgaagaccaccctggatatggaaaagaggttgacatgtggagcaccggcgtgatcatgtacactctcttagccgggtctcccccattctggcacaggaagcaaatgcttatgctgagaatgattatgtcgggcaattaccagttcggcagccctgaatgggatgattactccgatactgtgaaggaccttgtgagtcgctttctggtggtccagccacagaatcggtataccgctgaagaggctctggcgcacccgttcttccaacagtacttggttgaagaggttcggcatttcagtcccaggggtaagtttaaggtgattgcgttgaccgtgttagcttccgtgcggatatattaccagtatagacgggtaaaaccagtgactagggaaatcgtcattcgcgacccatatgcgctaagacccctacgaagactgatcgatgcttacgctttcagaatctatggccattgggtcaaaaagggccagcagcagaacagggccgccctcttcgagaatactcctaaagcagtgctcctatcgctggccgaagaggattactag

SEQ ID NO: 283608 - DNA, 1002 bp, Artificial Sequence
  derived and/or modified sequence
atgcacccccaggcccacgagcccggagtgaggcgggagggacatcgacgccatagatggcggcagctccagccaggtggaggcgctggagccgctagaagccacgccgagggaggcggtcaccccgctcaagggctgcgggcaccacagcatcagatgaaaagaggcgaactgttcgactatctcactgagaaggttactctatctgagaaggagaccaggaaaattatgcgcgcattgctggaggtcatctgtacactgcataagctgaacattgtccacagggatctgaagccagaaaacattctgttggacgataacatgaatatcaagttaactgattttggttttagctgtcagctggaaccaggcgaaagactgcgggaggtgtgcggaacgcccagctacttggcccctgaaatcatcgagtgttccatgaacgaggatcatccgggttacggaaaggaagtcgatatgtggtccacaggcgtcatcatgtatacccttctcgcaggtagtccgcctttttggcataggaaacagatgttaatgctcaggatgataatgtccggcaattatcagttcgggagcccagagtgggatgattacagcgacactgtgaaagacttagtgagtaggtttctggtagtgcagccgcagaaccgctacaccgctgaagaggctctggcacaccctttttttcaacagtacctagtggaagaggttcgtcatttcagcccgagggggaaatttaaggtgatcgctctgaccgtgttggcttctgtgcgaatctactatcagtaccggagggtgaagcccgtgactcgcgagatcgtgattagagacccatatgcactccgaccactgcgcaggctcatcgatgcctacgcctttcgtatctacggacattgggttaagaaggggcagcagcagaaccgtgccgctttgtttgagaatacaccaaaggcagtccttttgtctttggccgaggaggactattag

SEQ ID NO: 283609 - DNA, 1002 bp, Artificial Sequence
  derived and/or modified sequence
atgcacccccaggcccacgagcccggcgtgagaagagagggccacagaagacacagatggagacagctgcagcccggcggcggcgccggcgccgccagaagccacgccgagggcggcggccaccccgcccagggcctgagagccccccagcaccagatgaagagaggcgagctgttcgactacctgaccgagaaggtgaccctgagcgagaaggagaccagaaagatcatgagagccctgctggaggtgatctgcaccctgcacaagctgaacatcgtgcacagagacctgaagcccgagaacatcctgctggacgacaacatgaacatcaagctgaccgacttcggcttcagctgccagctggagcccggcgagagactgagagaggtgtgcggcacccccagctacctggcccccgagatcatcgagtgcagcatgaacgaggaccaccccggctacggcaaggaggtggacatgtggagcaccggcgtgatcatgtacaccctgctggccggcagcccccccttctggcacagaaagcagatgctgatgctgagaatgatcatgagcggcaactaccagttcggcagccccgagtgggacgactacagcgacaccgtgaaggacctggtgagcagattcctggtggtgcagccccagaacagatacaccgccgaggaggccctggcccaccccttcttccagcagtacctggtggaggaggtgagacacttcagccccagaggcaagttcaaggtgatcgccctgaccgtgctggccagcgtgagaatctactaccagtacagaagagtgaagcccgtgaccagagagatcgtgatcagagacccctacgccctgagacccctgagaagactgatcgacgcctacgccttcagaatctacggccactgggtgaagaagggccagcagcagaacagagccgccctgttcgagaacacccccaaggccgtgctgctgagcctggccgaggaggactactag

SEQ ID NO: 283610 - protein, 439 aa, Artificial Sequence
  derived and/or modified sequence
MRWSNLFTSEKGSDPDKERKAPENHADTIGSGRAIPIKQGMLLKRSGKWLKTWKKKYVTLCSNGVLTYYSSLGDYMKNIHKKEIDLQTSTIKVPGKWPSLATSACTPISTSKSNGLSKDMDTGLGDSICFSPSISSTTSPKLNPPPSPHANKKKHLKKKSTNNFMIVSATGQTWHFEATTYEERDAWVQAIQSQILASLQSCESSKSKSQLTSQSKAMALQSIQNMRGNAHCVDCETQNPKWASLNLGVLMCIECSGIHRSLGTRLSRVRSLELDDWPVELRKVMSSIGNDLANSIWEGSSQGQTKPSEKSTREEKERWIRSKYEEKLFLAPLPCTELSLGQQLLRATADEDLQTAILLLAHGSREEVNETCGEGDGCTALHLACRKGNVVLAQLLIWYGVDVMARDAHGNTALTYARQASSQECINVLLQYGCPDKCV

SEQ ID NO: 283611 - protein, 439 aa, Artificial Sequence
  derived and/or modified sequence
MRWSNLFTSEKGSDPDKERKAPENHADTIGSGRAIPIKQGMLLKRSGKWLKTWKKKYVTLCSNGVLTYYSSLGDYMKNIHKKEIDLQTSTIKVPGKWPSLATSACTPISSSKSNGLSKDMDTGLGDSICFSPSISSTTSPKLNPPPSPHANKKKHLKKKSTNNFMIVSATGQTWHFEATTYEERDAWVQAIQSQILASLQSCESSKSKSQLTSQSEAMALQSIQNMRGNAHCVDCETQNPKWASLNLGVLMCIECSGIHHSLGTRLSRVRSLELDDWPVELRKVMSSIGNDLANSIWEGSSQGQTKPSEKSTREEKERWIRSKYEEKLFLAPLPCTELSLGQQLLWATADEDLQTAILLLAHGSREEVNETCGEGDGCTALHLACRKGNVVLAQLLIWYGVDVMARDAHGNTALTYARQASSQECINVLLQYGCPDECV

SEQ ID NO: 283612 - DNA, 2784 bp, Artificial Sequence
  derived and/or modified sequence
gggcattgtgtgccacatgcctgggctcccacctggggccagtgggcttcagtctgtaggtgactacagaaggaggaggagctccgtctgttctctcttcaggcagttgttgtgtctctcagcacttgttgggttcacaacctattaaataagccggctggtcttcaccctcccagacaagtcaactcaggggaggcagcagggtgcgggccttggcccgcagccctagccggggccggggccagggccagggccagggctggtgcccggggccgcgctgtgaggtgggcaggcgaggagcgggaagaccatctctgcaagtgcagcatagcctcggcctaggacagcgggagtgcgtggccaaagctgtgagcagaggcacaggtggtggcagacagtagaggcgccccatggggaacatactgacctgtcgtgtgcaccctagcgtcagcctcgagtttgaccagcagcaggggtcggtgtgtccctctgaatctgagatctatgaggcaggagctggggacaggatggcaggagcgcccatggctgctgctgtacagcctgctgaggtgactgttgaagttggtgaggacctccacatgcaccacgttcgtgaccgggagatgcctgaagctttggagtttaacctttctgccaatccagaggcaagcacaatattccagaggaactctcaaacagatgctttggagtttaacccttctgccaatccagaggcaagcacaatattccagaggaactctcaaacagatgttgtagaaataagaagaagcaactgtacaaaccatgtatctactgtgcgtttcagtcaacaatacagcttgtgttcgacaatattccttgatgacagcacagccatccagcattatcttacaatgacaataatatctgtgaccttggagatacctcatcatatcacacaaagagatgcagatagatctttgagcatacctgatgaacagttacactcatttgcggtttccaccgtgcacattatgaagaaaagaaatggaggtgggagtttaaataactattcctcctccattccatcgactcccagcaccagccaggaggaccctcagttcagtgttcctcccactgccaacacacccacccccgtttgcaagcggtccatgcgctggtccaacctgtttacatctgagaaagggagtgacccagacaaagagaggaaagccccggagaatcatgctgacaccatcgggagcggcagagccatccccattaaacagggcatgctcttaaagcgaagtgggaaatggctgaagacatggaaaaagaaatacgtcaccctgtgttccaatggcgtgctcacctattattcaagcttaggtgattatatgaagaatattcataaaaaagagattgaccttcagacatctaccatcaaagtcccaggaaagtggccatccctagccacatcggcctgcacacccatctccacctctaaaagcaatggcctatccaaggacatggacaccgggctgggtgactccatatgcttcagccccagtatctccagcaccaccagccccaagctcaacccgcccccctctcctcatgccaataaaaagaaacacctaaagaagaaaagcaccaacaactttatgattgtgtctgccactggccaaacgtggcactttgaagccacgacgtatgaggagcgggatgcctgggtccaagccatccagagccagatcctggccagcctgcagtcatgcgagagcagtaaaagcaagtcccagctgaccagccagagcaaggccatggccctgcagtcgatccaaaacatgcgtgggaacgcccactgtgtggactgtgagacccagaatcctaagtgggccagtttgaacttgggagtcctcatgtgtattgaatgctcaggaatccaccgcagtcttggcacccgcctttcccgtgtgcgatctctggagctggatgactggccagttgagctcaggaaggttatgtcatctattggcaatgacctagccaacagcatctgggaagggagcagccaggggcagacaaaaccctcagaaaagtccacgagggaagagaaggaacggtggatccgttccaaatatgaggagaagctctttctggccccactaccctgcactgagctgtccctgggccagcagctgctgcgggccaccgctgatgaggacctgcagacagccatcctgctgctggcacatggctcccgtgaggaggtgaacgagacctgtggggagggagacggctgcacggcgctccatctggcctgccgcaaggggaatgtggtcctggcgcagctcctgatctggtacggggtggacgtcatggcccgagatgcccacgggaacacagcgctgacctacgcccggcaggcctccagccaggagtgcatcaacgtgcttctgcagtacggctgccccgacaagtgtgtgtagtatctgttttatttgactgcagtctccttggtgcaaaaacaaaatgggaaaaataaggataactcagaatttcaaaaggaaatcacaaattcagctaataatagcattttcagtacttttcgtaaactaagtaaatacacaaaatgttgatttttctgaccataagacgtattttatgtccttttgccaaggtggatttgttagtctcaggccctcctggccacattgcccaagtcacacaggcttctgtattatgtatttagataaaatgtgtgaaaatatatttgaaataaagttcataaatatgcattga

SEQ ID NO: 283613 - DNA, 2784 bp, Artificial Sequence
  derived and/or modified sequence
gggcattgtgtgccacatgcctgggctcccacctggggccagtgggcttcagtctgtaggtgactacagaaggaggaggagctccgtctgttctctcttcaggcagttgttgtgtctctcagcacttgttgggttcacaacctattaaataagccggctggtcttcaccctcccagacaagtcaactcaggggaggcagcagggtgcgggccttggcccgcagccctagccggggccggggccagggccagggccagggctggtgcccggggccgcgctgtgaggtgggcaggcgaggagcgggaagaccatctctgcaagtgcagcatagcctcggcctaggacagcgggagtgcgtggccaaagctgtgagcagaggcacaggtggtggcagacagtagaggcgccccatggggaacatactgacctgtcgtgtgcaccctagcgtcagcctcgagtttgaccagcagcaggggtcggtgtgtccctctgaatctgagatctatgaggcaggagctggggacaggatggcaggagcgcccatggctgctgctgtacagcctgctgaggtgactgttgaagttggtgaggacctccacatgcaccacgttcgtgaccgggagatgcctgaagctttggagtttaacctttctgccaatccagaggcaagcacaatattccagaggaactctcaaacagatgctttggagtttaacccttctgccaatccagaggcaagcacaatattccagaggaactctcaaacagatgttgtagaaataagaagaagcaactgtacaaaccatgtatctactgtgcgtttcagtcaacaatacagcttgtgttcgacaatattccttgatgacagcacagccatccagcattatcttacaatgacaataatatctgtgaccttggagatacctcatcatatcacacaaagagatgcagatagatctttgagcatacctgatgaacagttacactcatttgcggtttccaccgtgcacattatgaagaaaagaaatggaggtgggagtttaaataactattcctcctccattccatcgactcccagcaccagccaggaggaccctcagttcagtgttcctcccactgccaacacacccacccccgtttgcaagcggtccatgcgctggtccaacctgtttacatctgagaaagggagtgacccagacaaagagaggaaagccccggagaatcatgctgacaccatcgggagcggcagagccatccccattaaacagggcatgctcttaaagcgaagtgggaaatggctgaagacatggaaaaagaaatacgtcaccctgtgttccaatggcgtgctcacctattattcaagcttaggtgattatatgaagaatattcataaaaaagagattgaccttcagacatctaccatcaaagtcccaggaaagtggccatccctagccacatcggcctgcacacccatctccagctctaaaagcaatggcctatccaaggacatggacaccgggctgggtgactccatatgcttcagccccagtatctccagcaccaccagccccaagctcaacccgcccccctctcctcatgccaataaaaagaaacacctaaagaagaaaagcaccaacaactttatgattgtgtctgccactggccaaacgtggcactttgaagccacgacatatgaggagcgggatgcctgggtccaagccatccagagccagatcctggccagcctgcagtcatgcgagagcagtaaaagcaagtcccagctgaccagccagagcgaggccatggccctgcagtcgatccaaaacatgcgtgggaatgcccactgtgtggactgtgagacccagaatcctaagtgggccagtttgaacttgggagtcctcatgtgtattgaatgctcaggaatccaccacagtcttggcacccgcctttcccgtgtgcgatctctggagctggatgactggccagttgagctcaggaaggttatgtcatctattggcaatgacctagccaacagcatctgggaagggagcagccaggggcagacaaaaccctcagaaaagtccacgagggaagagaaggaacggtggatccgttccaaatatgaggagaagctctttctggccccactaccctgcactgagctgtccctgggccagcagctgctgtgggccaccgctgatgaggacctgcagacagccatcctgctgctggcacatggctcccgtgaggaggtgaacgagacctgtggggagggagacggctgcacggcgctccatctggcctgccgcaaggggaatgtggtcctggcgcagctcctgatctggtacggggtggacgtcatggcccgagatgcccacgggaacacagcgctgacctacgcccggcaggcctccagccaggagtgcatcaacgtgcttctgcagtacggctgccccgacgagtgtgtatagtatctgttttatttgactgcagtctccttggtgcaaaaacaaaatgggaaaaataaggataactcagaatttcaaaaggaaatcacaaattcagctaataatagcattttcagtacttttcgtaaactaagtaaatacacaaaatgttgatttttctgaccataagacgtattttatgtccttttgccaaggtggatttgttagtctcaggccctcctggccacattgcccaagtcacacaggcttctgtattatgtatttagataaaatgtgtgaaaatatatttgaaataaagttcataaatatgcattga

SEQ ID NO: 283614 - protein, 330 aa, Artificial Sequence
  derived and/or modified sequence
MKEDCLPSSHVPISDSKSIQKRDVQGLSEEGTLIIEGLLNIAWGLRRPIRLQMQDDREQVHLPSTSWMPRRPSCPLGCWSLLLGLSSLSLPAAISALQLSVFRKEPSPQNGNITAQGPSIQPVHKAESSTDSSGPLEEAEEAPQLMRTKSDASCMSQRRPKCRAPGEAQRIRRHRFSINGHFYNHKTSVFTPAYGSVTNVRVNSTMTTLQVLTLLLNKFRVEDGPSEFALYIVHESGERTKLKDCEYPLISRILHGPCEKIARIFLMEADLGVEVPHEVAQYIKFEMPVLDSFVEKLKEEEEREIIKLTMKFQALRLTMLQRLEQLVEAK

SEQ ID NO: 283615 - protein, 126 aa, Artificial Sequence
  derived and/or modified sequence
MKEDCLPSSHVPISDSKSIQKSELLGLLKTYNCYHEGKSFQLRHREEEGTLIIEGLLNIAWGLRRPIRLQMQDDREQVHLPSTSWMPRRPSCPLAPGGGRGGPPADADQERRQLHEPEEAQVPRPR

SEQ ID NO: 283616 - protein, 151 aa, Artificial Sequence
  derived and/or modified sequence
MKEDCLPSSHVPISDSKSIQKSELLGLLKTYNCYHEGKSFQLRHREEEGTLIIEGLLNIAWGLRRPIRLQMQDDREQVHLPSTSWMPRRPSCPLGCWSLLLGLSSLSLPAAISALQLSVFRKEPSPQNGNITAQGPSIQPVHKAESSTDSS

SEQ ID NO: 283617 - DNA, 993 bp, Artificial Sequence
  derived and/or modified sequence
atgaaggaggactgcctgcccagcagccacgtgcccatcagcgacagcaagagcatccagaagagagacgtgcagggcctgagcgaggagggcaccctgatcatcgagggcctgctgaacatcgcctggggcctgagaagacccatcagactgcagatgcaggacgacagagagcaggtgcacctgcccagcaccagctggatgcccagaagacccagctgccccctgggctgctggagcctgctgctgggcctgagcagcctgagcctgcccgccgccatcagcgccctgcagctgagcgtgttcagaaaggagcccagcccccagaacggcaacatcaccgcccagggccccagcatccagcccgtgcacaaggccgagagcagcaccgacagcagcggccccctggaggaggccgaggaggccccccagctgatgagaaccaagagcgacgccagctgcatgagccagagaagacccaagtgcagagcccccggcgaggcccagagaatcagaagacacagattcagcatcaacggccacttctacaaccacaagaccagcgtgttcacccccgcctacggcagcgtgaccaacgtgagagtgaacagcaccatgaccaccctgcaggtgctgaccctgctgctgaacaagttcagagtggaggacggccccagcgagttcgccctgtacatcgtgcacgagagcggcgagagaaccaagctgaaggactgcgagtaccccctgatcagcagaatcctgcacggcccctgcgagaagatcgccagaatcttcctgatggaggccgacctgggcgtggaggtgccccacgaggtggcccagtacatcaagttcgagatgcccgtgctggacagcttcgtggagaagctgaaggaggaggaggagagagagatcatcaagctgaccatgaagttccaggccctgagactgaccatgctgcagagactggagcagctggtggaggccaagtag

SEQ ID NO: 283618 - DNA, 456 bp, Artificial Sequence
  derived and/or modified sequence
atgaaggaggactgcctgcccagcagccacgtgcccatcagcgacagcaagagcatccagaagagcgagctgctgggcctgctgaagacctacaactgctaccacgagggcaagagcttccagctgagacacagagaggaggagggcaccctgatcatcgagggcctgctgaacatcgcctggggcctgagaagacccatcagactgcagatgcaggacgacagagagcaggtgcacctgcccagcaccagctggatgcccagaagacccagctgccccctgggctgctggagcctgctgctgggcctgagcagcctgagcctgcccgccgccatcagcgccctgcagctgagcgtgttcagaaaggagcccagcccccagaacggcaacatcaccgcccagggccccagcatccagcccgtgcacaaggccgagagcagcaccgacagcagctag

SEQ ID NO: 283619 - DNA, 993 bp, Artificial Sequence
  derived and/or modified sequence
atgaaagaagattgcctccccagctctcacgtgccaatttctgacagtaaatcaatccagaaaagggacgtgcaggggctaagcgaggaggggaccctaattatcgagggacttctcaatattgcctgggggctccgccggcctatacggcttcagatgcaggacgatcgggagcaggtgcacctgcctagcacatcatggatgccccggcgcccctcttgcccactaggctgctggtccctgttgctcggcttgagttcgctgagcctgcccgccgccatcagtgccctgcaactgtctgtttttcgcaaggaaccctccccccagaatggaaatatcaccgctcaagggcccagtatccaacccgtgcacaaggccgagagcagcaccgatagtagtggtccccttgaggaagccgaggaagcaccccagttaatgcgcactaagtccgatgcatcttgcatgagccagaggcgaccaaagtgccgggctccaggcgaggcccagcgtatccgcagacaccgcttctcaattaacggccatttctataaccacaaaacatctgttttcacacccgcttatggcagcgtcactaacgtgcgagtgaactctaccatgactaccctgcaggtgctgacactccttctcaataagtttagagttgaggacggcccatctgagtttgctctctatattgtgcacgagagcggcgaacggaccaagcttaaagattgcgagtacccgctaatctcccgcatactgcacgggccttgcgaaaagatagccagaattttcttgatggaagcagatctgggggttgaggtgccacacgaagtggctcaatatattaagtttgagatgcccgtactggactcgtttgtggagaaactgaaagaggaagaagagcgggagatcataaagctgactatgaagtttcaggccctgcgactgaccatgctgcagcgccttgagcagctggtagaggccaaatag

SEQ ID NO: 283620 - DNA, 456 bp, Artificial Sequence
  derived and/or modified sequence
atgaaagaagactgcctccctagcagccatgttcctatcagtgattccaaaagcattcagaaatcagaacttctcggattactgaagacttataactgttatcacgaaggaaagtcttttcagctgagacaccgcgaagaggaggggaccttgatcattgagggtttgttaaatatagcctggggtctgcggcgcccaatcagactgcaaatgcaggatgacagggaacaggtgcacttgcctagtacatcgtggatgcctagacgtccctcatgcccgctcggctgttggtctctcctcctgggtctgtcttctttatctcttccagctgctattagcgcactgcagctcagtgtttttcgaaaggaaccgagcccccaaaacggtaatatcactgcacagggccccagtattcagcccgtgcataaagcagagtcttcaactgactcctcgtag

SEQ ID NO: 283621 - DNA, 993 bp, Artificial Sequence
  derived and/or modified sequence
atgaaggaggactgcctgcccagcagccacgtgcccatcagtgacagcaagagcatccagaagagagatgtgcagggcctgtctgaggagggcaccctcatcatcgagggcctgctgaacatcgcctggggcctgcggcggcccatccggctgcagatgcaggatgaccgggagcaggtgcacctgcccagcacctcctggatgccccggcggcccagctgccccctgggctgctggagcctgctgctgggcctgagcagcctgagcctgcctgctgccatcagcgccctgcagctgagcgtcttcaggaaggagcccagcccccagaatggaaacatcacagcccagggccccagcatccagcctgtgcacaaggccgagagcagcacagacagcagcggccccctggaggaggccgaggaggccccccagctgatgaggaccaagagtgatgccagctgcatgagccagaggcggcccaagtgccgggcccctggagaggcccagaggatccgccgccaccgcttcagcatcaatggccacttctacaaccacaagaccagcgtcttcaccccagcctacggctctgtgaccaacgtgcgggtgaacagcaccatgaccaccctgcaggtgctgaccctgctgctgaacaagttccgggtggaggatggccccagcgagtttgccctgtacatcgtgcatgagagcggggagaggaccaagctgaaggactgtgagtaccccctcatcagccgcatcctgcacggcccctgtgagaagatcgcccgcatcttcctgatggaggccgacctgggcgtggaggtgccccatgaggtggcccagtacatcaagtttgagatgcctgtgctggacagctttgtggagaagctgaaggaggaggaggagcgggagatcatcaagctgaccatgaagttccaggccctgcggctgaccatgctgcagaggctggagcagctggtggaggccaagtag

SEQ ID NO: 283622 - DNA, 456 bp, Artificial Sequence
  derived and/or modified sequence
atgaaggaggactgcctgcccagcagccacgtgcccatcagtgacagcaagagcatccagaagtctgagctgctgggcctgctgaagacctacaactgctaccacgagggcaagagcttccagctgcggcaccgggaggaggagggcaccctcatcatcgagggcctgctgaacatcgcctggggcctgcggcggcccatccggctgcagatgcaggatgaccgggagcaggtgcacctgcccagcacctcctggatgccccggcggcccagctgccccctgggctgctggagcctgctgctgggcctgagcagcctgagcctgcctgctgccatcagcgccctgcagctgagcgtcttcaggaaggagcccagcccccagaatggaaacatcacagcccagggccccagcatccagcctgtgcacaaggccgagagcagcacagacagcagctag

SEQ ID NO: 283623 - DNA, 993 bp, Artificial Sequence
  derived and/or modified sequence
atgaaggaggactgcctgcccagcagccacgtgcccatcagcgactctaagagcatccaaaaaagggatgtccaggggctcagcgaggaaggaaccttaatcatagagggtttgctcaatattgcctggggccttcgacgccctattcgattgcaaatgcaggacgatcgagagcaggttcatttaccttcaacctcttggatgcctcgcagaccgagctgtcccctgggatgttggtccctgcttctgggactcagctccctcagcctcccagcggccattagcgcgctgcagctttcagtgtttaggaaggaaccttcgcctcaaaatggaaatattactgcacagggaccctctatccagccggtccataaagcagagtccagcacggatagtagtgggccactcgaggaagccgaagaggcccctcagctgatgcggacaaagtcagacgctagttgcatgagccagcgccgacccaagtgtcgggcaccgggggaggcccagcgaatccggagacatcgcttctctatcaacgggcatttctacaatcataagacgagtgtgttcactcccgcctacggcagtgtgactaacgtgcgggtgaactctactatgactacactccaggtgttgactctgctattaaacaagtttcgggtcgaagatgggccctccgagttcgccctttacattgttcacgaatctggcgaacgcactaagcttaaggactgcgagtatccactaatctcacggattttgcacgggccatgcgaaaagatcgcgcggatcttcctgatggaagctgatttaggagtcgaagttccccacgaggttgcccagtacattaaatttgaaatgcccgtactcgactctttcgtcgaaaagctgaaggaggaggaggagcgcgaaattattaaattgaccatgaagttccaggcgctgcgactaactatgctgcagagactggagcagttggtggaggccaaatag

SEQ ID NO: 283624 - DNA, 456 bp, Artificial Sequence
  derived and/or modified sequence
atgaaggaggactgcctgcccagcagccacgtgcccatcagcgactccaagtcaatccagaaatccgaacttctgggcttgctgaaaacttataattgttaccacgaaggcaagtctttccaacttagacatagagaggaggagggcaccctgattattgaaggactccttaatatagcctggggacttcgaaggcccattaggcttcagatgcaggacgacagggagcaagtgcatttgccaagtacaagctggatgccccgccggccttcctgtccactgggctgctggagcttgctgctgggcctctcttcactgtcattgccagcagctattagtgcactgcagttatcagtgtttcggaaagaaccttctccccaaaacgggaatatcacagcccagggcccctctattcaaccggtgcataaagctgaatcctctaccgattccagctag

SEQ ID NO: 283625 - DNA, 993 bp, Artificial Sequence
  derived and/or modified sequence
atgaaggaggactgtctgccctcctcccacgtgcccatcagtgacagcaagtctattcagaagcgcgacgtgcaggggcttagtgaagaaggtacccttattattgagggattgctgaatattgcatggggcctgagacgcccaattagactccagatgcaagatgatagggagcaagtgcatctgccatccactagctggatgcccaggcgaccgtcttgccctctcggctgttggtccctactactggggctatcgagcctctcgctgccagctgccatatccgcactccagctcagcgtgttcagaaaggaaccctccccacagaacggcaacatcaccgctcagggacccagtatccaacccgttcataaggcagaatcctccactgattctagcgggcctcttgaagaggctgaagaagcccctcagctgatgcggactaagagtgacgcgtcttgtatgtcgcaaaggagacccaaatgccgagccccaggcgaggcgcagcgtatcagacggcataggtttagtattaatggccacttctataaccacaaaactagtgtgttcacacctgcctacggcagcgtgactaacgttcgcgtgaattcgaccatgactaccttgcaggtattaactctcctcctgaacaaatttagggtggaagatggccctagcgagttcgctctctatatagttcatgagagtggtgagcggactaagctcaaggattgtgaataccccctgatcagccggatcctgcacggaccctgcgagaaaatcgcgcgaatattcctcatggaagccgatttgggcgtggaggtaccacatgaggtggcacagtacatcaaattcgaaatgccggtcctcgactcatttgttgagaagttaaaagaagaagaagagagagaaatcattaaactgacaatgaagtttcaggcactgcgattaaccatgctgcagagactcgaacagctggtggaagctaagtag

SEQ ID NO: 283626 - DNA, 456 bp, Artificial Sequence
  derived and/or modified sequence
atgaaagaggactgtctgcccagcagccatgtccctattagtgattctaagagtatacagaagagcgaactgctgggactgctgaagacatataactgttatcatgaaggtaagtcatttcagctccggcaccgggaagaggagggcaccttgatcatagaaggcttactcaatatcgcatggggattgcggcgacccatcagattgcaaatgcaagatgatcgggaacaagtacatctaccgagcacctcctggatgccgaggcgtccttcctgcccactgggttgctggtcacttctactgggcttatcctcactgtccctccccgctgctatttcagctctgcagctttctgttttcagaaaggaacccagcccgcagaatggaaacatcactgcccaagggcctagtatccagcccgttcacaaagccgagagcagcacggacagtagctag

SEQ ID NO: 283627 - DNA, 2518 bp, Artificial Sequence
  derived and/or modified sequence
ctgaagcctggggtcagcaggcgctgcgggcgcagctccggtgcaagcgaggacacgacacatgcagtggcttctggactgcgcgatgactggacgcaagtaacttctaggtctgcagacaagaggaagagaagatgaaggaagactgtctgccgagttctcacgtgcccatcagtgacagcaagtccattcagaagagggatgtgcaaggcctgagtgaagaagggactctgatcatcgaggggctcctcaacattgcctgggggctgaggcggcccatccggctgcagatgcaggatgaccgggagcaggtgcacctcccctccacctcatggatgcccagacggcctagctgccctctgggctgctggtctcttctccttggcctgagctccctttctctgccggcagccatctcagccctgcagttgtctgttttcagaaaggagccatcgccccagaacgggaacatcacagcccaggggccaagcattcagccagtgcacaaggctgagagttccacagacagctcggggcccctggaggaggcagaggaggccccccagctgatgcggaccaagagcgacgccagttgcatgagccagaggaggcccaagtgccgcgcccccggtgaggcccagcgcatccggcgacaccggttctctatcaacggccacttctacaatcataagacctccgtgtttactccagcctatggatccgtgaccaatgtgagggtcaacagcaccatgacaaccctgcaggtgctcaccctgctgctgaacaaatttagggtggaagatggccccagtgagttcgcactctacatcgttcacgagtctggggagcggacaaaattaaaagactgcgagtacccgctgatttccagaatcctgcatgggccatgtgagaagatcgccaggatcttcctgatggaagctgacttgggcgtggaagtcccccatgaagtcgctcagtacattaagtttgaaatgccggtgctggacagttttgttgaaaaattaaaagaagaggaagaaagagaaataatcaaactgaccatgaagttccaagccctgcgtctgacgatgctgcagcgcctggagcagctggtggaggccaagtaactggccaacacctgcctcttccaaagtccccagcagtggcaggtgtacactgagccctggttgctggccccggccggtcacattgactgatggccaccgcctgacgaatcgagtgcctgtgtgtctacctctctgaagcctgagcaccatgattcccacagccagctcttggctccaagatgagcacccacaggaagccgacccaggcctgaggggccaggaacttgctgggtcagatctgtgtggccagccctgtccacaccatgcctctcctgcactggagagcagtgctggcccagcccctgcggcttaggcttcatctgcttgcacattgcctgtcccagagcccctgtgggtccacaagcccctgtcctcttccttcatatgagattcttgtctgccctcatatcacgctgccccacaggaatgctgctgggaaaagcagggcctgccagcaggtatgagatctagcctgctttcagccatcaccttgccacagtgtccccggcttctaagcctccaatatcaccctgtgagcctcgcacagctcagccccaacacagaggtgagaccaggaataaggccacaagtatctcactttctctgcagaaatcaatctttacttcatcagagagacctaaagcgattcttacaaggagcttgctgcaagaaacacggtcattcaatcacattgaggagggtccacatggcattgagagggtgctgcccgctcaatgcccagcagcagctctggaaggcagtgctcagccccatcaccactgtcccgtggatgcctgtgtacctcttgccttttctgggcttgcgtttctctcctctagtgggtggggatgactttcaatgactttcaatacttcccctgaaggaagaatgataaggagaaatgtctgttttgaggaaagggctttgaattccccagatactgaacaatttgtgtttgtgactgatggagaatttcaggaatgaatgagaaagcctttgcgaaactatgcaacagtttacatcagtcatgtgaagtatttgtctaaaacagagcaaactgaagaccaaattattctcctgttgaggtccgtggatggcagatttaaagggaagaaccacaaaggcttgcaaagataggagaggctccatctctaatgcatgtagaagctccttacgggtgcccatcaagagcatagcttggaagccaccatgctgtgcggaactgcgtcagggcaaatgtcacagcaggatttccccaacccagctccatcatcacagacacagagagctgcaggggaggcctgcccactgttttgtcgactctgccctcctctggcagcatagatccttaggtgctcaataaaggtgtgctgtattgaactgaagaagtg

SEQ ID NO: 283628 - DNA, 528 bp, Artificial Sequence
  derived and/or modified sequence
catgcagtggcttctggactgcgcgatgactggacgcaagtaacttctaggtctgcagacaagaggaagagaagatgaaggaagactgtctgccgagttctcacgtgcccatcagtgacagcaagtccattcagaagtcggagctcttaggcctgctgaaaacctacaactgctaccatgagggcaagagcttccagctgagacaccgtgaggaagaagggactctgatcatcgaggggctcctcaacattgcctgggggctgaggcggcccatccggctgcagatgcaggatgaccgggagcaggtgcacctcccctccacctcatggatgcccagacggcctagctgccctctgggctgctggtctcttctccttggcctgagctccctttctctgccggcagccatctcagccctgcagttgtctgttttcagaaaggagccatcgccccagaacgggaacatcacagcccaggggccaagcattcagccagtgcacaaggctgagagttccacagacagctcgg

SEQ ID NO: 283629 - DNA, 324 bp, Artificial Sequence
  derived and/or modified sequence
atggggtcttgggtccagctcattacttcggttggcacgagcgggctgtttctgggtgtgagagtgcgagaagagggtgcaggcatgcgctgctcaaagaccatccaggccggtcagtggctagacagttcaaaggggcctctggggccttctccgccaccagtgcctaccgcaggctactcaagctccttctgcgtgcattacgtgaacctgctccctggagtcctggtgctgagcgtgacatcccaatacccgcatctttctatggctttatgccagctggctgcccacgattggccgagactcagctgtgtctgtgtgtag

SEQ ID NO: 283630 - protein, 300 aa, Artificial Sequence
  derived and/or modified sequence
MFSFTGVLVIYEVLKKCIGKLISLRVCSIEGCVCVYVFVPGGKEFHEKLNIFHQTNLICLFLNSSRNLWIFVSKFTEFDARKLHKLYKHAIKKRQESQQNSDQNSNLNPHVIRNPDVERLKENTNHDDSSRDSYSSDRHLTQYHDHHKDRHQGDSYKKSDSRKRPYSSFSNGKDHRDWDHYKQDSRYYSDREKHRKLDDHRSRDHRSNLEGSLKDRSHSDHRSHSDHRLHSDHRSSSEYTHHKSSRDYRYHSDWQMDHRASSSGPRSPLDQRSPYGSRSPFEHSVEHKSTPEHTWSSRKT

SEQ ID NO: 283631 - DNA, 97 bp, Artificial Sequence
  derived and/or modified sequence
aatggactcgaatgaaatcatcatcaaacggaatcgaatggaatcattgaatggaaaggatgggatcatcatggaatggaaacgaatggaatcactg

SEQ ID NO: 283632 - protein, 1710 aa, Artificial Sequence
  derived and/or modified sequence
MNGHSDEESVRNSSGESSQSDDDSGSASGSGSGSSSGSSSDGSSSQSGSSDSDSGSESGSQSESESDTSRENKVQAKPPKVDGAEFWKSSPSILAVQRSAILKKQQQQQQQQQHQASSNSGSEEDSSSSEDSDDSSSEVKRKKHKDEDWQMSGSGSPSQSGSDSESEEEREKSSCDETESDYEPKNKVKSRKPQNRSKSKNGKKILGQKKRQIDSSEEDDDEEDYDNDKRSSRRQATVNVSYKEDEEMKTDSDDLLEVCGEDVPQPEEEEFETIERFMDCRIGRKGATGATTTIYAVEADGDPNAGFEKNKEPGEIQYLIKWKGWSHIHNTWETEETLKQQNVRGMKKLDNYKKKDQETKRWLKNASPEDVEYYNCQQELTDDLHKQYQIVERIIAHSNQKSAAGYPDYYCKWQGLPYSECSWEDGALISKKFQACIDEYFSRNQSKTTPFKDCKVLKQRPRFVALKKQPSYIGGHEGLELRDYQLNGLNWLAHSWCKGNSCILADEMGLGKTIQTISFLNYLFHEHQLYGPFLLVVPLSTLTSWQREIQTWASQMNAVVYLGDINSRNMIRTHEWTHHQTKRLKFNILLTTYEILLKDKAFLGGLNWAFIGVDEAHRLKNDDSLLYKTLIDFKSNHRLLITGTPLQNSLKELWSLLHFIMPEKFSSWEDFEEEHGKGREYGYASLHKELEPFLLRRVKKDVEKSLPAKVEQILRMEMSALQKQYYKWILTRNYKALSKGSKGSTSGFLNIMMELKKCCNHCYLIKPPDNNEFYNKQEALQHLIRSSGKLILLDKLLIRLRERGNRVLIFSQMVRMLDILAEYLKYRQFPFQRLDGSIKGELRKQALDHFNAEGSEDFCFLLSTRAGGLGINLASADTVVIFDSDWNPQNDLQAQARAHRIGQKKQVNIYRLVTKGSVEEDILERAKKKMVLDHLVIQRMDTTGKTVLHTGSAPSSSTPFNKEELSAILKFGAEELFKEPEGEEQEPQEMDIDEILKRAETHENEPGPLTVGDELLSQFKVANFSNMDEDDIELEPERNSKNWEEIIPEDQRRRLEEEERQKELEEIYMLPRMRNCAKQISFNGSEGRRSRSRRYSGSDSDSISEGKRPKKRGRPRTIPRENIKGFSDAEIRRFIKSYKKFGGPLERLDAIARDAELVDKSETDLRRLGELVHNGCIKALKDSSSGTERTGGRLGKVKGPTFRISGVQVNAKLVISHEEELIPLHKSIPSDPEERKQYTIPCHTKAAHFDIDWGKEDDSNLLIGIYEYGYGSWEMIKMDPDLSLTHKILPDDPDKKPQAKQLQTRADYLIKLLSRDLAKKEALSGAGSSKRRKARAKKNKAMKSIKVKEEIKSDSSPLPSEKSDEDDDKLSESKSDGRERSKKSSVSDAPVHITASGEPVPISEESEELDQKTFSICKERMRPVKAALKQLDRPEKGLSEREQLEHTRQCLIKIGDHITECLKEYTNPEQIKQWRKNLWIFVSKFTEFDARKLHKLYKHAIKKRQESQQNSDQNSNLNPHVIRNPDVERLKENTNHDDSSRDSYSSDRHLTQYHDHHKDRHQGDSYKKSDSRKRPYSSFSNGKDHRDWDHYKQDSRYYSDREKHRKLDDHRSRDHRSNLEGSLKDRSHSDHRSHSDHRLHSDHRSSSEYTHHKSSRDYRYHSDWQMDHRASSSGPRSPLDQRSPYGSRSPFEHSVEHKSTPEHTWSSRKT

SEQ ID NO: 283633 - DNA, 6457 bp, Artificial Sequence
  derived and/or modified sequence
gtgaatcaaaggagagtcccagaaaacctgtgactgttgaagaaaattcatctgtgaatttttatattcaaggagtcagtatttatattcatcttttaaactgggaagatttatattttactttaaaacttcttgataataatttacaatgaatggacacagtgatgaagaaagtgttagaaacagtagtggagaatcaagccagtcggatgatgattctgggtcagcttcaggctctggatctggttcgagttctggaagcagtagtgatggaagcagtagccagtcaggtagcagtgactctgactccggatctgaatcaggcagtcagtcagagtctgagtcagacacttcccgagaaaacaaagttcaagcaaaaccaccgaaagttgatggagctgagttttggaaatctagtcctagtattctggccgttcagagatctgcaatcctcaagaagcagcaacagcagcagcagcaacaacaacatcaagcctcatctaatagcggatcagaagaggattcctctagcagtgaagattccgatgactcatcaagtgaggtcaaaaggaaaaagcataaagatgaagattggcaaatgtctgggtcaggatctccatctcagtctggttcagattcagaatctgaagaagagagagagaaaagcagttgtgatgaaacagaatctgattatgagccaaaaaacaaagtcaaaagcagaaaacctcaaaatagatctaagtcaaaaaatggaaagaagattcttggacaaaaaaagagacagattgattcatctgaggaggatgatgatgaagaagattatgataatgataaaagaagttctcgtcgccaagcaactgttaatgttagctataaggaggatgaagaaatgaaaacagattctgatgacctactggaagtctgtggagaggatgttcctcaacctgaggaagaggaatttgaaaccatagaaagatttatggattgtcggattgggagaaaaggagctactggtgctactacaaccatctatgcagttgaagcagatggtgacccaaatgcaggctttgaaaaaaacaaagaaccaggagagattcagtatttaattaaatggaaaggatggtcccatatccacaacacttgggagacagaagaaaccctcaagcagcagaatgttagaggaatgaaaaaattggataattataagaaaaaagatcaggaaacaaaaagatggttgaaaaatgcctctccagaagatgtggaatattataattgccagcaagaacttacagatgatctacataaacagtatcaaatagtggaacgtataattgctcattccaatcaaaagtcagcagctggttatcctgattattactgcaaatggcagggccttccatactcagagtgcagctgggaagatggagctctcatttccaaaaagtttcaagcatgcattgatgagtattttagcaggaaccaatcaaaaaccactccttttaaagattgcaaagtattaaaacaaaggccaaggtttgtagccctgaagaagcagccatcctatattggaggacatgagggcttagaattaagagattatcaactgaatggtttaaattggcttgctcattcttggtgcaaaggaaatagttgcatactcgctgatgaaatgggccttggaaaaacaatacagacgatctcatttctgaattatttgtttcatgaacatcaattatatggaccttttttattggtagtaccgctctccactcttacttcctggcaaagggaaattcagacttgggcttctcaaatgaatgctgtggtttatttaggtgacattaacagcagaaacatgataagaactcatgaatggacgcatcatcagaccaaacggttaaaatttaatatattgttaacaacttatgaaattttattaaaagataaggcattccttggaggtctaaattgggcatttataggtgttgatgaagcacaccgattaaagaatgatgactcccttctgtataaaactttaatagattttaaatccaatcatcgtctccttatcactggaactcctctacagaattccctcaaagagctctggtctttgctacatttcattatgccagaaaagttttcttcctgggaagattttgaagaagaacatggcaaagggagagaatatggttatgcaagccttcacaaggagcttgagccatttctgttacgccgagttaagaaagatgtggaaaaatctcttcctgccaaggttgagcagattttaagaatggaaatgagtgctttacagaaacaatattacaaatggattttaactaggaattacaaagccctcagcaaaggttccaagggcagtacctcaggctttttgaacattatgatggagctaaagaaatgttgtaaccattgctacctcattaaaccaccagataataatgaattctataataaacaggaggccttacaacacttaattcgtagtagcggaaaattgattcttcttgacaagctattaattcgcctaagagaacgaggcaatcgagttcttattttttcacaaatggtgcggatgttagatatacttgcagaatatttgaaatatcgtcaattcccctttcaaagattagatggatcaataaaaggagaactgaggaaacaagctctagatcattttaatgctgagggatcagaggatttttgctttttgctgtccacaagagctggaggtctagggattaatttagcctctgctgacactgttgttatatttgattccgattggaatccacagaatgatcttcaggcacaggctagagcccatcgaattgggcaaaagaaacaggtgaatatttatcgtctagttacaaagggatcagttgaagaagatattcttgaaagggcgaaaaagaagatggttttagatcatcttgtaattcaaagaatggacacaactgggaagacagtactacatacaggttctgccccatcaagttctactcctttcaataaagaagagttatcagccattttaaagtttggtgctgaagaactttttaaggaacctgaaggagaagaacaagagccccaggaaatggatatagatgaaatcttgaagagagctgaaactcatgaaaatgaaccaggtcctttaactgtaggagatgaattgctttcccagttcaaggttgccaacttctcaaatatggatgaggatgacattgagttggaacctgaaagaaattcaaagaattgggaggaaattattccagaagatcaaagaagacgattagaagaagaagaaagacaaaaggaacttgaagaaatttatatgctcccaagaatgagaaattgtgcaaaacagattagtttcaatggaagtgaagggaggcgcagtagaagtaggagatactctggatctgatagtgattccatctcagaagggaaaaggccaaagaaacgtggaagaccacggactattcctcgggagaatattaaaggatttagtgatgcagaaattaggcggtttatcaagagctataagaaatttggtggtcctctggaaagattagatgcaattgctcgagatgctgagttagttgataagtcagaaacagaccttagacgactgggagaattggtacataatggttgcattaaagcattaaaggatagttcttcaggaacagaacgaacaggtggtagactcggaaaagtgaagggtccaacattccgaatatcaggagtacaggtgaatgccaaactagtcatctcccatgaagaagaattaatacctttgcacaaatccattccttctgatccagaagaaagaaagcagtatactatcccatgccacacaaaggcagctcattttgatatagactggggcaaagaagatgattccaatttgttaattggcatctatgaatatggatatggaagctgggaaatgattaaaatggatcctgacctcagtctaacacacaagattcttccagatgatcccgataaaaaaccacaagcaaaacagttgcagacccgtgcagactacctcatcaaattacttagtagagatcttgcaaaaaaagaagctctttctggtgcgggaagttcaaagaggagaaaagcaagagctaagaagaataaagcaatgaagtctataaaagtgaaagaggaaataaagagtgattcttctcctctgccttcagagaagtctgatgaagatgatgataaattgagtgaatccaagtctgatggtagggaaagatccaagaaatcttcagtgtcagatgctccagttcatatcacggcaagtggtgaaccagttcccatttctgaagaatctgaagagctggatcagaagacattcagcatttgtaaagaaagaatgaggcctgttaaagcagctttgaaacaacttgataggcctgagaaaggcctttcagaaagagaacaactagagcatactagacaatgtttaataaaaattggagaccatatcacagaatgtctaaaagagtatacaaatcctgaacaaattaagcaatggagaaaaaacctgtggatttttgtatctaagtttactgaatttgatgcaagaaaattacataaattatataagcatgctattaaaaaacggcaggagtctcagcaaaacagtgatcaaaacagcaacttgaatcctcacgtgattagaaatccagatgtggaaagattaaaagagaatacaaatcacgatgatagcagcagggacagttattcctctgatagacacttaactcagtaccatgatcatcataaagaccgacatcagggagattcttacaaaaaaagtgattccaggaaaagaccctattcttcttttagtaatggtaaagaccatcgtgattgggatcactacaagcaagacagcagatattacagtgacagagagaaacacagaaaactggatgatcacaggagtagagatcacaggtcaaatttggaaggaagtttaaaagatagatctcattctgatcatcgttctcactcagatcatcggttacattcagaccaccggtcaagttctgaatatacgcaccataaatcttccagggattataggtatcactcagactggcaaatggaccacagagcttccagcagtggccctaggtcaccactagatcagagatctccttatggctccagatctccatttgaacattcagttgaacacaaaagtacaccggagcatacctggagtagtcggaaaacataacaaaaactgatacttcgtctttctggacttttcttttagccatatatcataaaccaacacagtaattgccttacatgacttgaaagatataaacagatcttctatcagtagcagtattgttacttctttccaggatgcaaggtctattatcccaacagaagagaaaatatttttatatttaaggattatgctgcactgtactacaaaattgtagtacttttttttgttttcttttttaaagaaatggaaaatgtttactattacagggacctcaacactgccctcccatacaggctggataaaactgtttttaagtcagtgattttagactgacctccatttaaattatgtttatatatgaactttactctgacctgtgatcatgtttcaggaaggaatgaaagagagttctttcttaataaagaaaaacactcaaggactttgttcatttccaaagctacttgtttacattgtacactgcgaccaccttgccgcttttcatcacaagcttgaatatttaaattctgtacttatatctgtaaaatagccaggaatttcctgtttgtgatctattatgcctttttacaaaaaaaatggctgtaaattattgtaaatattaaaggaactttccttacttccttccctttctcaggctttttttgactgttcctttccctaccaactcaggccttcttattaaaaaaaaaaaaatcagtgtaataacactttttaatgatttgtcttgatggaatcattgtttagaatgtaaaaatggggaaaggggccacttaattccattagtcctctttttatactgaatattttattagatacatgttattcccttttttttccttttttagtcaatattgtgtttgtagttttaaaaaatggcgagatatgtaaaatctaaactgcatgctctggaaacacttttttcagatgcatctggtttaaaagggtaggtgtataaacacttttcagaatccaaaacggccaaaagttattgtaaatccgtttgttttcccgttttatgtgggcaataatgtcaaatgtgctatgcagccaggttaacattttagataaacttgattgacttttaatataaactgttacaatgcacactgattgtatataaaaacgttatatatgacaaattaaatttaagaaaaagga

SEQ ID NO: 283634 - DNA, 417 bp, Artificial Sequence
  derived and/or modified sequence
atgatcttcccccagatctatctggactactttaaaatgaggcaggattattgtcagtctctgaacgtttggtcctaccttccgtggatctttttctcgttcgggctgggctttatcaacaaccttaacatcatctcctatcggatcaccaaagaagaagtcaacctcattcatctgagactgcaacccaagatacagtcaaactcatcattcagtctttcatgtttttttttcatgttccttctcctgatcgctgctcgaatccttcatcgtattagtatcgagatgtatgaaatcctgtggtctctgcacgtcaggattgctcagtatgtgaccattcagtttcaacgggagcctaccttcgtacgctttaccgatcagggagtggtggaagaagtggaactgcagatcaggtag

SEQ ID NO: 283635 - DNA, 5133 bp, Artificial Sequence
  derived and/or modified sequence
atgaatggccactctgatgaagagtctgttcgcaattccagcggcgagagttcacagagcgacgatgactcgggtagcgcaagcggtagcgggagcgggagcagctctggctcctccagcgacgggagttctagtcagagtggatcttcggactctgactccggatcagagtccggatcccaaagcgaatcggagtctgatacatctcgcgaaaataaggtgcaggcgaaacctccaaaggtcgacggggcggagttttggaaatcttccccctccatcctggctgtgcagaggtctgctatcttgaagaagcaacagcagcaacagcagcaacagcagcaccaagccagttccaatagtggcagcgaggaggatagtagttcctcagaagacagcgatgattccagctccgaggttaaaagaaagaagcacaaggacgaggactggcagatgagtggaagcggatctccatcacaatccggctctgacagtgagagcgaagaggagcgcgaaaaaagttcctgcgatgagaccgagtctgactacgaacccaaaaacaaggtgaagagtagaaagccccagaaccgttcaaagagtaagaacggcaaaaaaatcttaggccagaagaaacgccagattgactcaagcgaagaagacgatgacgaggaagactatgacaatgataagcgaagtagcagaagacaggctacggtgaacgtcagctacaaagaagacgaggagatgaaaacagatagtgacgacctcctggaggtttgcggagaagacgtgccccaaccggaggaagaagagtttgagactatcgagcgcttcatggattgtcgcatcgggcgaaagggtgccacaggagccaccaccactatttacgccgtcgaggccgacggggacccgaacgctggattcgagaagaacaaggaacccggggagattcagtacctcatcaagtggaagggatggtctcacatccacaacacttgggagactgaggagaccttgaaacagcagaatgtgcggggcatgaagaagctggacaactataagaagaaggaccaggagactaaacggtggttgaagaatgcctcccctgaagatgtggagtactacaactgccagcaggagctgacggacgatctgcacaagcagtatcagatagtggagcgtattatcgcccactcgaatcagaaatcagccgccggctacccagattactactgcaagtggcagggccttccctacagtgaatgttcttgggaggacggcgctctgatttccaagaagtttcaagcctgtatcgacgagtactttagtcgaaaccaatcgaagaccacccctttcaaagactgtaaggtgctcaaacagcggcctaggttcgtggcgttaaagaagcaacctagctatatagggggccatgaaggtctggaacttagagattaccagctgaatggcttaaattggctggcacatagctggtgtaaaggtaattcatgcatcctggcggacgagatggggcttgggaaaactattcagacaatctcatttttgaattatctgttccatgagcaccaactctacggacccttcctgctggtggtgccgctgtctaccctgacaagttggcagagagaaatccaaacatgggcttcccagatgaatgcagtcgtctacctgggagacatcaacagccgcaatatgatccgcacacatgagtggacacaccaccagactaagaggctgaagttcaacatcctcctgaccacgtacgaaatcctgcttaaagataaggcattcctcggcggcttgaactgggcatttattggtgtggatgaggcccaccggctgaaaaacgacgattcactcctttataagactctaatcgatttcaaatctaatcaccggctgttaattaccgggacgccactgcagaacagcctgaaggaactgtggtcgttactccacttcattatgcccgaaaagttctcttcttgggaggactttgaagaagagcatggcaaaggacgggagtatgggtatgcttcgctccataaagaactagagcctttcctgctccgccgggtcaaaaaagatgtggagaaaagcctacccgctaaggtggagcagattctgcgcatggagatgagtgcccttcaaaagcaatactataagtggatcctcacaagaaattataaggcactgtcaaagggatctaagggctcaacttctggattcctcaatattatgatggagctgaaaaagtgctgcaaccattgctacctcatcaagccacctgacaacaatgagttttacaacaagcaggaggcactacagcacttgattagaagttctggtaagctgattcttctggataaattgcttatccgcctccgggaaaggggaaaccgcgtgctgatcttctcccagatggttagaatgctggacatcctcgctgagtacctaaagtataggcagtttccttttcaacggttagacggttcgatcaagggagaactcaggaaacaggctcttgaccacttcaacgccgaaggcagcgaggatttttgctttttgctaagcaccagagcgggagggctgggaataaacctggccagcgccgacaccgtggtcatctttgactccgactggaatccacagaatgatctacaggcccaggcgagagctcacagaataggtcagaaaaaacaggtgaatatctataggttagtgactaagggaagtgtggaagaggacattctggagcgcgcgaagaagaagatggtgttagatcacctcgtgatccagcgcatggacacaactgggaaaacggtcctccataccgggtctgctccgtcctcgtccaccccattcaacaaagaagaactgtcagctatcttgaagttcggcgctgaggaattgtttaaggaacctgaaggcgaggaacaggagcctcaggaaatggacattgatgaaatcctgaaacgagcagagacccacgaaaacgaaccgggccccctgactgtcggcgatgaactgctgagccagtttaaagtcgcaaacttctcaaatatggacgaggatgatattgagctggaacctgaacgcaactcgaagaattgggaagaaatcataccggaagatcagcgccgtcggctggaggaggaggaacggcagaaggaactggaggaaatctatatgttgccccgcatgaggaattgcgcgaagcagatttcatttaatggctccgagggacgccgcagtcgcagtcgacgttactctggatcagatagcgattccataagtgagggcaaaaggcccaagaagcgcggccggcctaggactattccccgcgagaacatcaagggcttctccgacgccgaaatccggaggttcatcaagagctataaaaaatttggcggccctctggagagattggacgctattgccagagacgccgagctagtcgataagtcagagaccgatctacgacgtcttggtgaactggtccacaacggctgcattaaagctcttaaggactcgtcatccgggaccgagagaaccgggggccggttggggaaagtaaagggacccactttccggatttcgggggttcaggtcaacgccaagctggtgatttctcacgaggaggagcttattccactgcacaaatcaatccctagcgatccagaagagcggaagcagtatacaattccgtgtcacactaaagccgcccattttgacatcgactgggggaaggaggatgacagtaacctgctgatcggaatttacgaatacggatatggttcatgggagatgatcaagatggaccccgacctgagccttacgcataaaatcctgcctgatgatcccgacaagaagccacaggctaagcagttgcagacacgagcagactacctgattaagttgctgagcagagacctagctaaaaaggaggctctgtcgggcgcaggttcttctaaacgacggaaggcaagggctaagaagaacaaagccatgaagagcattaaggtaaaagaagaaatcaagagcgactctagcccattgccaagcgagaaaagtgacgaggatgatgataaactgtccgagtctaagagcgatggaagagagcgaagcaagaagtcatcagtttccgatgctcccgttcacattaccgcgagcggcgagccagttccaattagcgaagaatctgaagagctcgatcaaaagacgttctccatctgcaaggagcgaatgcggcctgtgaaagcagcattgaagcaactggataggccagagaagggactgagtgagcgagagcagctcgaacacacaagacagtgtcttattaagatcggtgatcacatcactgaatgtctgaaggaatacacaaacccagaacagattaagcaatggaggaagaacctatggatctttgtaagcaagtttacggagtttgatgctcggaaattgcacaagctgtataagcacgctatcaagaagcgacaggagagccagcagaacagcgatcagaacagtaatctgaatccccatgtgataagaaatccagacgtcgaacgtctgaaggagaacactaatcacgacgactcttccagagacagctactcttcagatagacatttaacacagtaccacgaccaccacaaagataggcatcagggggactcctacaagaagagcgactctagaaagcggccatattcctctttttctaacgggaaggaccaccgcgactgggaccattataagcaagactctcggtattattcagacagggagaaacataggaaactggatgaccatagaagcagggatcatcggagtaatctggagggctcacttaaggacaggagtcactctgatcaccgctcccattcagaccatcgcttgcatagtgatcatagatcctcttcagagtatactcaccacaagtcttctagagactatagataccactctgattggcagatggaccatagggcgtcatcctcaggcccacgctccccccttgaccagcgcagcccatacgggtcccgaagccctttcgagcattccgtcgagcacaagtccacacccgaacatacatggagcagccgaaagacctag

SEQ ID NO: 283636 - DNA, 903 bp, Artificial Sequence
  derived and/or modified sequence
atgtttagcttcaccggagtgctagtgatttatgaggtcttaaaaaaatgtattggcaaactcatcagcctgcgtgtatgcagcatcgaggggtgcgtttgtgtgtacgtgttcgttcccggaggtaaggaattccatgagaagctgaacatctttcatcaaactaatctaatttgtctcttcctgaattcttcgcggaatctctggattttcgtatctaagttcacggaattcgatgcacggaaactgcacaagctgtataagcatgccatcaaaaagagacaggaatctcaacagaatagcgatcagaactcaaatctgaacccacacgtgattcggaatcccgatgtcgagcgtttgaaggagaacacgaaccacgacgatagctcaagagacagctattcaagcgacagacatcttacccagtatcatgaccatcataaggacaggcaccagggagacagctacaaaaaatccgattcacgcaaaagaccatattcctccttttccaacgggaaggaccaccgggactgggaccattacaagcaggactcacgatattactcagacagggagaaacatcggaaactcgacgaccatcggtcccgggatcatcggtccaatctcgaaggatccctgaaggatcggtcccacagcgaccaccgcagtcattccgatcaccgcttacactccgatcatcgcagcagctccgagtacactcatcataagtccagcagggattatcgataccacagcgactggcagatggaccaccgcgcgtctagcagcgggcccagatcccctcttgaccaaaggtcaccctacggatccaggtcaccgtttgaacattctgtcgaacacaagtccacacccgaacacacttggagctcccggaagacctag

SEQ ID NO: 283637 - DNA, 5133 bp, Artificial Sequence
  derived and/or modified sequence
atgaatggccacagtgatgaggagagcgtgaggaacagcagcggggagagcagccagagtgatgatgacagcggcagcgccagcggcagcggcagcggcagcagcagcggcagcagcagtgatggcagcagcagccagagcggcagcagtgacagcgacagcggcagcgagagcggcagccagagcgagagcgagagtgacaccagccgggagaacaaggtgcaggccaagccacccaaggtggatggagctgagttctggaagagcagccccagcatcctggccgtgcagaggtctgccatcctgaagaagcagcagcagcagcagcagcagcagcagcaccaggccagcagcaacagcggcagcgaggaggacagcagcagcagcgaggacagtgatgacagcagcagcgaggtgaagaggaagaagcacaaggatgaggactggcagatgagcggcagcggcagccccagccagagcggcagtgacagcgagagcgaggaggagcgggagaagagcagctgtgatgaaacagaaagtgactatgagcccaagaacaaggtgaagagcaggaagccccagaacagaagcaagagcaagaatggcaagaagatcctgggccagaagaagaggcagattgacagcagcgaggaggatgatgatgaagaagattatgacaatgacaagaggagcagccggcggcaggccaccgtgaatgtgtcctacaaggaggatgaggagatgaagacagacagtgatgacctgctggaggtgtgtggagaagatgtgccccagcctgaggaggaggagtttgagaccatcgagcgcttcatggactgccgcatcggcaggaaaggagccaccggggccaccaccaccatctatgctgtggaggctgatggagaccccaatgccggctttgagaagaacaaggagcctggagagatccagtacctgatcaagtggaagggctggagccacatccacaacacctgggagacagaggagaccctgaagcagcagaatgtgcggggcatgaagaagctggacaactacaagaagaaggaccaggagaccaagcgctggctgaagaatgccagcccagaagatgtggagtactacaactgccagcaggagctgacagatgacctgcacaagcagtaccagatcgtggagcgcatcatcgcccacagcaaccagaagtctgctgctggctacccagactactactgcaagtggcagggcctgccctacagcgagtgctcctgggaggatggagccctgatcagcaagaagttccaggcctgcattgatgagtacttcagcaggaaccagagcaagaccacccccttcaaggactgcaaggtgctgaagcagaggcccaggtttgtggccctgaagaagcagcccagctacatcggcggccacgagggcctggagctgcgggactaccagctgaatggcctgaactggctggcccacagctggtgcaagggcaacagctgcatcctggctgatgagatgggcctgggcaagaccatccagaccatctccttcctgaactacctgttccacgagcaccagctgtatggccccttcctgctggtggtgcccctgagcaccctgacctcctggcagcgggagatccagacctgggccagccagatgaatgctgtggtgtacctgggggacatcaacagcaggaacatgatccgcacccatgagtggacccaccaccagaccaagaggctgaagttcaacatcctgctgaccacctatgagatcctgctgaaggacaaggccttcctgggcggcctgaactgggccttcatcggcgtggatgaggcccaccggctgaagaatgatgacagcctgctgtacaagaccctgattgacttcaagagcaaccaccggctgctgatcaccggcacccccctgcagaacagcctgaaggagctgtggagcctgctgcacttcatcatgcctgagaagttcagctcctgggaggactttgaggaggagcacggcaagggccgggagtatggctacgccagcctgcacaaggagctggagcccttcctgctgcggcgggtgaagaaggatgtggagaagagcctgcctgccaaggtggagcagatcctgaggatggagatgtctgccctgcagaagcagtactacaagtggatcctgaccaggaactacaaggccctgagcaagggcagcaagggcagcaccagcggcttcctgaacatcatgatggagctgaagaagtgctgcaaccactgctacctgatcaagcccccagacaacaatgagttctacaacaagcaggaggccctgcagcacctgatccgcagcagcggcaagctgatcctgctggacaagctgctgatccggctgcgggagcggggcaacagagtgctgatcttcagccagatggtgaggatgctggacatcctggccgagtacctgaagtaccggcagttccccttccagaggctggatggcagcatcaagggggagctgaggaagcaggccctggaccacttcaatgctgagggcagcgaggacttctgcttcctgctgagcacccgggccggcggcctgggcatcaacctggccagcgctgacacagtggtgatctttgacagcgactggaacccccagaatgacctgcaggcccaggcccgggcccacagaattggccagaagaagcaggtgaacatctaccgcctggtgaccaagggctctgtggaggaggacatcctggagcgggccaagaagaagatggtgctggaccacctggtgatccagaggatggacaccaccgggaagacagtgctgcacacaggcagcgcccccagcagcagcacccccttcaacaaggaggagctgagcgccatcctgaagtttggagctgaggagctgttcaaggagcctgagggggaggagcaggagccccaggagatggacattgatgagatcctgaagagagctgagacccatgaaaatgagcccggccccctgactgtgggagatgagctgctgagccagttcaaggtggccaacttcagcaacatggatgaagatgacatcgagctggagcctgagaggaacagcaagaactgggaggagatcatccctgaggaccagaggcggcggctggaggaggaggagcggcagaaggagctggaggagatctacatgctgcccaggatgaggaactgtgccaagcagatctccttcaatggaagtgagggccgccgcagccgcagccgccgctacagcggcagtgacagcgacagcatcagcgagggcaagaggcccaagaagaggggccggcccaggaccatcccccgggagaacatcaagggcttcagtgatgctgagatccgccgcttcatcaagagctacaagaagtttggaggccccctggagcggctggatgccatcgccagagatgctgagctggtggacaagtcagaaacagacctgcggcggctgggggagctggtgcacaacggctgcatcaaggccctgaaggacagcagcagcggcacagagaggactggaggccgcctgggcaaggtgaagggccccaccttccgcatctctggagtgcaggtgaatgccaagctggtgatcagccatgaggaggagctgatccccctgcacaagagcatccccagcgaccctgaggagaggaagcagtacaccatcccctgccacaccaaggccgcccactttgatattgactggggcaaggaggatgacagcaacctgctgattggcatctatgaatatggctacggctcctgggagatgatcaagatggaccctgacctgagcctgacccacaagatcctgcctgatgatcctgacaagaagccccaggccaagcagctgcagaccagggctgactacctgatcaagctgctgagccgggacctggccaagaaggaggccctgagcggggccggcagcagcaagaggaggaaggcccgggccaagaagaacaaggccatgaagagcatcaaggtgaaggaggagatcaagagtgacagcagccccctgcccagcgagaagagtgatgaagatgatgacaagctgtctgagagcaagagtgatggccgggagaggagcaagaagagctctgtgtctgatgcccctgtgcacatcacagccagcggggagcctgtgcccatcagcgaggagagcgaggagctggaccagaagaccttcagcatctgcaaggagaggatgaggcctgtgaaggccgccctgaagcagctggacaggcctgagaagggcctgtctgagcgggagcagctggagcacacccggcagtgcctgatcaagatcggggaccacatcacagagtgcctgaaggagtacaccaaccctgagcagatcaagcagtggaggaagaacctgtggatctttgtgtccaagttcacagaatttgatgccaggaagctgcacaagctgtacaagcacgccatcaagaagaggcaggagagccagcagaacagcgaccagaacagcaacctgaacccccacgtgatcagaaatccagatgtggagcggctgaaggagaacaccaaccatgatgacagcagccgggacagctacagcagtgacagacacctgacccagtaccatgaccaccacaaggacagacaccagggcgacagctacaagaagagtgacagcaggaagaggccctacagcagcttcagcaatggcaaggaccaccgggactgggaccactacaagcaggacagccgctactacagcgaccgggagaagcacaggaagctggatgaccacaggagccgggaccacaggagcaacctggagggcagcctgaaggacaggagccacagcgaccacaggagccacagcgaccaccggctgcacagcgaccacaggagcagcagcgagtacacccaccacaagagcagccgggactaccgctaccacagcgactggcagatggaccaccgggccagcagcagcggccccaggagccccctggaccagaggagcccctacggcagccgcagcccctttgagcacagcgtggagcacaagagcaccccagagcacacctggagcagcaggaagacctag

SEQ ID NO: 283638 - DNA, 903 bp, Artificial Sequence
  derived and/or modified sequence
atgttctccttcaccggggtgctggtgatctatgaggtgctgaagaagtgcatcggcaagctgatcagcctgcgggtgtgcagcattgagggctgtgtgtgtgtgtatgtgtttgtgcctgggggcaaggagttccacgagaagctgaacatcttccaccagaccaacctgatctgcctcttcctgaacagcagcaggaacctgtggatctttgtgtccaagttcacagaatttgatgccaggaagctgcacaagctgtacaagcacgccatcaagaagaggcaggagagccagcagaacagcgaccagaacagcaacctgaacccccacgtgatcagaaatccagatgtggagcggctgaaggagaacaccaaccatgatgacagcagccgggacagctacagcagtgacagacacctgacccagtaccatgaccaccacaaggacagacaccagggcgacagctacaagaagagtgacagcaggaagaggccctacagcagcttcagcaatggcaaggaccaccgggactgggaccactacaagcaggacagccgctactacagcgaccgggagaagcacaggaagctggatgaccacaggagccgggaccacaggagcaacctggagggcagcctgaaggacaggagccacagcgaccacaggagccacagcgaccaccggctgcacagcgaccacaggagcagcagcgagtacacccaccacaagagcagccgggactaccgctaccacagcgactggcagatggaccaccgggccagcagcagcggccccaggagccccctggaccagaggagcccctacggcagccgcagcccctttgagcacagcgtggagcacaagagcaccccagagcacacctggagcagcaggaagacctag

SEQ ID NO: 283639 - DNA, 5133 bp, Artificial Sequence
  derived and/or modified sequence
atgaacggccacagcgacgaggagagcgtgcggaacagcagcggcgagagtagtcagagcgatgacgactcaggtagcgcttcaggatctggctctggcagttcgagtggcagcagtagcgacggtagcagctcgcaatcgggttcttctgactctgatagtgggtcagagtccggctcccagtctgaaagtgaatctgatacttcccgcgaaaataaagtgcaggcaaagccaccgaaggtagatggcgcggaattttggaagtctagcccttccattctcgcggtgcagagatctgcgatcctaaagaagcagcagcagcagcagcaacagcaacagcaccaagcctcatcaaacagcgggagtgaagaggactccagctccagcgaagattctgacgactcctcctcagaagtcaagagaaagaaacataaggatgaagactggcagatgtccggcagcgggtccccctcgcagagtggctccgattcggagtcggaagaggagcgcgaaaaatcttcttgtgatgaaacggagagcgattacgagcccaaaaacaaggtcaagagccgaaagccacagaacagaagtaagtccaagaatggcaagaagattctcggccagaagaagagacaaatagattcgtcagaggaggatgacgatgaagaggactacgacaacgataagcgaagcagtaggagacaggccacagtcaacgtttcatacaaggaggacgaagaaatgaagaccgatagtgatgatttgctcgaagtgtgtggcgaggacgtccctcaacctgaggaggaagagttcgaaacaatcgaaagatttatggattgcaggataggacgtaaaggtgcgactggggctacaacaactatttatgcggtcgaggccgatggcgacccaaatgccggatttgagaaaaacaaagagcccggagaaatacaatacctgatcaaatggaaagggtggtctcatatccataatacttgggagaccgaggagacactcaagcaacaaaacgtgcgtggaatgaaaaaactcgacaactacaagaaaaaggaccaggaaacaaagcggtggctgaagaatgcttctcccgaggatgtggagtactataactgtcaacaggagctcactgacgatctgcataagcagtaccagattgtcgagagaataatcgcccactccaatcaaaaaagtgccgctggttaccccgactattattgtaaatggcagggattgccctattccgaatgcagttgggaagatggggcgcttatctctaagaagttccaggcatgcattgacgaatatttctcgcgcaaccaatctaaaacaacacccttcaaggattgtaaggtcctgaagcaacggccgagatttgtcgccctgaaaaaacagcctagctacattgggggccatgaaggactggaactcagagattatcagctgaacggcctgaactggcttgcccacagttggtgcaaaggaaactcatgcattctagccgatgaaatggggctcggtaagacaattcagaccatctcttttcttaactacctcttccatgaacaccagctctatggccccttccttctggttgttcccctatctaccctcaccagttggcagagggaaatccaaacctgggccagccagatgaatgccgtggtttatctgggcgacattaactctcgcaatatgatcaggactcacgagtggacccatcatcagacaaagcgattgaagtttaatatcttactgactacatacgagatcctgctgaaggacaaagcgttcttaggaggcttgaactgggccttcatcggagtcgacgaagctcacaggcttaagaatgacgattcgctgctatataagactttgatcgactttaaatcaaaccatcggctgctcattactggtaccccgctgcagaacagtcttaaggagctctggtcgctgctccactttataatgcccgaaaagttttcctcttgggaggattttgaagaagaacacggcaaagggcgagaatacggatacgcctcactgcacaaggagcttgaacccttccttttacgcagagtgaaaaaagacgtggagaaaagccttcctgcaaaggtggagcagattctgcgcatggagatgtcggcactgcaaaagcagtactacaagtggattctaacccggaactacaaagccctatctaaaggcagcaaaggatcaacttcagggttcttgaacattatgatggagctaaaaaagtgctgtaatcattgttatctcatcaaacctccagataataatgaattttacaataaacaggaggctttgcagcatctgattcggtccagcggtaagctcattctgctggacaagctgctgatccgactgcgggaacgcgggaatagggtcttaatattcagccagatggttcgtatgttggacatccttgccgaatacctgaaatataggcaattccccttccaacgtttagacggcagcatcaaaggagaactgcgcaaacaagccttggaccactttaacgcagaggggtctgaagatttctgtttccttttgagtacaagagctggcggcttgggcatcaacttagccagcgctgatacagtcgtgatcttcgattcagactggaatccacagaacgatctacaagctcaggctagggcacaccgcatcggtcagaaaaagcaggtgaatatttatcgactggtaacaaagggaagtgtcgaggaggatatattggagagagctaagaaaaagatggtgctggaccacctggtgatccagagaatggacaccactgggaaaactgtcctgcatacaggttcagcgcctagtagctctacaccctttaacaaagaagaactgagcgccatcctcaaattcggggccgaagaactgtttaaggagccagaaggcgaggaacaagaaccacaggagatggatattgatgagattctgaagcgggcggaaactcatgagaatgagccagggcccctgaccgtgggagacgagctgctttcacagttcaaggttgccaacttcagtaatatggatgaggacgatattgagctggaacctgagagaaattccaagaactgggaggagataatcccagaggaccaacgcaggcgtctcgaagaggaggaaagacagaaagaactggaggagatctacatgcttccgagaatgcggaattgcgcaaaacaaatttccttcaatggaagtgagggcagaagatcacggtcccgacggtattcgggttcagatagcgactcgatttcagaagggaaaaggcctaagaagcgcgggcgcccacgtacaatccccagggagaatattaaaggcttctcggatgccgagatcaggcgctttattaagtcttacaaaaagtttggagggccgctcgagagactagatgccattgcacgggacgccgaactggttgataagtcagaaacagacctgagacggctaggagagttggttcataatggctgtatcaaggctctgaaagactcttccagtggtacggaacgcacaggcggcagactgggtaaggttaaagggcctactttccgcattagcggagtccaggtgaatgccaaactcgtgatttcacacgaggaagaactgatacctttgcacaaatccatccctagcgaccccgaagagcgcaagcagtacacaatcccgtgtcacacgaaagcagcccacttcgatatagactggggaaaggaggatgatagcaatctgttgatcggcatctacgagtatggttatgggagttgggagatgataaagatggatcctgacctgtcactgacacacaaaattttgcctgacgatcctgataagaagccacaggcaaagcaattgcagacaagggccgactatttaattaagctgctgtctcgggatcttgctaagaaagaggccctgtccggcgccggcagctccaagcgcaggaaagcccgagctaaaaagaataaagctatgaagagtatcaaagtgaaggaggagataaagtctgactcttcccctctgccaagtgagaagagcgacgaagacgatgacaaactgtccgaaagcaaatctgacggaagggagcgcagcaagaagtcgtcagtgagtgatgccccagtacacatcactgctagcggcgagcctgtgccaatctccgaagagtcagaagagctcgatcagaagacgttttctatctgcaaggaaagaatgcggcccgttaaagctgccttgaaacaattagaccggccagaaaagggcctctctgaacgtgagcaactcgagcatacgcggcagtgtctcatcaaaattggcgaccacatcacagagtgcctgaaagagtacactaaccccgagcagatcaagcagtggcgcaagaacctgtggatttttgtgagcaagttcactgaattcgatgctagaaaactccataaactttacaaacatgccattaagaaacggcaagagtcccagcagaactccgaccagaactccaatctgaatccgcacgtgataaggaacccagatgtggaaaggctgaaggaaaataccaaccatgatgattctagccgcgacagctatagcagcgatcggcacctgacccagtatcacgaccaccacaaggacaggcatcagggggatagctataaaaaatccgattctcggaagcgcccctactcgtctttctccaatgggaaggaccatcgggattgggaccattataaacaggacagcagatattatagcgaccgtgaaaaacatagaaagttggacgaccatcgcagccgcgaccaccggagtaatctggaaggctcccttaaagatagatctcactctgaccatagatcacacagcgaccaccgcctacactcggatcaccgttcgtccagtgaatacactcatcacaaatcgtccagagattacagatatcatagtgactggcagatggaccaccgtgcctcatcttccggcccacgcagccccctagatcagcgctctccatatggttcccgaagtcctttcgaacactctgtggaacataagtcaacgccagaacatacttggtctagcagaaaaacttag

SEQ ID NO: 283640 - DNA, 903 bp, Artificial Sequence
  derived and/or modified sequence
atgttcagcttcaccggcgtgctggtgatctacgaggtgctgaagaagtgtattggaaagctgatttctctccgggtatgcagcatcgagggctgcgtttgcgtctacgtttttgtgcctggggggaaggaattccatgaaaagctgaacatattccaccaaactaacctcatttgtctgtttctgaactcctcacgcaatctctggattttcgtgtcaaagttcactgaattcgatgcccggaagttgcataaactctacaagcatgcaatcaaaaagcgacaggaatcacagcaaaactctgaccagaactctaatctcaatccacacgttattagaaaccccgatgtggagcgcctaaaggagaacaccaatcacgatgatagctccagggacagctacagctctgaccggcatttgacacaatatcacgatcatcacaaggaccgccaccaaggggactcctataagaaaagcgatagccgaaagagaccatattcttcgttttcaaacgggaaagaccaccgcgactgggaccactataagcaggactctcgctactatagtgatagagagaaacaccggaaactggacgaccatcgaagtagggaccaccgctcgaacctcgaggggtctctcaaggaccgctcgcactctgaccatcgatcccattccgatcaccggctgcacagtgaccatcggagtagctccgagtatacccatcataagagctcacgcgactaccgctatcactcggattggcagatggaccatagggcatcatcaagcgggccacgcagcccactggaccaacggtccccatacgggtccaggagtccattcgaacattctgtggaacacaagtccaccccagagcatacttggagctctcgaaagacctag

SEQ ID NO: 283641 - DNA, 5133 bp, Artificial Sequence
  derived and/or modified sequence
atgaacggccactctgacgaagaatccgtgagaaactccagcggtgagtcctcccagagcgacgatgatagtggcagcgccagcggaagtggtagtggatcatccagcggatcaagcagtgatggctcttcctcccagtccggatcgtcagacagtgactctggtagtgagtctggttcccagtcagagtccgagtccgatacctcccgggaaaataaagtacaggctaagcctcctaaagtggacggcgcagagttctggaagagcagcccctccatactcgcagtgcagagatccgccatcctgaaaaagcagcagcagcaacagcagcaacagcaacatcaagcgtcttctaactccgggtccgaagaggactcctcaagctcggaggactccgacgactcaagtagtgaggttaagcgcaaaaaacataaggacgaggattggcaaatgagcggcagtgggagcccatcccagtccggctccgatagtgagtccgaagaggaacgtgaaaagtcttcttgcgatgaaaccgaatcagactacgagcctaagaataaagtcaagtcgagaaagccccagaaccgcagtaagtcgaaaaatggcaaaaagattctggggcagaagaaaagacagatcgattccagtgaggaagatgatgatgaagaagactacgacaatgacaagcgcagtagcaggaggcaggccacggtgaacgtctcatataaagaggatgaggaaatgaaaacagactcagacgacctcctcgaagtgtgcggggaggacgtcccacagccagaagaagaagagttcgaaacaatcgagcgattcatggactgcaggatcggaagaaagggagccaccggcgctaccaccacaatctatgccgtagaggcagacggagaccccaatgccggattcgaaaagaacaaagaacccggagagatccagtatctgattaaatggaagggatggtcacatatccataatacttgggaaaccgaggagacgttgaaacaacagaacgtgcgaggtatgaagaaattggacaattataaaaagaaagaccaggaaaccaagcgctggctgaagaacgcaagtcctgaggacgtggaatattataattgccaacaggagctaacggacgaccttcataaacaataccagattgtagagcggattatcgcacacagcaaccagaaatcagctgctggatacccagactactattgcaagtggcaaggtttgccatacagcgagtgttcatgggaagacggggctttgatcagtaagaagtttcaagcctgcattgacgagtacttctcccggaatcagtctaagacaaccccttttaaggattgtaaagttcttaagcagcggccacgtttcgtggctctcaaaaaacaaccaagttacatcggcggacacgaaggtcttgaacttagggactatcaactgaacggcttgaattggctggctcactcttggtgcaaaggaaactcatgcattctcgctgatgagatgggacttggaaaaaccatccagacaatctcttttcttaattacctgttccacgagcaccagctgtacgggcctttcctgctagttgtccctctgagcacactgacctcctggcagcgggagattcaaacctgggcaagccaaatgaacgctgtggtctacctgggcgatattaacagtcggaacatgatccgcacccacgaatggactcaccaccagacaaagcgcctaaagtttaatatactcctaacaacttatgagattcttcttaaggataaggcgtttttggggggactcaactgggcatttattggtgtcgacgaagcgcatcgcctgaagaacgatgacagtctcttatacaaaactttgattgactttaagtcaaaccaccgcctcctgattactgggacacctctgcagaacagccttaaggaactgtggagcctattacacttcattatgcccgaaaagtttagcagctgggaagattttgaagaagaacatggaaaagggagagagtacggctatgcctcacttcacaaggagcttgagccctttctgctgcggagggttaaaaaggatgttgaaaaatctcttccggcaaaggttgaacagattctgcgcatggagatgagtgctctgcagaagcagtactataagtggatacttacccggaactacaaagccctgagtaaggggagcaagggttccacgtccggtttcctgaatatcatgatggaattgaaaaagtgctgtaatcactgctatttgattaaaccaccagacaacaatgagttctacaacaaacaggaggcactgcagcatctcatccggagtagcgggaagctgatcctgctggacaaactcctcattcgattacgggagaggggaaatcgagtcctaattttctcacagatggtccggatgctagatatactggccgaatacttgaagtaccgccagttcccctttcagcgacttgacggcagtatcaagggagaactaaggaagcaggctctagaccacttcaatgctgaggggagtgaagatttctgttttctgctgtccacgagagcgggaggtctgggtatcaatctggcaagcgcagacaccgtcgtgatattcgacagcgactggaacccgcagaatgatctccaggcccaggccagagctcaccggataggacagaagaaacaggtgaacatatacaggctggtcactaaaggtagtgtggaagaggacattttggaacgggctaagaaaaaaatggtgctggatcatctcgtgatccaaaggatggacaccaccggtaagaccgtgctgcacaccggaagcgcacccagctcatctacaccttttaacaaggaggaactgagcgcgatactcaagttcggcgcagaggagctgttcaaggagcctgagggagaggagcaggagccccaagagatggatatcgacgaaatactaaaacgagctgaaacacacgagaatgagcccggtcctctaaccgtcggcgacgaacttctttcccaattcaaggtcgcaaacttctcgaatatggacgaagacgacatcgaactggagcccgaacgaaattcgaaaaactgggaggagataattcctgaggatcagcggcgaaggctcgaggaggaggaacgccagaaggaactggaggaaatttacatgctacctcgcatgcgcaactgcgcgaaacagatttctttcaatggctcagaggggagacgatctcggtctcggagatattcggggagcgattccgatagtatctcagaggggaagaggcctaaaaagcgcggacgtccccgaacaatacccagagaaaatatcaaaggcttctcagacgcagaaatcagacggttcatcaaaagttacaaaaagttcggtggacctttggagcgcctggatgccatcgccagggatgcagaactggtcgataaatccgagacggatctgcggaggctgggggagctcgtacataacgggtgtataaaagctctgaaggactctagctctggaactgagagaaccggaggcaggcttggcaaggtgaaaggcccaacttttcggatcagcggtgtacaggtgaacgcaaaattagtgatcagtcacgaggaggagcttattccactgcacaaatcaatcccttccgatcctgaggagcgcaagcaatacaccatcccctgtcatacaaaggcagctcattttgatatagactggggcaaagaggacgatagcaacttgttgataggtatctacgagtacggatacggcagctgggaaatgatcaagatggatcctgacctttccctgacgcataaaatcctgccagatgaccctgataaaaaaccgcaggccaagcagctccagaccagagctgactacctcattaagctcctcagtcgggatttggccaagaaagaggccctttctggtgccggtagttctaaacggcgaaaggctagggctaaaaagaataaagctatgaaatccattaaggtcaaagaggagatcaagtcggatagctcaccactcccaagcgagaagtcagacgaggacgacgataagctgagtgaatctaagagcgatggaagggagaggagcaaaaagtcctccgtttcagatgcgcctgttcacatcaccgcgagcggggaacccgtgcccatcagcgaagaaagcgaggagttggatcaaaaaaccttctccatctgtaaagagagaatgcgtcccgtcaaggcagcactgaaacagcttgacaggcctgagaagggcttgtctgagagagaacagctagaacacacccggcagtgtttaatcaagatcggcgatcacatcactgagtgtctgaaggagtacacaaacccagagcaaatcaagcagtggcgtaagaacctctggatttttgtttcaaagttcacagaatttgacgccaggaagctacataagctttataagcatgccattaagaagcgccaggaatctcagcagaattccgaccagaactccaatcttaacccccatgtgattcgtaacccagatgtggaacggctgaaggagaacactaaccatgacgattcctctcgtgattcttactctagtgatagacatttgacgcagtaccacgatcatcacaaggatcgacaccagggagacagctacaaaaagtccgactcacggaagaggccatactcaagcttctcgaatgggaaggaccaccgcgactgggaccactataagcaggacagccgctactattccgacagggagaagcatcgtaaactcgatgaccatcggagccgggatcacagatccaacctggagggctctctgaaagataggtcacatagtgaccatagatctcactccgatcatagactgcattctgaccatcgatcctcatcagagtacacccatcacaaatcctcacgtgactaccgctaccattcggactggcaaatggaccatcgcgcttctagctcgggcccacgatctcccctcgatcagagaagtccttacgggagccggtccccctttgaacattccgtcgaacacaagtccacgcctgagcatacctggagctcccggaagacctat

SEQ ID NO: 283642 - DNA, 903 bp, Artificial Sequence
  derived and/or modified sequence
atgttcagctttactggggtcctggtaatctacgaggtcttaaaaaaatgcatagggaaacttatttcactgcgggtatgtagtattgaaggttgtgtatgtgtctatgtgttcgttcctggagggaaagagttccacgagaaactcaacatattccaccagactaatctgatctgtctctttcttaattcctccaggaacttatggatctttgtttctaagtttaccgagttcgacgcccgaaaactccacaaactgtacaaacacgccatcaagaagcggcaggagtcccagcagaactccgatcaaaattcaaatcttaacccacacgtgatccgcaacccagacgtggagaggctgaaggagaacaccaaccatgacgacagctcaagagactcttactcctccgaccgccacctgactcagtaccacgaccatcacaaggacagacatcaaggcgactcctacaagaagtcagattcccgaaaaagaccctacagctccttttccaacggaaaagatcacagagactgggaccattacaaacaggattcgcgttactattcagaccgggaaaaacacagaaagctggatgatcaccggtctagagaccatcggtctaatctcgaaggatctcttaaggaccggtctcactctgatcatcgttcccatagcgaccatcgtctgcactccgatcatcggtcatcttctgagtatacacatcacaaaagctctcgcgattacagataccatagcgattggcaaatggaccacagggcttctagcagcggtccgaggtcgccactagatcaaaggtccccctatgggagtagatcgcctttcgagcattccgttgagcataaaagcactcctgaacacacttggagcagcaggaaaacctag

SEQ ID NO: 283643 - DNA, 5918 bp, Artificial Sequence
  derived and/or modified sequence
aggtgaatcaaaggagagtcccagaaaacctgtgactgttgaagaaaattcatctgtgaatttttatattcaaggagtcagtatttatattcatcttttaaactgggaagatttatattttactttaaaacttcttgataataatttacaatgaatggacacagtgatgaagaaagtgttagaaacagtagtggagaatcaagccagtcggatgatgattctgggtcagcttcaggctctggatctggttcgagttctggaagcagtagtgatggaagcagtagccagtcaggtagcagtgactctgactccggatctgaatcaggcagtcagtcagagtctgagtcagacacttcccgagaaaacaaagttcaagcaaaaccaccgaaagttgatggagctgagttttggaaatctagtcctagtattctggccgttcagagatctgcaatcctcaagaagcagcaacagcagcagcagcaacaacaacatcaagcctcatctaatagcggatcagaagaggattcctctagcagtgaagattccgatgactcatcaagtgaggtcaaaaggaaaaagcataaagatgaagattggcaaatgtctgggtcaggatctccatctcagtctggttcagattcagaatctgaagaagagagagagaaaagcagttgtgatgaaacagaatctgattatgagccaaaaaacaaagtcaaaagcagaaaacctcaaaatagatctaagtcaaaaaatggaaagaagattcttggacaaaaaaagagacagattgattcatctgaggaggatgatgatgaagaagattatgataatgataaaagaagttctcgtcgccaagcaactgttaatgttagctataaggaggatgaagaaatgaaaacagattctgatgacctactggaagtctgtggagaggatgttcctcaacctgaggaagaggaatttgaaaccatagaaagatttatggattgtcggattgggagaaaaggagctactggtgctactacaaccatctatgcagttgaagcagatggtgacccaaatgcaggctttgaaaaaaacaaagaaccaggagagattcagtatttaattaaatggaaaggatggtcccatatccacaacacttgggagacagaagaaaccctcaagcagcagaatgttagaggaatgaaaaaattggataattataagaaaaaagatcaggaaacaaaaagatggttgaaaaatgcctctccagaagatgtggaatattataattgccagcaagaacttacagatgatctacataaacagtatcaaatagtggaacgtataattgctcattccaatcaaaagtcagcagctggttatcctgattattactgcaaatggcagggccttccatactcagagtgcagctgggaagatggagctctcatttccaaaaagtttcaagcatgcattgatgagtattttagcaggaaccaatcaaaaaccactccttttaaagattgcaaagtattaaaacaaaggccaaggtttgtagccctgaagaagcagccatcctatattggaggacatgagggcttagaattaagagattatcaactgaatggtttaaattggcttgctcattcttggtgcaaaggaaatagttgcatactcgctgatgaaatgggccttggaaaaacaatacagacgatctcatttctgaattatttgtttcatgaacatcaattatatggaccttttttattggtagtaccgctctccactcttacttcctggcaaagggaaattcagacttgggcttctcaaatgaatgctgtggtttatttaggtgacattaacagcagaaacatgataagaactcatgaatggacgcatcatcagaccaaacggttaaaatttaatatattgttaacaacttatgaaattttattaaaagataaggcattccttggaggtctaaattgggcatttataggtgttgatgaagcacaccgattaaagaatgatgactcccttctgtataaaactttaatagattttaaatccaatcatcgtctccttatcactggaactcctctacagaattccctcaaagagctctggtctttgctacatttcattatgccagaaaagttttcttcctgggaagattttgaagaagaacatggcaaagggagagaatatggttatgcaagccttcacaaggagcttgagccatttctgttacgccgagttaagaaagatgtggaaaaatctcttcctgccaaggttgagcagattttaagaatggaaatgagtgctttacagaaacaatattacaaatggattttaactaggaattacaaagccctcagcaaaggttccaagggcagtacctcaggctttttgaacattatgatggagctaaagaaatgttgtaaccattgctacctcattaaaccaccagataataatgaattctataataaacaggaggccttacaacacttaattcgtagtagcggaaaattgattcttcttgacaagctattaattcgcctaagagaacgaggcaatcgagttcttattttttcacaaatggtgcggatgttagatatacttgcagaatatttgaaatatcgtcaattcccctttcaaagattagatggatcaataaaaggagaactgaggaaacaagctctagatcattttaatgctgagggatcagaggatttttgctttttgctgtccacaagagctggaggtctagggattaatttagcctctgctgacactgttgttatatttgattccgattggaatccacagaatgatcttcaggcacaggctagagcccatcgaattgggcaaaagaaacaggtgaatatttatcgtctagttacaaagggatcagttgaagaagatattcttgaaagggcgaaaaagaagatggttttagatcatcttgtaattcaaagaatggacacaactgggaagacagtactacatacaggttctgccccatcaagttctactcctttcaataaagaagagttatcagccattttaaagtttggtgctgaagaactttttaaggaacctgaaggagaagaacaagagccccaggaaatggatatagatgaaatcttgaagagagctgaaactcatgaaaatgaaccaggtcctttaactgtaggagatgaattgctttcccagttcaaggttgccaacttctcaaatatggatgaggatgacattgagttggaacctgaaagaaattcaaagaattgggaggaaattattccagaagatcaaagaagacgattagaagaagaagaaagacaaaaggaacttgaagaaatttatatgctcccaagaatgagaaattgtgcaaaacagattagtttcaatggaagtgaagggaggcgcagtagaagtaggagatactctggatctgatagtgattccatctcagaagggaaaaggccaaagaaacgtggaagaccacggactattcctcgggagaatattaaaggatttagtgatgcagaaattaggcggtttatcaagagctataagaaatttggtggtcctctggaaagattagatgcaattgctcgagatgctgagttagttgataagtcagaaacagaccttagacgactgggagaattggtacataatggttgcattaaagcattaaaggatagttcttcaggaacagaacgaacaggtggtagactcggaaaagtgaagggtccaacattccgaatatcaggagtacaggtgaatgccaaactagtcatctcccatgaagaagaattaatacctttgcacaaatccattccttctgatccagaagaaagaaagcagtatactatcccatgccacacaaaggcagctcattttgatatagactggggcaaagaagatgattccaatttgttaattggcatctatgaatatggatatggaagctgggaaatgattaaaatggatcctgacctcagtctaacacacaagattcttccagatgatcccgataaaaaaccacaagcaaaacagttgcagacccgtgcagactacctcatcaaattacttagtagagatcttgcaaaaaaagaagctctttctggtgcgggaagttcaaagaggagaaaagcaagagctaagaagaataaagcaatgaagtctataaaagtgaaagaggaaataaagagtgattcttctcctctgccttcagagaagtctgatgaagatgatgataaattgagtgaatccaagtctgatggtagggaaagatccaagaaatcttcagtgtcagatgctccagttcatatcacggcaagtggtgaaccagttcccatttctgaagaatctgaagagctggatcagaagacattcagcatttgtaaagaaagaatgaggcctgttaaagcagctttgaaacaacttgataggcctgagaaaggcctttcagaaagagaacaactagagcatactagacaatgtttaataaaaattggagaccatatcacagaatgtctaaaagagtatacaaatcctgaacaaattaagcaatggagaaaaaacctgtggatttttgtatctaagtttactgaatttgatgcaagaaaattacataaattatataagcatgctattaaaaaacggcaggagtctcagcaaaacagtgatcaaaacagcaacttgaatcctcacgtgattagaaatccagatgtggaaagattaaaagagaatacaaatcacgatgatagcagcagggacagttattcctctgatagacacttaactcagtaccatgatcatcataaagaccgacatcagggagattcttacaaaaaaagtgattccaggaaaagaccctattcttcttttagtaatggtaaagaccatcgtgattgggatcactacaagcaagacagcagatattacagtgacagagagaaacacagaaaactggatgatcacaggagtagagatcacaggtcaaatttggaaggaagtttaaaagatagatctcattctgatcatcgttctcactcagatcatcggttacattcagaccaccggtcaagttctgaatatacgcaccataaatcttccagggattataggtatcactcagactggcaaatggaccacagagcttccagcagtggccctaggtcaccactagatcagagatctccttatggctccagatctccatttgaacattcagttgaacacaaaagtacaccggagcatacctggagtagtcggaaaacataacaaaaactgatacttcgtctttctggacttttcttttagccatatatcataaaccaacacagtaattgccttacatgacttgaaagatataaacagatcttctatcagtagcagtattgttacttctttccaggatgcaaggtctattatcccaacagaagagaaaatatttttatatttaaggattatgctgcactgtactacaaaattgtagtacttttttttgttttcttttttaaagaaatggaaaatgtttactattacagggacctcaacactgccctcccatacaggctggataaaactgtttttaagtcagtgattttagactgacctccatttaaattatgtttatatatgaactttactctgacctgtgatcatgtttcaggaaggaatgaaagagagttctttcttaataaagaaaaacactcaaggactttgttcatttccaaagctacttgtttacattgtacactgcgaccaccttgccgcttttcatcacaagcttgaatatttaaattctgtacttatatctgtaaaatagccaggaatttcctgtttgtgatctattatgcctttttacaaaaaaaatggctgtaaattattgtaaatattaaaggaactttccttac

SEQ ID NO: 283644 - DNA, 1985 bp, Artificial Sequence
  derived and/or modified sequence
tatttaaggtatacaatttgatgatttgatatacacatgcattgtgaaataattacagtctctgattaattactgatgcctcccttgggatgggaagagatagcaaactgtacctcatttatggtgtttggttgtgttactcttgggaccattacattaccattattaagtgacagttaactttttaatgcattatttaagacaattctttacaagcataattcatattatctgatggtatttccactccagttattaacatacctgtcccttatatgcataatcaggatcacaatatgaatctgagtcacttcctgatttaatttatgtctttggtgcatttcaaattaggattgtactgcttttcaccctaaagactataaaatgaagcgatttggaagagaagtaaaatttaatgtttagtttcactggagtcttagtcatatatgaagttttgaaaaaatgcataggaaaattaatatccttaagagtttgttccatagagggctgtgtatgtgtatatgtgtttgtgcctggagggaaggagttccatgaaaaactaaatattttccaccagactaacttaatttgcctttttttaaattcttctagaaacctgtggatttttgtatctaagtttactgaatttgatgcaagaaaattacataaattatataagcatgctattaaaaaacggcaggagtctcagcaaaacagtgatcaaaacagcaacttgaatcctcacgtgattagaaatccagatgtggaaagattaaaagagaatacaaatcacgatgatagcagcagggacagttattcctctgatagacacttaactcagtaccatgatcatcataaagaccgacatcagggagattcttacaaaaaaagtgattccaggaaaagaccctattcttcttttagtaatggtaaagaccatcgtgattgggatcactacaagcaagacagcagatattacagtgacagagagaaacacagaaaactggatgatcacaggagtagagatcacaggtcaaatttggaaggaagtttaaaagatagatctcattctgatcatcgttctcactcagatcatcggttacattcagaccaccggtcaagttctgaatatacgcaccataaatcttccagggattataggtatcactcagactggcaaatggaccacagagcttccagcagtggccctaggtcaccactagatcagagatctccttatggctccagatctccatttgaacattcagttgaacacaaaagtacaccggagcatacctggagtagtcggaaaacataacaaaaactgatacttcgtctttctggacttttcttttagccatatatcataaaccaacacagtaattgccttacatgacttgaaagatataaacagatcttctatcagtagcagtattgttacttctttccaggatgcaaggtctattatcccaacagaagagaaaatatttttatatttaaggattatgctgcactgtactacaaaattgtagtacttttttttgttttcttttttaaagaaatggaaaatgtttactattacagggacctcaacactgccctcccatacaggctggataaaactgtttttaagtcagtgattttagactgacctccatttaaattatgtttatatatgaactttactctgacctgtgatcatgtttcaggaaggaatgaaagagagttctttcttaataaagaaaaacactcaaggactttgttcatttccaaagctacttgtttacattgtacactgcgaccaccttgccgcttttcatcacaagcttgaatatttaaattctgtacttatatctgtaaaatagccaggaatttcctgtttgtgatctattatgcctttttacaaaaaaaatggctgtaaattattgtaaatattaaaggaactttccttacttcctttccctaccaactcaggccttcttatt

SEQ ID NO: 283645 - DNA, 5133 bp, Artificial Sequence
  derived and/or modified sequence
atgaacggccacagcgacgaggagagcgtgagaaacagcagcggcgagagcagccagagcgacgacgacagcggcagcgccagcggcagcggcagcggcagcagcagcggcagcagcagcgacggcagcagcagccagagcggcagcagcgacagcgacagcggcagcgagagcggcagccagagcgagagcgagagcgacaccagcagagagaacaaggtgcaggccaagccccccaaggtggacggcgccgagttctggaagagcagccccagcatcctggccgtgcagagaagcgccatcctgaagaagcagcagcagcagcagcagcagcagcagcaccaggccagcagcaacagcggcagcgaggaggacagcagcagcagcgaggacagcgacgacagcagcagcgaggtgaagagaaagaagcacaaggacgaggactggcagatgagcggcagcggcagccccagccagagcggcagcgacagcgagagcgaggaggagagagagaagagcagctgcgacgagaccgagagcgactacgagcccaagaacaaggtgaagagcagaaagccccagaacagaagcaagagcaagaacggcaagaagatcctgggccagaagaagagacagatcgacagcagcgaggaggacgacgacgaggaggactacgacaacgacaagagaagcagcagaagacaggccaccgtgaacgtgagctacaaggaggacgaggagatgaagaccgacagcgacgacctgctggaggtgtgcggcgaggacgtgccccagcccgaggaggaggagttcgagaccatcgagagattcatggactgcagaatcggcagaaagggcgccaccggcgccaccaccaccatctacgccgtggaggccgacggcgaccccaacgccggcttcgagaagaacaaggagcccggcgagatccagtacctgatcaagtggaagggctggagccacatccacaacacctgggagaccgaggagaccctgaagcagcagaacgtgagaggcatgaagaagctggacaactacaagaagaaggaccaggagaccaagagatggctgaagaacgccagccccgaggacgtggagtactacaactgccagcaggagctgaccgacgacctgcacaagcagtaccagatcgtggagagaatcatcgcccacagcaaccagaagagcgccgccggctaccccgactactactgcaagtggcagggcctgccctacagcgagtgcagctgggaggacggcgccctgatcagcaagaagttccaggcctgcatcgacgagtacttcagcagaaaccagagcaagaccacccccttcaaggactgcaaggtgctgaagcagagacccagattcgtggccctgaagaagcagcccagctacatcggcggccacgagggcctggagctgagagactaccagctgaacggcctgaactggctggcccacagctggtgcaagggcaacagctgcatcctggccgacgagatgggcctgggcaagaccatccagaccatcagcttcctgaactacctgttccacgagcaccagctgtacggccccttcctgctggtggtgcccctgagcaccctgaccagctggcagagagagatccagacctgggccagccagatgaacgccgtggtgtacctgggcgacatcaacagcagaaacatgatcagaacccacgagtggacccaccaccagaccaagagactgaagttcaacatcctgctgaccacctacgagatcctgctgaaggacaaggccttcctgggcggcctgaactgggccttcatcggcgtggacgaggcccacagactgaagaacgacgacagcctgctgtacaagaccctgatcgacttcaagagcaaccacagactgctgatcaccggcacccccctgcagaacagcctgaaggagctgtggagcctgctgcacttcatcatgcccgagaagttcagcagctgggaggacttcgaggaggagcacggcaagggcagagagtacggctacgccagcctgcacaaggagctggagcccttcctgctgagaagagtgaagaaggacgtggagaagagcctgcccgccaaggtggagcagatcctgagaatggagatgagcgccctgcagaagcagtactacaagtggatcctgaccagaaactacaaggccctgagcaagggcagcaagggcagcaccagcggcttcctgaacatcatgatggagctgaagaagtgctgcaaccactgctacctgatcaagccccccgacaacaacgagttctacaacaagcaggaggccctgcagcacctgatcagaagcagcggcaagctgatcctgctggacaagctgctgatcagactgagagagagaggcaacagagtgctgatcttcagccagatggtgagaatgctggacatcctggccgagtacctgaagtacagacagttccccttccagagactggacggcagcatcaagggcgagctgagaaagcaggccctggaccacttcaacgccgagggcagcgaggacttctgcttcctgctgagcaccagagccggcggcctgggcatcaacctggccagcgccgacaccgtggtgatcttcgacagcgactggaacccccagaacgacctgcaggcccaggccagagcccacagaatcggccagaagaagcaggtgaacatctacagactggtgaccaagggcagcgtggaggaggacatcctggagagagccaagaagaagatggtgctggaccacctggtgatccagagaatggacaccaccggcaagaccgtgctgcacaccggcagcgcccccagcagcagcacccccttcaacaaggaggagctgagcgccatcctgaagttcggcgccgaggagctgttcaaggagcccgagggcgaggagcaggagccccaggagatggacatcgacgagatcctgaagagagccgagacccacgagaacgagcccggccccctgaccgtgggcgacgagctgctgagccagttcaaggtggccaacttcagcaacatggacgaggacgacatcgagctggagcccgagagaaacagcaagaactgggaggagatcatccccgaggaccagagaagaagactggaggaggaggagagacagaaggagctggaggagatctacatgctgcccagaatgagaaactgcgccaagcagatcagcttcaacggcagcgagggcagaagaagcagaagcagaagatacagcggcagcgacagcgacagcatcagcgagggcaagagacccaagaagagaggcagacccagaaccatccccagagagaacatcaagggcttcagcgacgccgagatcagaagattcatcaagagctacaagaagttcggcggccccctggagagactggacgccatcgccagagacgccgagctggtggacaagagcgagaccgacctgagaagactgggcgagctggtgcacaacggctgcatcaaggccctgaaggacagcagcagcggcaccgagagaaccggcggcagactgggcaaggtgaagggccccaccttcagaatcagcggcgtgcaggtgaacgccaagctggtgatcagccacgaggaggagctgatccccctgcacaagagcatccccagcgaccccgaggagagaaagcagtacaccatcccctgccacaccaaggccgcccacttcgacatcgactggggcaaggaggacgacagcaacctgctgatcggcatctacgagtacggctacggcagctgggagatgatcaagatggaccccgacctgagcctgacccacaagatcctgcccgacgaccccgacaagaagccccaggccaagcagctgcagaccagagccgactacctgatcaagctgctgagcagagacctggccaagaaggaggccctgagcggcgccggcagcagcaagagaagaaaggccagagccaagaagaacaaggccatgaagagcatcaaggtgaaggaggagatcaagagcgacagcagccccctgcccagcgagaagagcgacgaggacgacgacaagctgagcgagagcaagagcgacggcagagagagaagcaagaagagcagcgtgagcgacgcccccgtgcacatcaccgccagcggcgagcccgtgcccatcagcgaggagagcgaggagctggaccagaagaccttcagcatctgcaaggagagaatgagacccgtgaaggccgccctgaagcagctggacagacccgagaagggcctgagcgagagagagcagctggagcacaccagacagtgcctgatcaagatcggcgaccacatcaccgagtgcctgaaggagtacaccaaccccgagcagatcaagcagtggagaaagaacctgtggatcttcgtgagcaagttcaccgagttcgacgccagaaagctgcacaagctgtacaagcacgccatcaagaagagacaggagagccagcagaacagcgaccagaacagcaacctgaacccccacgtgatcagaaaccccgacgtggagagactgaaggagaacaccaaccacgacgacagcagcagagacagctacagcagcgacagacacctgacccagtaccacgaccaccacaaggacagacaccagggcgacagctacaagaagagcgacagcagaaagagaccctacagcagcttcagcaacggcaaggaccacagagactgggaccactacaagcaggacagcagatactacagcgacagagagaagcacagaaagctggacgaccacagaagcagagaccacagaagcaacctggagggcagcctgaaggacagaagccacagcgaccacagaagccacagcgaccacagactgcacagcgaccacagaagcagcagcgagtacacccaccacaagagcagcagagactacagataccacagcgactggcagatggaccacagagccagcagcagcggccccagaagccccctggaccagagaagcccctacggcagcagaagccccttcgagcacagcgtggagcacaagagcacccccgagcacacctggagcagcagaaagacctag

SEQ ID NO: 283646 - DNA, 903 bp, Artificial Sequence
  derived and/or modified sequence
atgttcagcttcaccggcgtgctggtgatctacgaggtgctgaagaagtgcatcggcaagctgatcagcctgagagtgtgcagcatcgagggctgcgtgtgcgtgtacgtgttcgtgcccggcggcaaggagttccacgagaagctgaacatcttccaccagaccaacctgatctgcctgttcctgaacagcagcagaaacctgtggatcttcgtgagcaagttcaccgagttcgacgccagaaagctgcacaagctgtacaagcacgccatcaagaagagacaggagagccagcagaacagcgaccagaacagcaacctgaacccccacgtgatcagaaaccccgacgtggagagactgaaggagaacaccaaccacgacgacagcagcagagacagctacagcagcgacagacacctgacccagtaccacgaccaccacaaggacagacaccagggcgacagctacaagaagagcgacagcagaaagagaccctacagcagcttcagcaacggcaaggaccacagagactgggaccactacaagcaggacagcagatactacagcgacagagagaagcacagaaagctggacgaccacagaagcagagaccacagaagcaacctggagggcagcctgaaggacagaagccacagcgaccacagaagccacagcgaccacagactgcacagcgaccacagaagcagcagcgagtacacccaccacaagagcagcagagactacagataccacagcgactggcagatggaccacagagccagcagcagcggccccagaagccccctggaccagagaagcccctacggcagcagaagccccttcgagcacagcgtggagcacaagagcacccccgagcacacctggagcagcagaaagacctag

SEQ ID NO: 283647 - DNA, 1143 bp, Artificial Sequence
  derived and/or modified sequence
atggtatccaaatcagaccaactgctaattgttgtttccattttggaaggtcggcactttccaaagcgccctaaacacatgctggtcgtggaggccaagtttgatggtgaacagctagccacagacccagtagatcacaccgatcagccagaattcgcaacggagctcgcgtgggaaattgaccgcaaggcgctgcaccagcatagactgcaaaggactcccattaagctgcagtgcttcgcactggacccggtaacttcagctaaggaaaccattgggtacattgtgctggatcttcggactgctcaggaaacaaagcaagcacctaagtggtatcagctactgtcaaataagtacaccaagttcaagagcgagatacagatcagtattgccctcgagacggacaccaaaccacccgtcgactccttcaaagccaagggagcccccccaagagacggtaaagtccccgctatattggctggactcgatccccgtgatattgtggccgtccttaacgaggagggcggctaccatcagatcgggcccgctgaatactgcacagacagctttatcatgtccgtgacgatagctttcgcgacacaacttgagcagctgatcccgtgcaccatgaagctacccgagaggcagcccgagttcttcttctattactcgctgctcggaaacgatgtgaccaacgagccatttaatgacctcatcaaccctaacttcgagccagaacgcgcatcagtcaggatcaggagcagtgtcgaaattctgcgcgtgtacctggcattgcaatctaaactgcaaattcacctgtgctgcggcgatcagtcgctcgggtcaactgaaattcctcttactggattgttgaagaaaggatcaaccgagataaaccagcatcccgtgaccgttgagggggccttcacgctggacccacccaatagagccaaacagaaactggcaccaatcccagtggagctggcccctaccgtcggcgtctcagtggcccttcaacgcgagggcattgacagccaagacgcattctggtacagcgctctcgatattatctttcccctctttatttttctgtttttagtcttagacgcgatcaggaagttcgccaattacgaagagaagtag

SEQ ID NO: 283648 - DNA, 1143 bp, Artificial Sequence
  derived and/or modified sequence
atggtgtccaagagtgaccagctgctgattgtggtgtccatcctggagggccgccacttccccaagaggcccaagcacatgctggtggtggaggccaagtttgatggagagcagctggccacagatcctgtggaccacacagaccagcctgagtttgccacagagctggcctgggagattgacaggaaggccctgcaccagcaccggctgcagaggacccccatcaagctgcagtgctttgccctggaccctgtgaccagcgccaaggagaccatcggctacatcgtgctggacctgaggacagcccaggagaccaagcaggcccccaagtggtaccagctgctgagcaacaagtacaccaagttcaagtctgagatccagatcagcatcgccctggagacagacaccaagccccctgtggacagcttcaaggccaagggggcccccccaagagatggcaaggtgcctgccatcctggccggcctggacccccgggacatcgtggccgtgctgaatgaggagggcggctaccaccagatcggccctgctgagtactgcacagacagcttcatcatgtctgtgaccatcgcctttgccacccagctggagcagctgatcccctgcaccatgaagctgcctgagcggcagcctgagttcttcttctactacagcctgctgggcaatgatgtgaccaatgagcccttcaatgacctgatcaaccccaactttgagcctgagcgggcctctgtgcgcatccgcagctctgtggagatcctgcgggtgtacctggccctgcagagcaagctgcagatccacctgtgctgcggggaccagagcctgggcagcacagagatccccctgaccggcctgctgaagaagggcagcacagagatcaaccagcaccctgtgacagtggagggcgccttcaccctggacccccccaacagagccaagcagaagctggcccccatccctgtggagctggcccccaccgtgggcgtgtctgtggccctgcagcgggagggcatcgacagccaggatgccttctggtacagcgccctggacatcatcttccccctcttcatcttcctgttcctggtgctggatgccatcaggaagtttgccaactatgaggagaagtag

SEQ ID NO: 283649 - DNA, 1143 bp, Artificial Sequence
  derived and/or modified sequence
atggtgagcaagagcgaccagctgctgatcgtggtgagcatcctggaggggcggcactttccgaagagaccgaagcacatgctggtggtggaggccaagtttgacggggaacagttagcgactgaccccgtggatcataccgaccaacctgaatttgcgaccgaattagcttgggagattgatagaaaagcactgcaccaacacagactgcagcgcacgccaattaagttgcagtgctttgcactggaccccgtcacatcggctaaggaaactatagggtatatagtgttagacctaaggactgcgcaggaaaccaaacaagcacctaagtggtatcagctgctgagcaacaagtatactaaattcaaatctgagattcaaattagcatcgccctagagaccgacaccaagcctcccgtggacagtttcaaggccaagggggctcctcctcgggacgggaaagttcctgctatacttgctggcttggatcctcgcgatatagttgctgttttgaacgaggaaggggggtatcatcaaatcgggcctgcagaatattgcaccgacagctttattatgtcagtgaccatcgcgttcgctactcaactggaacagctgatcccctgcacaatgaagttgcctgagaggcagccggagttcttcttttactacagtcttctcggcaatgacgttacaaacgaaccttttaacgacttgatcaatcccaactttgaaccggagcgtgcttccgtgcggatccgttcctcagtggagatactacgggtctatctggccctgcaatccaagctgcagatccatctctgctgcggcgaccaatctctggggtccaccgaaatccccctgacagggctgctcaagaagggaagtaccgagataaaccagcaccctgttacggtggagggcgcatttaccctggatcccccaaatcgagctaaacaaaaattagctccaattcctgtagaattggctccgactgtgggggtgtcggtggcactacagcgggaggggatagattctcaggacgccttctggtattccgcgctggatatcatcttcccactttttatctttctttttttggtactggacgcaattcgaaaattcgcgaattacgaggagaaatag

SEQ ID NO: 283650 - DNA, 1143 bp, Artificial Sequence
  derived and/or modified sequence
atggtgagtaaatcagatcaattgctcatcgtcgtgagcatcttagagggcagacatttcccaaagcgcccaaaacatatgctggtcgtggaagctaaattcgatggcgagcagctggccactgacccggttgatcatacagaccaaccggagtttgccacagaactcgcttgggagatcgatagaaaggccttacatcagcaccggctccagcgtaccccaattaaactacagtgctttgccctagatccagtgacctcagccaaagaaactatagggtacatcgtgctagacctgaggactgctcaggagactaaacaggcgccaaagtggtatcagttgttaagcaacaaatacactaagttcaagtccgaaatccagatttcgatagcgctggaaaccgacaccaaaccacctgtggattcttttaaggcaaagggcgctcctccaagggacggaaaggtgcctgccatactggccggactagacccccgtgatatcgttgcggtcctcaacgaagagggcggttaccaccagattggccctgccgagtactgcacagactcatttatcatgagtgttacaatcgcctttgctacccaactcgagcaactgatcccatgcacaatgaagctgccagagcgtcaacccgaattctttttttattattcactgctaggaaacgatgttaccaatgagcctttcaatgatctcatcaatcctaattttgagcccgaaagggccagcgtaagaatccggtcatctgtagagattctccgggtgtacctggcccttcagagcaagctgcaaattcacctgtgttgcggcgaccagtccctgggtagcactgagatcccgctcaccggactgttgaaaaaagggtctaccgagatcaatcagcaccccgtgaccgtggagggcgctttcacactggatcctcccaacagagcaaagcagaagctcgctccaatcccggtggaactggctcctactgtgggcgtgagcgttgcgttgcagagggaagggatcgactcccaagacgccttctggtattcagctttggacataatatttcctttatttatatttttattcctggtactggacgccattaggaagtttgccaactatgaagagaaatag

SEQ ID NO: 283651 - DNA, 1259 bp, Artificial Sequence
  derived and/or modified sequence
tttacagcagtagtgcgcttgcgcagctggtcccacaccaagtcgcccgcctctcctcgtccggctagcagagggcgctgtgagccgccttcgcccccggaccgctcaccgcaaccatggtctccaaatccgaccaattgctcatcgtcgtgtccatcctagaaggtcggcatttccccaaacgtccaaagcatatgcttgtagtggaagcaaagtttgatggagaacagttggctactgatcctgtggaccacactgaccagccagaatttgctactgagttagcttgggaaattgacaggaaagcgcttcatcagcacaggctacagcgtactcctatcaaactccaatgttttgccttggatcctgtaacttcagccaaggaaaccataggttacatcgttctggatttaagaaccgctcaagaaacaaagcaggcaccaaaatggtaccagttgctgagtaataaatacaccaaattcaagtctgagatacagataagtattgctttggaaaccgatacaaagccaccagtggatagctttaaagcaaagggggctccccctcgagatggaaaagtacctgccatcctggctggacttgaccccagggacattgtggctgtgctgaatgaagagggaggctaccatcagattggaccagcagaatactgtactgactcctttattatgtcagtgaccatagcatttgctacccagttggaacagttaattccatgtaccatgaaacttccagaaagacagcctgagtttttcttttactactctttactgggaaatgatgttacaaatgaacccttcaatgatttaatcaacccaaactttgagccagagagagcatcagttcgcatccgtagcagtgtagaaattcttcgtgtttacctggctcttcagtctaaactgcagattcacctctgctgtggagaccagtcacttggaagtacagaaatacctttaactggattacttaaaaagggcagtacagaaatcaaccagcacccagtcacagtcgaaggtgcttttacccttgaccctccaaacagagccaaacagaagcttgcacctattcctgtggagctagccccaactgtgggagtgtctgtggctctgcagagagaaggcatagactcccaggatgcattttggtattcagctctggatatcatatttcctctgttcatcttcctttttctggtcctagatgctataaggaaatttgcaaattacgaagaaaaatag

SEQ ID NO: 283652 - DNA, 1143 bp, Artificial Sequence
  derived and/or modified sequence
atggtgagcaagagcgaccagctgctgatcgtggtgagcatcctggagggcagacacttccccaagagacccaagcacatgctggtggtggaggccaagttcgacggcgagcagctggccaccgaccccgtggaccacaccgaccagcccgagttcgccaccgagctggcctgggagatcgacagaaaggccctgcaccagcacagactgcagagaacccccatcaagctgcagtgcttcgccctggaccccgtgaccagcgccaaggagaccatcggctacatcgtgctggacctgagaaccgcccaggagaccaagcaggcccccaagtggtaccagctgctgagcaacaagtacaccaagttcaagagcgagatccagatcagcatcgccctggagaccgacaccaagccccccgtggacagcttcaaggccaagggcgccccccccagagacggcaaggtgcccgccatcctggccggcctggaccccagagacatcgtggccgtgctgaacgaggagggcggctaccaccagatcggccccgccgagtactgcaccgacagcttcatcatgagcgtgaccatcgccttcgccacccagctggagcagctgatcccctgcaccatgaagctgcccgagagacagcccgagttcttcttctactacagcctgctgggcaacgacgtgaccaacgagcccttcaacgacctgatcaaccccaacttcgagcccgagagagccagcgtgagaatcagaagcagcgtggagatcctgagagtgtacctggccctgcagagcaagctgcagatccacctgtgctgcggcgaccagagcctgggcagcaccgagatccccctgaccggcctgctgaagaagggcagcaccgagatcaaccagcaccccgtgaccgtggagggcgccttcaccctggacccccccaacagagccaagcagaagctggcccccatccccgtggagctggcccccaccgtgggcgtgagcgtggccctgcagagagagggcatcgacagccaggacgccttctggtacagcgccctggacatcatcttccccctgttcatcttcctgttcctggtgctggacgccatcagaaagttcgccaactacgaggagaagtag

SEQ ID NO: 283653 - protein, 589 aa, Artificial Sequence
  derived and/or modified sequence
MNLHQVLTGAVNPGDHCFSVGSIGDQRFTAYASGCDIVILGSDFERLQIIPGAKHGNIQVGCVDCSMQQGKIAASYGNVISIFEPVNLPKQKKNLELYSQWQKSGQFFLESIAHNITWDPTGSRLLTGSSYLQLWSNTNLEKPTEDENLNKTDLNFGDWKCIWHCKTASQVHLMKFSPDGEFFATAGKDDCLLKVWYNVENWRTAVTSPDGSSEKQSQGEIDFSFVYLAHPRAVNGFSWRKTSKYMPRASVCNVLLTCCKDNVCRLWVETFLPNDCLLYGGDCSHWTESINLTNNFKRNASSKERVQNALEVNLRHFRRGRRRSLALVAHTGYLPHQQDPHHVHRNTPLHANALCHFHIAASINPATDIPLLPSITSLSLNENEEKTGPFVVHWLNNKELHFTLSMEVFLQQLRKSFEQPSSEASVEDSNQADVKSDEETDDGVDDLKINPEKKELGCDKMVPNSSFTSLSSAAIDHQIEVLLSEWSKNADMLFSIHPMDGSLLVWHVDWLDEYQPGMFRQVQVSFVSRIPVAFPTGDANSLCKSIMMYACTKNVDLAIQQGKQKPSGLTRSTSMLISSGHNKSSNSLK

SEQ ID NO: 283654 - DNA, 1770 bp, Artificial Sequence
  derived and/or modified sequence
atgaatctgcaccaggttctgacgggagccgtaaaccctggagaccactgctttagcgtgggcagcattggcgaccagagatttactgcatatgcatctggctgcgatattgttatactcggaagcgactttgagcgcctacaaattatccccggggctaaacacggtaatattcaggtgggttgcgttgactgtagcatgcagcagggcaagatcgcggcttcctacggtaacgtaatcagtatctttgaacctgtgaaccttcccaagcagaagaagaacctggaactatacagtcagtggcagaagtcaggacaattcttcctagagagcatcgctcacaatattacatgggaccccacaggcagccggttattaaccggttcttcctatctccagttgtggagtaatacaaatctggagaaacctaccgaagatgagaatctgaacaaaacagacttgaattttggggactggaagtgcatttggcattgcaagacagcatcccaagtccatctgatgaagttcagcccggacggggagttctttgcaacagccggtaaggatgattgtcttctcaaggtatggtataacgtcgagaactggcgcactgccgtgacaagccctgacggatcttctgaaaagcagtctcagggcgaaatagacttctcatttgtttatttggcgcacccccgggcggttaatggcttctcctggcgaaaaacctccaaatatatgccccgggccagcgtgtgcaacgtacttctgacgtgctgtaaagataatgtgtgcaggctttgggtcgagacctttttaccaaacgattgtcttctctatgggggcgactgctcgcattggactgaatcaattaatctgaccaataactttaagcgaaacgcatcctcgaaggaacgagtgcagaatgcactggaggttaacctgcgccactttcggcgcgggcgacgccggtccctggcactggtagcccacacaggatacctgccacaccagcaggacccacaccacgttcaccgaaatacacccctacatgccaatgccctctgccactttcacattgccgccagcatcaatccagccactgacatccccctcctgccaagcattacttctttgtccttgaatgagaatgaggagaagaccggtccattcgtcgtccattggttaaataataaagagctgcactttacactgtccatggaagtgtttctgcagcagctaagaaagtcctttgagcaacccagcagtgaagcctcagtcgaggactctaatcaggcggatgtgaagagtgacgaagagaccgacgatggagtggacgatctgaagattaaccccgagaagaaagagttgggatgtgataagatggtcccgaactcctccttcacatctctaagcagcgccgccattgatcatcagattgaggttcttttgtctgagtggtccaagaatgcggacatgctgttttccatccaccctatggacggatccctgctcgtttggcatgtggactggctcgatgagtatcaacccggcatgttccggcaggtgcaggtgagctttgtctccaggattccggttgctttcccaactggcgatgctaattctctctgcaagtctatcatgatgtacgcttgcacaaagaacgttgatttagcgattcagcaggggaagcagaagccgtcaggtcttacccgatccacctcaatgttgatctctagtggccataataagtccagtaattccctcaaatag

SEQ ID NO: 283655 - DNA, 1770 bp, Artificial Sequence
  derived and/or modified sequence
atgaacctgcaccaggtgctgaccggggctgtgaaccctggggaccactgcttctctgtgggcagcattggagaccagcgcttcaccgcctatgccagcggctgtgacatcgtcatcctgggcagtgactttgagcggctgcagatcatccctggggccaagcacggcaacatccaggtgggctgtgtggactgcagcatgcagcagggcaagattgctgccagctatggaaatgtcatcagcatctttgagcctgtgaacctgcccaagcagaagaagaacctggagctgtacagccagtggcagaagagcggccagttcttcctggagagcatcgcccacaacatcacctgggaccccaccggcagccggctgctgaccggcagcagctacctgcagctgtggagcaacaccaacctggagaagcccacagaagatgagaacctgaacaagacagacctgaactttggagactggaagtgcatctggcactgcaagacagccagccaggtgcacctgatgaagttctccccagatggagagttctttgccacagctgggaaggatgactgcctgctgaaggtgtggtacaacgtggagaactggaggacagctgtgaccagcccagatggcagcagcgagaagcagagccagggcgagattgacttctcctttgtgtacctggcccaccccagggctgtgaatggcttctcctggaggaagaccagcaagtacatgccccgggcctctgtgtgcaatgtgctgctgacctgctgcaaggacaacgtgtgccgcctgtgggtggagaccttcctgcccaatgactgcctgctgtatggaggagactgcagccactggacagagagcatcaacctgaccaacaacttcaagagaaatgccagcagcaaggagcgggtgcagaatgccctggaggtgaacctgcggcacttccggcggggcagaagaagaagcctggccctggtggcccacacaggctacctgccccaccagcaggacccccaccacgtgcacaggaacacccccctgcacgccaatgccctgtgccacttccacatcgccgccagcatcaacccagccacagacatccccctgctgcccagcatcaccagcctgagcctgaatgaaaatgaggagaagacaggcccctttgtggtgcactggctgaacaacaaggagctgcacttcaccctgtccatggaggtgttcctgcagcagctgaggaagagctttgagcagcccagcagcgaggcctctgtggaggacagcaaccaggctgatgtgaagagtgatgaggagacagatgatggagtggatgacctgaagatcaaccctgagaagaaggagctgggctgtgacaagatggtgcccaacagcagcttcaccagcctgagcagcgctgccatcgaccaccagatcgaggtgctgctgtctgagtggagcaagaatgctgacatgctgttcagcatccaccccatggatggcagcctgctggtgtggcacgtggactggctggatgagtaccagcccggcatgttccggcaggtgcaggtgtcctttgtgagccgcatccctgtggccttccccactggagatgccaacagcctgtgcaagagcatcatgatgtatgcctgcaccaagaatgtggacctggccatccagcagggcaagcagaagcccagcggcctgaccaggagcacctccatgctgatcagcagcggccacaacaagagcagcaacagcctgaagtag

SEQ ID NO: 283656 - DNA, 1770 bp, Artificial Sequence
  derived and/or modified sequence
atgaacctgcaccaggtgctgaccggcgccgtgaaccccggcgaccactgcttcagcgtggggtcaatcggggatcagcggtttaccgcatatgcttcaggttgtgacattgtgatcctgggttcagattttgagagactgcagataataccaggagctaaacatggaaacattcaagtcggctgcgttgattgcagtatgcagcaggggaagatcgctgccagctacggcaacgtgatttctatttttgagcctgtgaacctaccgaaacagaagaagaatctcgaactgtactcgcaatggcagaaatctggccaattttttcttgaaagcatcgcccataatataacctgggatcccacaggctcccgtcttctgactggatcatcctacctgcagctgtggtccaatacaaatctcgaaaagccaaccgaagacgagaacttaaataagaccgacctgaactttggagattggaagtgtatctggcattgcaagacggcttcacaggtccaccttatgaagtttagcccggatggagaattcttcgctacggcaggcaaggacgactgtcttcttaaggtgtggtacaacgtagaaaactggcgcacagccgtgactagcccggacggatcatccgaaaaacagagtcagggggaaatcgacttctcttttgtgtacctcgcacacccccgcgctgttaacggtttttcttggcggaagacctccaagtatatgccaagagcgtccgtgtgcaatgtgctgctaacctgctgtaaggataatgtctgtcgactgtgggtggaaacttttctcccaaacgactgtttgctgtatgggggggactgcagtcactggacagagtcaatcaatctgacaaataatttcaagagaaatgcttcctccaaggaacgagttcagaacgctttggaggtgaacctgagacatttcaggagggggagacgaagatcactggccttggttgcacacacaggttatctcccacatcaacaggaccctcaccacgtgcaccgaaatacccctcttcacgcgaatgcgttgtgtcactttcatatcgcagcgagcattaatcctgcaactgacatcccgcttcttccatctatcacctccctttccctgaacgagaacgaagaaaagacaggtccatttgtggtccattggttaaataataaagagctgcatttcacactctccatggaggtcttcctgcaacaactacggaagtctttcgagcagccctccagtgaagcctctgtagaggatagtaatcaggcagacgtcaagtccgacgaagaaaccgatgacggcgtggatgaccttaaaattaaccccgaaaaaaaggagttgggctgtgataaaatggtcccgaattcttcattcacctcattaagctctgcggccatcgatcaccagatcgaagtgctgctgtctgaatggtccaaaaatgccgatatgctgttctcgattcatcccatggacggtagcctgctcgtttggcacgtcgattggttagacgagtatcagccaggcatgttcaggcaagtgcaagtctcatttgttagtcgcatacccgtcgctttcccgacaggcgatgcaaatagtctctgcaaatccatcatgatgtacgcctgtacgaagaacgtggatcttgctatccagcagggtaagcagaagcccagtggcctcacacggagcacctcgatgctgatttcatccggccacaataaaagttcaaatagccttaagtag

SEQ ID NO: 283657 - DNA, 1770 bp, Artificial Sequence
  derived and/or modified sequence
atgaatctgcaccaggtgctcactggggcagtaaaccctggcgatcattgcttctcagtgggctcaattggtgatcaaagattcacagcatatgcctctgggtgcgatatcgtcatccttggaagcgatttcgagcgcctccaaatcatccccggagctaagcatggtaatatccaagtgggctgtgttgattgttcaatgcagcagggaaagatcgcagccagctatgggaacgtgataagcatttttgagccagtgaacctgccaaaacagaagaaaaatctcgagctgtacagtcagtggcaaaagtccggacaattttttcttgagtccatcgcacacaatatcacctgggacccaacaggaagcaggctcttgaccggctcctcctaccttcaattatggtctaatactaatttggagaagcccacagaagatgaaaatctaaacaagaccgatctaaacttcggagactggaagtgtatctggcactgtaaaactgccagtcaagtccatctcatgaaattttcccccgacggggagtttttcgctaccgcgggaaaggatgattgtctcctgaaggtctggtataacgttgaaaactggaggacggcagtgacctctccagatggttcctcagaaaaacagtcacagggggagattgactttagcttcgtgtatctcgcccatcctcgggctgtgaatggcttcagctggaggaagacatctaaatacatgccccgtgccagcgtctgtaatgtgctcctgacatgctgcaaggataacgtgtgccgactgtgggtggaaacattcctgcctaacgactgtttgctgtacggaggggactgctctcactggactgaatcaatcaatctcactaacaatttcaaacgaaatgccagttcaaaagagcgggtgcagaatgcgctcgaagtgaatctccggcatttccggcgagggaggcgcaggagccttgccctggtcgctcacactggatatttgccacatcaacaggatccacatcatgtgcaccggaatactcctttacacgcaaacgccttgtgtcattttcacattgcagcaagtattaaccccgcaacagacattccgctgctgcccagcatcactagtctgagcttgaacgagaacgaagagaagactggaccattcgtggttcactggcttaacaacaaggaactccactttacgctctcaatggaagtgttcctccaacagctgaggaagtccttcgagcagccctcaagcgaggctagcgtcgaggacagcaatcaggccgatgtgaagagtgatgaggagactgatgacggcgtcgacgacctaaaaattaaccccgaaaaaaaggaactgggttgcgataagatggtgcctaacagctccttcaccagcctgtcttctgcggcaattgatcaccagatcgaagtcttactgtctgagtggtctaagaatgcagacatgttgttcagcattcacccaatggacgggtcactgttggtttggcatgttgactggctggacgagtatcaaccaggtatgttccggcaggtgcaggtgagtttcgtcagccggatccctgtcgccttcccaaccggcgatgccaatagtctgtgcaagagcattatgatgtatgcttgtaccaaaaacgtggaccttgccatccaacaggggaaacagaaaccttcgggattgacacgctcaaccagcatgctaataagctccggtcacaataagtcatctaactccctgaagtag

SEQ ID NO: 283658 - DNA, 1770 bp, Artificial Sequence
  derived and/or modified sequence
atgaacctgcaccaggtgctgaccggcgccgtgaaccccggcgaccactgcttcagcgtgggcagcatcggcgaccagagattcaccgcctacgccagcggctgcgacatcgtgatcctgggcagcgacttcgagagactgcagatcatccccggcgccaagcacggcaacatccaggtgggctgcgtggactgcagcatgcagcagggcaagatcgccgccagctacggcaacgtgatcagcatcttcgagcccgtgaacctgcccaagcagaagaagaacctggagctgtacagccagtggcagaagagcggccagttcttcctggagagcatcgcccacaacatcacctgggaccccaccggcagcagactgctgaccggcagcagctacctgcagctgtggagcaacaccaacctggagaagcccaccgaggacgagaacctgaacaagaccgacctgaacttcggcgactggaagtgcatctggcactgcaagaccgccagccaggtgcacctgatgaagttcagccccgacggcgagttcttcgccaccgccggcaaggacgactgcctgctgaaggtgtggtacaacgtggagaactggagaaccgccgtgaccagccccgacggcagcagcgagaagcagagccagggcgagatcgacttcagcttcgtgtacctggcccaccccagagccgtgaacggcttcagctggagaaagaccagcaagtacatgcccagagccagcgtgtgcaacgtgctgctgacctgctgcaaggacaacgtgtgcagactgtgggtggagaccttcctgcccaacgactgcctgctgtacggcggcgactgcagccactggaccgagagcatcaacctgaccaacaacttcaagagaaacgccagcagcaaggagagagtgcagaacgccctggaggtgaacctgagacacttcagaagaggcagaagaagaagcctggccctggtggcccacaccggctacctgccccaccagcaggacccccaccacgtgcacagaaacacccccctgcacgccaacgccctgtgccacttccacatcgccgccagcatcaaccccgccaccgacatccccctgctgcccagcatcaccagcctgagcctgaacgagaacgaggagaagaccggccccttcgtggtgcactggctgaacaacaaggagctgcacttcaccctgagcatggaggtgttcctgcagcagctgagaaagagcttcgagcagcccagcagcgaggccagcgtggaggacagcaaccaggccgacgtgaagagcgacgaggagaccgacgacggcgtggacgacctgaagatcaaccccgagaagaaggagctgggctgcgacaagatggtgcccaacagcagcttcaccagcctgagcagcgccgccatcgaccaccagatcgaggtgctgctgagcgagtggagcaagaacgccgacatgctgttcagcatccaccccatggacggcagcctgctggtgtggcacgtggactggctggacgagtaccagcccggcatgttcagacaggtgcaggtgagcttcgtgagcagaatccccgtggccttccccaccggcgacgccaacagcctgtgcaagagcatcatgatgtacgcctgcaccaagaacgtggacctggccatccagcagggcaagcagaagcccagcggcctgaccagaagcaccagcatgctgatcagcagcggccacaacaagagcagcaacagcctgaagtag

SEQ ID NO: 283659 - DNA, 1835 bp, Artificial Sequence
  derived and/or modified sequence
gcggctgcccgaggtccagaggaagtgtgtggacagcgcggccttcctggccggactagggcgccgacatgaacctgcaccaggtgctgaccggggctgtgaaccctggcgaccactgcttctccgtgggcagcattggcgaccagcgcttcacggcttatgcatctggatgtgacattgtaatactgggaagcgattttgaaagattacagataatcccaggagctaaacatggaaatattcaagtgggatgtgtagactgttcaatgcaacaaggcaagattgcagcgtcttatggaaatgttatctccatttttgaaccagttaacctaccaaaacaaaagaaaaatttggaattatatagtcagtggcagaaaagtggccaattttttctggaatcaatagcacacaatataacctgggatcccacaggcagtcgtcttttaactggttccagctatttgcaactctggtccaatactaacttggagaagccaactgaagatgaaaatttaaataaaacagatcttaactttggagattggaaatgcatttggcattgcaaaactgcttcccaagttcatttaatgaaattttcaccagatggagaattttttgccactgctgggaaggatgactgtcttttgaaggtttggtataatgtagaaaactggcggacagctgttacttctccagatggaagttcagaaaaacaatcccaaggagaaattgacttttcttttgtgtatctggcccatcctcgagcagtaaatggattttcctggcgtaaaacaagcaaatatatgcctagggcttctgtatgtaatgtactgttgacttgctgcaaagataatgtgtgtcgtctttgggtagagacatttttaccaaatgattgtttgctatacggaggtgactgcagccattggactgaatcaattaatttaacaaataacttcaagagaaatgcttccagtaaagaacgagttcaaaatgctttagaagtaaatctgagacattttcgtagaggtcggaggagatcacttgctcttgtagcacatacgggatatctaccacatcagcaggatcctcatcatgttcacaggaacactccactgcatgccaatgcactttgccactttcatattgcagccagcatcaacccagccacagacattccacttcttccatctattacatctctgagtctaaatgaaaatgaagagaagaccggaccttttgttgtacactggctaaacaataaagaactgcattttactttgtccatggaagtttttttacagcaacttagaaaaagttttgaacaaccatcttctgaggccagtgtagaagattctaatcaggcagatgtaaaatctgatgaagaaactgatgatggtgttgatgatctgaaaataaatcccgaaaagaaggaattaggctgtgataaaatggtaccaaactcaagttttacatcattatcgtcagctgccattgatcatcagattgaagtacttctgtctgaatggagtaaaaatgcagatatgctatttagtattcatcccatggatggttctttgctagtttggcatgtggattggctggatgaataccagcctggtatgtttcgtcaagtacaggtgtcctttgtttccagaattccagtagctttccccacaggtgatgcaaactctctctgtaaaagcataatgatgtatgcctgtaccaagaatgttgacttggctattcagcaggggaaacaaaaaccttctggcctcacccgttccacatcaatgcttatttcttctggtcacaataaatcatctaatagtttaaaa

SEQ ID NO: 283660 - DNA, 1314 bp, Artificial Sequence
  derived and/or modified sequence
atgggtcttcgagccgctccttccagcgctgctgccgcagccgccgaggttgagcagcgaaggtccccaggcttatgtccacccccccttgagctgctgcttttgctcttgttcagcctgggccttttacacgcaggcgactgccagcaacctgcccagtgtaggattcaaaagtgcacaacagactttgtgtctctgacatctcatttgaatagtgcagtagacggctttgactctgaattttgcaaggcactgagagcctatgcaggttgtacccagcggacaagcaaggcctgcagaggaaacctggtttatcacagcgcagtcctgggcatttcagaccttatgagtcagaggaactgctcaaaagacggtcctaccagctctaccaaccccgaagtcacacatgatccatgtaattaccactcacacgcaggagcaagggagcaccggagaggggaccagaacccgccctcttacctgttctgcggcctgttcggagacccacacctcaggacgttcaaggataattttcagacttgcaaagtggaaggggcttggccgctgattgataacaattatctgtctgtgcaagttacaaatgtgcctgtcgtacccggatcgagtgccactgcaacaaacaagattacaataattttcaaggctcaccacgaatgcactgatcaaaaagtgtatcaggctgtgaccgacgatctgccggctgcttttgtcgatgggaccacctccgggggagacagtgacgccaagtccctccggatcgtcgaacgtgaaagcggacattacgtcgaaatgcacgccaggtacattggcactaccgtctttgtaagacaggtcggcaggtatttaacgctggccatccgaatgccagaagacctggctatgagttacgaggagtcacaggatttacaattatgcgtgaacggatgccctctttcggagaggattgatgacggccaaggacaggtaagcgccattctcggacattcgttgcctaggacatccctcgtccaggcttggcccgggtatactcttgagacagcgaatactcaatgccacgaaaaaatgccagtgaaggacatatactttcagtcttgcgtgtttgatctcttgaccacaggcgatgctaattttacggcagcagcccactccgcactggaggatgtcgaagcattgcaccctcgcaaggagaggtggcacatattcccttcgtctgggaacggcacaccacggggcggctccgaccttagtgtgtccttagggttaacctgtctgattctgatcgttttcttgtag

SEQ ID NO: 283661 - DNA, 1314 bp, Artificial Sequence
  derived and/or modified sequence
atgggcctgcgggccgcccccagcagcgctgctgctgctgctgctgaggtggagcagaggaggagccctggcctgtgccccccacccctggagctgctgctgctgctgctcttcagcctgggcctgctgcatgctggggactgccagcagcctgcccagtgccgcatccagaagtgcaccacagactttgtgtccctgaccagccacctgaacagcgctgtggatggctttgattctgagttctgcaaggccctgcgggcctatgccggctgcacccagaggaccagcaaggcctgccggggcaacctggtgtaccacagcgctgtgctgggcatcagtgacctgatgagccagaggaactgcagcaaggatggccccaccagcagcaccaaccctgaggtgacccatgacccctgcaactaccacagccatgctggggcccgggagcacagaagaggagaccagaaccccccatcctacctgttctgtggcctgtttggagacccccacctgcggaccttcaaggacaacttccagacctgcaaggtggagggcgcctggcccctgattgacaacaactacctgtctgtgcaggtgaccaacgtgcctgtggtgcccggcagcagcgccacagccaccaacaagatcaccatcatcttcaaggcccaccatgaatgtacagaccagaaggtgtaccaggccgtgacagatgacctgcctgctgcctttgtggatggcaccaccagcggcggggacagtgatgccaagagcctgcgcatcgtggagcgggagagcggccactacgtggagatgcacgcccgctacatcggcaccaccgtgtttgtgcggcaggtgggccgctacctgaccctggccatccgcatgcctgaggacctggccatgtcctatgaggagagccaggacctgcagctgtgtgtgaatggctgccccctgtctgaaagaattgatgatggccagggccaggtgtctgccatcctgggccacagcctgcccaggaccagcctggtgcaggcctggccaggctacaccctggagacagccaacacccagtgccacgagaagatgcctgtgaaggacatctacttccagagctgtgtgtttgacctgctgaccactggagatgccaacttcaccgctgctgcccacagcgccctggaggatgtggaggccctgcaccccaggaaggagcgctggcacatcttccccagcagtggaaatggcaccccccggggcggcagtgacctgtctgtgtccctgggcctgacctgcctgatcctgattgtgttcctgtag

SEQ ID NO: 283662 - DNA, 1314 bp, Artificial Sequence
  derived and/or modified sequence
atgggcctgcgggccgcccccagcagcgccgccgccgccgccgccgaggttgagcaaagacggagtcctgggctatgccccccccctttagagctcttgctgctgctgcttttttcccttggcctgctccatgcaggagattgccaacaacctgctcaatgtcgtattcagaagtgcactacagattttgtgtctctaacgagccacctgaacagtgcagtcgacggttttgactctgaattctgcaaagctcttcgtgcatatgccggctgcacccaacgtactagcaaagcttgccgcggcaatctggtctaccactctgcggtgttgggtatatccgacctaatgtcgcagcgtaattgctctaaagacggtcctaccagctcaaccaacccagaagtgacccatgacccctgcaactaccatagccatgccggggctagggaacaccgtcgcggagatcaaaatcctccatcttatttattctgcggtctgttcggagacccccatcttagaaccttcaaagataactttcagacatgcaaagttgaaggtgcctggccactcatagacaataactatttgagtgtgcaagttacaaacgtgcctgtggtgccaggttccagcgcaactgcaactaacaagatcacaatcatatttaaagcccaccacgagtgcacggaccaaaaagtgtaccaggctgtgactgacgatctacccgctgcctttgtggatggcaccactagcgggggagattcagacgcaaagtcactgagaatcgttgaacgggaatccggccattacgtcgagatgcacgctcggtatattggcaccacggtattcgtgcggcaggtaggtcgctatctgaccctagccatcaggatgcctgaggacctggctatgtcctacgaagaatctcaggacctgcagctgtgcgttaatggttgtcctctgtcggaaaggatagatgatggccagggccaggtttccgctattctcgggcattcactgcctcgcacgtccctggtccaagcttggcccgggtacacacttgagactgctaatacacagtgtcatgagaagatgcctgtaaaggacatttacttccagagctgcgtattcgatctacttacgaccggggacgccaacttcacagccgccgcccacagtgctttggaggacgtcgaagccctgcacccgcgtaaggagagatggcatatctttccgtcctctggcaacgggacacctagaggtggatctgatcttagcgtttctttaggtttgacttgtcttattctcattgtatttctctag

SEQ ID NO: 283663 - DNA, 1314 bp, Artificial Sequence
  derived and/or modified sequence
atgggattacgagccgctccttctagcgctgccgctgcagccgctgaggtggagcagcgccgatcccctgggctgtgtccccctccattggagctgcttctgctcctgcttttcagtttgggattgttgcatgctggtgactgccagcaaccagctcagtgcagaatacagaagtgtactaccgacttcgtgtcgctcacaagccacctcaactctgctgtcgacggatttgattccgaattctgtaaggccctccgggcatatgccggttgcacccagaggacctcgaaagcttgtcgcggaaatctggtgtaccactcggccgtcctgggaatctcagatttgatgtcacagagaaattgtagtaaggatggacctacttccagcacaaacccagaggtgacacacgacccatgcaactatcatagtcatgccggtgccagggaacaccgacggggagaccagaaccctcctagctaccttttttgcggtctctttggtgacccccaccttaggacctttaaagacaacttccaaacgtgtaaggtagaaggagcctggccgctgattgacaacaactatttatcagttcaagtgacgaatgtgccagtggtcccaggctctagcgctactgctactaataagattacgatcatctttaaagctcaccacgagtgtacagatcaaaaggtgtaccaggccgtgacagacgacctgcctgcagcctttgtcgacggtaccacctctggcggtgactcagatgcgaagtctctgaggattgtggagagagagtcaggccactacgttgagatgcacgcgaggtacatcgggaccacagtgttcgtccgtcaggttgggagatacctgacactggcaattcgcatgcccgaggacctggctatgtcatacgaggaatctcaggatctacagctatgcgtaaacgggtgtccactctccgagcgtatagatgatggccaaggccaggtctcagcgatacttgggcactcactgccgagaactagtctcgtccaggcctggccaggatacaccttggagaccgcaaacactcagtgtcacgaaaaaatgccagtaaaagacatttacttccaaagctgcgtgtttgatttactcaccacaggcgatgccaacttcactgctgctgcccattccgcattggaagacgtggaagctttgcaccccagaaaagagaggtggcacatcttcccttcaagcggtaacggcaccccaagaggcggaagcgacctgagcgtttccctgggcctgacctgtttaatcctgatagtgttcctctag

SEQ ID NO: 283664 - DNA, 2052 bp, Artificial Sequence
  derived and/or modified sequence
gagattgatcgaccgcgggggctgccgcgcagagatatccgggccgccggtgggtggtcgctagggctgggccagcctcttggaggtccacgcccgccgagcccacgctggctggggccggggtgccggcgcgctcgggactcgtctcagcagtcgctcacggtctttgtgtcttctcttccgcccctttccctgcctgccgcctccggccgccacgatgcccctgcgccccgctgctgccgccgcggactggctgcgccggctgcgcgctgcttgctgcggcggtggtggcgccccatctgctacacgggcctgaagaaggaagaagaggaagcgaagcgcgccccccggcccatgccgcagccacgggcccagacccgccacggcgcccgcgccgccgccctcgccggagcccacgagacctgcatggacgggcatgggcttgagagcagcaccttccagcgccgccgctgccgccgccgaggttgagcagcgccgcagccccgggctctgccccccgccgctggagctgctgctgctgctgctgttcagcctcgggctgctccacgcaggtgactgccaacagccagcccaatgtcgaatccagaaatgcaccacggacttcgtgtccctgacttctcacctgaactctgccgttgacggctttgactctgagttttgcaaggccttgcgtgcctatgctggctgcacccagcgaacttcaaaagcctgccgtggcaacctggtataccattctgccgtgttgggtatcagtgacctcatgagccagaggaattgttccaaggatggacccacatcctctaccaaccccgaagtgacccatgatccttgcaactatcacagccacgctggagccagggaacacaggagaggggaccagaaccctcccagttaccttttttgtggcttgtttggagatcctcacctcagaactttcaaggataacttccaaacatgcaaagtagaaggggcctggccactcatagataataattatctttcagttcaagtgacaaacgtacctgtggtccctggatccagtgctactgctacaaataagatcactattatcttcaaagcccaccatgagtgtacagatcagaaagtctaccaagctgtgacagatgacctgccggccgcctttgtggatggcaccaccagtggtggggacagcgatgccaagagcctgcgtatcgtggaaagggagagtggccactatgtggagatgcacgcccgctatatagggaccacagtgtttgtgcggcaggtgggtcgctacctgacccttgccatccgtatgcctgaagacctggccatgtcctacgaggagagccaggacctgcagctgtgcgtgaacggctgccccctgagtgaacgcatcgatgacgggcagggccaggtgtctgccatcctgggacacagcctgcctcgcacctccttggtgcaggcctggcctggctacacactggagactgccaacactcaatgccatgagaagatgccagtgaaggacatctatttccagtcctgtgtcttcgacctgctcaccactggtgatgccaactttactgccgcagcccacagtgccttggaggatgtggaggccctgcacccaaggaaggaacgctggcacattttccccagcagtggcaatgggactccccgtggaggcagtgatttgtctgtcagtctaggactcacctgcttgatccttatcgtgtttttgtaggggttgtcttttgttttggttttttattttttgtctataacaaaattttaaaatatatattgtcataatatattgagtaaaagagtatatatgtatataccatgtatatgacaggatgtttgtcctgggacacccaccagattgtacatactgtgtttggctgttttcacatatgttggatgtagtgttctttgattgtatcaattttgttttgcagttctgtgaaatgttttataatgtccctgcccagggacctgttagaaagcactttattttttatatattaaatatttatgtgtgtg

SEQ ID NO: 283665 - DNA, 1314 bp, Artificial Sequence
  derived and/or modified sequence
atgggcctgagagccgcccccagcagcgccgccgccgccgccgccgaggtggagcagagaagaagccccggcctgtgccccccccccctggagctgctgctgctgctgctgttcagcctgggcctgctgcacgccggcgactgccagcagcccgcccagtgcagaatccagaagtgcaccaccgacttcgtgagcctgaccagccacctgaacagcgccgtggacggcttcgacagcgagttctgcaaggccctgagagcctacgccggctgcacccagagaaccagcaaggcctgcagaggcaacctggtgtaccacagcgccgtgctgggcatcagcgacctgatgagccagagaaactgcagcaaggacggccccaccagcagcaccaaccccgaggtgacccacgacccctgcaactaccacagccacgccggcgccagagagcacagaagaggcgaccagaacccccccagctacctgttctgcggcctgttcggcgacccccacctgagaaccttcaaggacaacttccagacctgcaaggtggagggcgcctggcccctgatcgacaacaactacctgagcgtgcaggtgaccaacgtgcccgtggtgcccggcagcagcgccaccgccaccaacaagatcaccatcatcttcaaggcccaccacgagtgcaccgaccagaaggtgtaccaggccgtgaccgacgacctgcccgccgccttcgtggacggcaccaccagcggcggcgacagcgacgccaagagcctgagaatcgtggagagagagagcggccactacgtggagatgcacgccagatacatcggcaccaccgtgttcgtgagacaggtgggcagatacctgaccctggccatcagaatgcccgaggacctggccatgagctacgaggagagccaggacctgcagctgtgcgtgaacggctgccccctgagcgagagaatcgacgacggccagggccaggtgagcgccatcctgggccacagcctgcccagaaccagcctggtgcaggcctggcccggctacaccctggagaccgccaacacccagtgccacgagaagatgcccgtgaaggacatctacttccagagctgcgtgttcgacctgctgaccaccggcgacgccaacttcaccgccgccgcccacagcgccctggaggacgtggaggccctgcaccccagaaaggagagatggcacatcttccccagcagcggcaacggcacccccagaggcggcagcgacctgagcgtgagcctgggcctgacctgcctgatcctgatcgtgttcctgtag

SEQ ID NO: 283666 - protein, 169 aa, Artificial Sequence
  derived and/or modified sequence
MEVYIPSFRYEESDLERGYTVFKIEVLMNGRKHFVEKRYSEFHALHKKLKKCIKTPEIPSKHVRNWVPKVLEQRRQGLETYLQAVILENEELPKLFLDFLNVRHLPSLPKAESCGSFDETESEESSKLSHQPVLLFLRDPYVLPAASDFPNVVIEGVLHGIFYPHLQPR

SEQ ID NO: 283667 - protein, 300 aa, Artificial Sequence
  derived and/or modified sequence
MAATEDERLAGSGEGERLDFLRDRHVRFFQRCLQVLPERYSSLETSRLTIAFFALSGLDMLDSLDVVNKDDIIEWIYSLQVLPTEDRSNLNRCGFRGSSYLGIPFNPSKAPGTAHPYDSGHIAMTYTGLSCLVILGDDLSRVNKEACLAGLRALQLEDGSFCAVPEGSENDMRFVYCASCICYMLNNWSGMDMKKAITYIRRSMLLKIFQYTNFEKNRNYILSTQDRLVGGFAKWPDSHPDALHAYFGICGLSLMEESGICKVHPALNVSTRTSERLLDLHQSWKTKDSKQCSENVHIST

SEQ ID NO: 283668 - DNA, 903 bp, Artificial Sequence
  derived and/or modified sequence
atggccgccaccgaggacgagagactggccggcagcggcgagggcgagagactggacttcctgagagacagacacgtgagattcttccagagatgcctgcaggtgctgcccgagagatacagcagcctggagaccagcagactgaccatcgccttcttcgccctgagcggcctggacatgctggacagcctggacgtggtgaacaaggacgacatcatcgagtggatctacagcctgcaggtgctgcccaccgaggacagaagcaacctgaacagatgcggcttcagaggcagcagctacctgggcatccccttcaaccccagcaaggcccccggcaccgcccacccctacgacagcggccacatcgccatgacctacaccggcctgagctgcctggtgatcctgggcgacgacctgagcagagtgaacaaggaggcctgcctggccggcctgagagccctgcagctggaggacggcagcttctgcgccgtgcccgagggcagcgagaacgacatgagattcgtgtactgcgccagctgcatctgctacatgctgaacaactggagcggcatggacatgaagaaggccatcacctacatcagaagaagcatgctgctgaagatcttccagtacaccaacttcgagaagaacagaaactacatcctgagcacccaggacagactggtgggcggcttcgccaagtggcccgacagccaccccgacgccctgcacgcctacttcggcatctgcggcctgagcctgatggaggagagcggcatctgcaaggtgcaccccgccctgaacgtgagcaccagaaccagcgagagactgctggacctgcaccagagctggaagaccaaggacagcaagcagtgcagcgagaacgtgcacatcagcacctag

SEQ ID NO: 283669 - DNA, 903 bp, Artificial Sequence
  derived and/or modified sequence
atggccgcaactgaagatgagcgtttggcaggttccggtgagggggagagactggactttttgagagatcgccacgtgaggttcttccagagatgtttacaggtactgccagaacgctactctagtcttgagacttcgcgccttacaattgcctttttcgccctgtctggcctggatatgctcgacagtcttgatgtcgttaacaaagacgacatcattgagtggatttatagccttcaagtgctgccaaccgaagacaggtctaatcttaacaggtgcggctttcggggctcctcttatcttgggatcccttttaaccccagcaaagctccaggcaccgctcacccctacgatagtggacatattgccatgacatataccggtctcagttgccttgtgattctaggcgacgatctgagtcgtgtcaacaaagaggcttgtcttgcaggactgcgagcgctccaattggaagacggatctttctgcgcggtgcctgaggggtctgagaatgatatgcggttcgtttactgtgcctcctgcatttgctatatgcttaataattggagcgggatggatatgaaaaaggctattacctacatcagaaggagcatgctgctgaagatctttcaatacactaatttcgaaaaaaaccggaactacatccttagcactcaggatcgcctggttggagggttcgctaaatggcctgatagccatcccgatgcgctgcatgcctactttgggatttgcggactgagtctcatggaggagagcgggatctgtaaagtccatcctgccctgaacgtcagcaccagaacctcagagaggctgttggacctgcatcagtcttggaaaacgaaagattcgaagcagtgcagtgagaacgtacacatcagcacttag

SEQ ID NO: 283670 - DNA, 903 bp, Artificial Sequence
  derived and/or modified sequence
atggccgccacagaagatgagcggctggccggcagcggggagggggagcggctggacttcctgcgggacagacatgtgcgcttcttccagcgctgcctgcaggtgctgcctgagcgctacagcagcctggagaccagccggctgaccatcgccttctttgccctgagcggcctggacatgctggacagcctggatgtggtgaacaaggatgacatcatcgagtggatctacagcctgcaggtgctgcccacagaagatagaagcaacctgaacagatgtggcttccggggcagcagctacctgggcatccccttcaaccccagcaaggcccctggaacagcccacccctatgattctggccacatcgccatgacctacacaggcctgagctgcctggtgatcctgggagatgacctgagccgggtgaacaaggaggcctgcctggccggcctgcgggccctgcagctggaggatggcagcttctgtgctgtgcctgagggctctgaaaatgacatgagatttgtgtactgtgccagctgcatctgctacatgctgaacaactggagcggcatggacatgaagaaggccatcacctacatcagaagatccatgctgctgaagatcttccagtacaccaactttgagaagaacagaaactacatcctgagcacccaggaccggctggtgggcggctttgccaagtggccagacagccacccagatgccctgcacgcctacttcggcatctgtggcctgagcctgatggaggagagcggcatctgcaaggtgcacccagccctgaatgtgtccaccaggaccagcgagcggctgctggacctgcaccagagctggaagaccaaggacagcaagcagtgcagtgaaaatgtgcacatcagcacctag

SEQ ID NO: 283671 - DNA, 903 bp, Artificial Sequence
  derived and/or modified sequence
atggccgccaccgaggacgagcggctggccggcagcggcgagggcgaaaggctggacttcctccgggaccgtcacgtgagattctttcagaggtgcttacaggtgcttcctgagaggtacagctcactggagacatccagacttacaattgcattctttgccctgtccgggctagatatgctcgactccttggacgtagtcaataaagatgacattatcgaatggatttacagcctacaggtgctgcccactgaggatagatctaacttaaaccgctgcgggttccgcggatcctcatatctgggtattcctttcaacccatcgaaggctcccggcacagcacacccttacgactccgggcatattgcaatgacttacaccgggctcagctgtctcgtgatccttggagacgacctctctagggtcaacaaagaggcttgcctagcaggactacgtgcgctgcagctcgaagatggcagcttttgcgccgttccagagggtagcgaaaacgatatgaggttcgtgtattgtgcttcctgtatctgctacatgctgaacaattggagtggcatggacatgaagaaggccatcacttacatcagacggtctatgctccttaaaattttccaatacacaaacttcgagaagaaccgaaactacatcctgtctacccaagaccgcctggtcggaggcttcgcaaaatggcctgacagtcatcccgatgctcttcatgcatattttggaatatgtgggctctccctgatggaggagtcaggcatttgtaaggtgcaccccgccctcaatgtgagcacacgtacaagtgagagactgctcgacctacaccagtcctggaagaccaaggacagtaagcagtgttctgagaatgttcatatttctacatag

SEQ ID NO: 283672 - DNA, 903 bp, Artificial Sequence
  derived and/or modified sequence
atggccgcaacagaggacgaacgcttagccggttctggagagggggagcggttagacttcctacgcgatcgacacgtgcgcttttttcaacggtgtctacaagtactcccagagagatattcaagtttggaaacaagccgcctgacaatcgccttctttgctctgagtggccttgacatgttagactcgttggatgtggttaacaaagatgatatcattgaatggatttattcattacaagtcctccccacagaggacagatcaaacctcaaccggtgtggattcaggggctcgtcctatctcggcatcccttttaacccctctaaggccccaggcactgcccatccctacgatagcgggcacatcgccatgacgtacactgggctgagctgcctggttatccttggtgatgatctgagcagggtgaataaggaagcgtgtctggccggtctcagagcgctccaactggaagatggctctttttgtgcagtccccgagggttccgaaaacgacatgcggtttgtctactgcgctagttgcatctgttacatgctcaataactggtccggaatggacatgaaaaaagccataacctatatcaggcgctctatgcttttgaagatctttcaatatacaaacttcgaaaaaaatcgcaattatattctgtcgactcaggaccgcctggtgggtggtttcgctaagtggcctgattctcaccctgacgccctacatgcttattttggaatatgcgggctgtcgcttatggaagagtctggcatctgcaaagttcatccagcgttgaacgtatcaacccgtacaagcgagcggcttctggacctccaccagagctggaaaacgaaggacagcaaacagtgttccgagaacgttcatatctcaacctag

SEQ ID NO: 283673 - DNA, 903 bp, Artificial Sequence
  derived and/or modified sequence
atggcggccactgaggatgagaggctagcagggagcggtgagggagagcggctggatttcttacgggatcggcacgtgcgatttttccagcgctgcctccaggttttgccggagcgctattcttcactcgagacaagcaggttgacaattgcattttttgcactctccgggctggatatgttggattccttagatgtggtgaacaaagatgatataatagagtggatttattccctgcaggtccttcccacagaagacagatcaaatctaaatcgctgtggtttccgaggctcttcatacctgggtattccgttcaatccatcaaaggctcctggaacagctcatccttatgatagtggccacattgcaatgacctacactggcctctcatgcttagttattcttggagacgacttaagccgagtaaataaagaagcttgcttagcgggcttgagagcccttcagctggaagatgggagtttttgtgcagtacctgaaggcagtgaaaatgacatgcgatttgtgtactgtgcttcctgtatttgctatatgctcaacaactggtcaggcatggatatgaaaaaagccatcacctatattagaaggagtatgcttctaaaaattttccaatacactaactttgagaaaaatagaaattacatcttatcaactcaagatcgccttgtagggggatttgccaagtggccagacagtcatccagatgctttgcatgcatactttgggatctgtggcctgtcactaatggaggaaagtggaatttgtaaagttcatcctgctctgaatgtaagcacacggacttctgaacgccttctagatctccatcaaagctggaaaaccaaggactctaaacaatgctcagagaatgtacatatctccacatga

SEQ ID NO: 283674 - protein, 707 aa, Artificial Sequence
  derived and/or modified sequence
MSVNISTAGKGVDPNTVDTYDSGDDWEIGVGNLIIDLDADLEKDRQKFEMNNSTTTTSSSNSKDCGGPASSGAGATAALADGLKFASVQASAPQGNSHKETSKSKVKRSKTSKDANKSLPSAALYGIPEISSTGKRQEVQGRPGEATGMNSALGQSVSSGGSGNPNSNSTSTSTSAATAGAGSCGKSKEEKPGKSQSSRGAKRDKDAGKSRKDKHDLLQGHQNGSGSQAPSGGHLYGFGAKSNGGGASPFHCGGTGSGSVAAAGEVSKSAPDSGLMGNSMLVKKEEEEEESHRRIKKLKTEKVDPLFTVPAPPPPISSSLTPQILPSYFSPSSSNIAAPVEQLLVRTRSVGVNTCEVGVVTEPECLGPCEPGTSVNLEGIVWHETEEGVLVVNVTWRNKTYVGTLLDCTKHDWAPPRFCESPTSDLEMRGGRGRGKRARSAAAAPGSEASFTESRGLQNKNRGGANGKGRRGSLNASGRRTPPNCAAEDIKASPSSTNKRKNKPPMELDLNSSSEDNKPGKRVRTNSRSTPTTPQGKPETTFLDQGCSSPVLIDCPHPNCNKKYKHINGLRYHQAHAHLDPENKLEFEPDSEDKISDCEEGLSNVALECSEPSTSVSAYDQLKAPASPGAGNPPGTPKGKRELMSNGPGSIIGAKAGKNSGKKKGLNNELNNLPVISNMTAALDSCSAADGSLAAEMPKLEAEGLID

SEQ ID NO: 283675 - protein, 507 aa, Artificial Sequence
  derived and/or modified sequence
MSVYNSEKCSYDGVEDKRIMGMQLDRASSSLYVAFSTCVIKVPLGRCERYGKCKKTCIASRDPYCGWIKEGGACSHLSPNSRLTFEQDIERGNTDGLGDCHNSFVALNGVIRESYLKGHDQLVPVTLLAIAVILAFVMGAVFSGITVYCVCDHRRKDVAVVQRKEKELTHSRRGSMSSVTKLSGLFGDTQSKDPKPEAILTPLMHNGKLATPGNTAKMLIKADQHHLDLTALPTPESTPTLQQKRKPSRGSREWERNQNLINACTKDMPPMGSPVIPTDLPLRASPSHIPSVVVLPITQQGYQHEYVDQPKMSEVAQMALEDQAATLEYKTIKEHLSSKSPNHGVNLVENLDSLPPKVPQREASLGPPGASLSQTGLSKRLEMHHSSSYGVDYKRSYPTNSLTRSHQATTLKRNNTNSSNSSHLSRNQSFGRGDNPPPAPQRVDSIQVHSSQPSGQAVTVSRQPSLNAYNSLTRSGLKRTPSLKPDVPPKPSFAPLSTSMKPNDACT

SEQ ID NO: 283676 - DNA, 1524 bp, Artificial Sequence
  derived and/or modified sequence
atgagcgtgtacaacagcgagaagtgcagctacgacggcgtggaggacaagagaatcatgggcatgcagctggacagagccagcagcagcctgtacgtggccttcagcacctgcgtgatcaaggtgcccctgggcagatgcgagagatacggcaagtgcaagaagacctgcatcgccagcagagacccctactgcggctggatcaaggagggcggcgcctgcagccacctgagccccaacagcagactgaccttcgagcaggacatcgagagaggcaacaccgacggcctgggcgactgccacaacagcttcgtggccctgaacggcgtgatcagagagagctacctgaagggccacgaccagctggtgcccgtgaccctgctggccatcgccgtgatcctggccttcgtgatgggcgccgtgttcagcggcatcaccgtgtactgcgtgtgcgaccacagaagaaaggacgtggccgtggtgcagagaaaggagaaggagctgacccacagcagaagaggcagcatgagcagcgtgaccaagctgagcggcctgttcggcgacacccagagcaaggaccccaagcccgaggccatcctgacccccctgatgcacaacggcaagctggccacccccggcaacaccgccaagatgctgatcaaggccgaccagcaccacctggacctgaccgccctgcccacccccgagagcacccccaccctgcagcagaagagaaagcccagcagaggcagcagagagtgggagagaaaccagaacctgatcaacgcctgcaccaaggacatgccccccatgggcagccccgtgatccccaccgacctgcccctgagagccagccccagccacatccccagcgtggtggtgctgcccatcacccagcagggctaccagcacgagtacgtggaccagcccaagatgagcgaggtggcccagatggccctggaggaccaggccgccaccctggagtacaagaccatcaaggagcacctgagcagcaagagccccaaccacggcgtgaacctggtggagaacctggacagcctgccccccaaggtgccccagagagaggccagcctgggcccccccggcgccagcctgagccagaccggcctgagcaagagactggagatgcaccacagcagcagctacggcgtggactacaagagaagctaccccaccaacagcctgaccagaagccaccaggccaccaccctgaagagaaacaacaccaacagcagcaacagcagccacctgagcagaaaccagagcttcggcagaggcgacaaccccccccccgccccccagagagtggacagcatccaggtgcacagcagccagcccagcggccaggccgtgaccgtgagcagacagcccagcctgaacgcctacaacagcctgaccagaagcggcctgaagagaacccccagcctgaagcccgacgtgccccccaagcccagcttcgcccccctgagcaccagcatgaagcccaacgacgcctgcacctag

SEQ ID NO: 283677 - DNA, 1230 bp, Artificial Sequence
  derived and/or modified sequence
atgaagaacgccagccccgagaccagagagggcgtgatcagagagagctacctgaagggccacgaccagctggtgcccgtgaccctgctggccatcgccgtgatcctggccttcgtgatgggcgccgtgttcagcggcatcaccgtgtactgcgtgtgcgaccacagaagaaaggacgtggccgtggtgcagagaaaggagaaggagctgacccacagcagaagaggcagcatgagcagcgtgaccaagctgagcggcctgttcggcgacacccagagcaaggaccccaagcccgaggccatcctgacccccctgatgcacaacggcaagctggccacccccggcaacaccgccaagatgctgatcaaggccgaccagcaccacctggacctgaccgccctgcccacccccgagagcacccccaccctgcagcagaagagaaagcccagcagaggcagcagagagtgggagagaaaccagaacctgatcaacgcctgcaccaaggacatgccccccatgggcagccccgtgatccccaccgacctgcccctgagagccagccccagccacatccccagcgtggtggtgctgcccatcacccagcagggctaccagcacgagtacgtggaccagcccaagatgagcgaggtggcccagatggccctggaggaccaggccgccaccctggagtacaagaccatcaaggagcacctgagcagcaagagccccaaccacggcgtgaacctggtggagaacctggacagcctgccccccaaggtgccccagagagaggccagcctgggcccccccggcgccagcctgagccagaccggcctgagcaagagactggagatgcaccacagcagcagctacggcgtggactacaagagaagctaccccaccaacagcctgaccagaagccaccaggccaccaccctgaagagaaacaacaccaacagcagcaacagcagccacctgagcagaaaccagagcttcggcagaggcgacaaccccccccccgccccccagagagtggacagcatccaggtgcacagcagccagcccagcggccaggccgtgaccgtgagcagacagcccagcctgaacgcctacaacagcctgaccagaagcggcctgaagagaacccccagcctgaagcccgacgtgccccccaagcccagcttcgcccccctgagcaccagcatgaagcccaacgacgcctgcacctag

SEQ ID NO: 283678 - DNA, 345 bp, Artificial Sequence
  derived and/or modified sequence
atgagaagcgaggccctgctgctgtacttcaccctgctgcacttcgccggcgccggcttccccgaggacagcgagcccatcagcatcagccacggcaactacaccaagcagtaccccgtgttcgtgggccacaagcccggcagaaacaccacccagagacacagactggacatccagatgatcatgatcatgaacggcaccctgtacatcgccgccagagaccacatctacaccgtggacatcgacaccagccacaccgaggagatctactgcagcaagaagctgacctggaagagcagacaggccgacgtggacacctgcagaatgaagggcaagcacaagtag

SEQ ID NO: 283679 - DNA, 480 bp, Artificial Sequence
  derived and/or modified sequence
atgagaagcgaggccctgctgctgtacttcaccctgctgcacttcgccggcgccggcttccccgaggacagcgagcccatcagcatcagccacggcaactacaccaagcagtaccccgtgttcgtgggccacaagcccggcagaaacaccacccagagacacagactggacatccagatgatcatgatcatgaacggcaccctgtacatcgccgccagagaccacatctacaccgtggacatcgacaccagccacaccgaggagatctactgcagcaagaagctgacctggaagagcagacaggccgacgtggacacctgcagaatgaagggcaagcacaaggacgagtgccacaacttcatcaaggtgctgctgaagaagaacgacgacgccctgttcgtgtgcggcaccaacgccttcaaccccagctgcagaaactacaagatggacaccctggagcccttcggcgacgagttctag

SEQ ID NO: 283680 - DNA, 1524 bp, Artificial Sequence
  derived and/or modified sequence
atgagcgtctacaattcagagaaatgttcatatgacggcgtggaagacaagcgtattatgggcatgcagttagaccgagcaagttcgtctttatacgtggcgtttagtacttgcgtgatcaaggtacccctgggtcgctgtgagcgttacggaaagtgtaagaagacttgcatcgcctcccgcgacccatactgcggatggatcaaagaaggcggcgcctgttctcatttaagccccaatagccgcttgacattcgagcaggacattgaaaggggcaacaccgacggcttaggtgattgccataatagttttgttgcacttaacggtgtgatcagagaatcttatctaaagggccacgatcagttggttcctgtcactcttctggctatcgctgtgattcttgctttcgttatgggagctgtgttttcagggattaccgtatactgtgtctgcgaccatcgtaggaaggatgtggcagtggttcaacggaaggaaaaagagctgacacattctcggcggggcagcatgtcatcagtgacaaaactgtcgggtctttttggggacacgcaaagtaaggacccaaagcccgaggccatactgacgcctctaatgcacaacggtaagctagccacacctggaaacactgcgaaaatgcttatcaaagcagatcagcaccacctcgatttaacagcgttgcctacacccgagtccacaccaacactgcagcaaaaacgaaagccaagccgtggctctagggaatgggagcgcaatcaaaatctgatcaatgcgtgcacaaaggacatgcccccaatgggaagtcctgtcatacccaccgatctgccactacgggcgagcccatcacacatcccatctgtcgtcgtgttacctattactcagcagggctaccagcatgagtacgttgaccagcccaaaatgagcgaggtcgcgcagatggcactggaagatcaggccgccaccctggagtataaaactattaaggaacatctgtcctcaaagtctcccaaccatggtgtaaaccttgtggaaaaccttgacagtcttccacctaaggtaccccagcgagaggccagcctaggcccccctggcgccagcctgagccagactgggttatcaaaaagactcgaaatgcatcattcctcttcgtacggcgtggattataaacgctcttaccccaccaatagtctcacgaggagccaccaggcaacaacactgaagcgcaacaacaccaacagctctaatagctcccatcttagccggaaccagtcttttgggaggggggacaaccctccaccggcaccccaaagagtggacagtatacaggtccacagtagtcagcccagcgggcaggccgtaacggtgtctcggcagccctctctcaatgcttacaattcactgaccagaagtggtctgaagcgcaccccaagccttaaaccagacgtcccgcctaagccttcctttgcacctctgagcacctctatgaagcccaacgatgcgtgtacctag

SEQ ID NO: 283681 - DNA, 1230 bp, Artificial Sequence
  derived and/or modified sequence
atgaagaatgcttcccctgagacgcgggaaggggttataagggagagctacttgaaggggcacgaccagctcgtgccagtgacactcctggcgattgcggtgattctagctttcgtgatgggcgccgtgttttccggcatcaccgtgtattgcgtgtgcgaccacaggagaaaggacgtggccgtggtccagcggaaggagaaggagctcactcacagcaggaggggttcaatgtcttcagtgacgaaattgtcaggattatttggagacacacaatccaaagatcccaaacctgaggccatactaaccccacttatgcacaatgggaagctggccacccctggtaacaccgccaaaatgctgatcaaagccgatcagcaccatctagatttgacagcgctgccgaccccagagtctacaccaacgctccagcagaagagaaaaccatctagggggtctagagaatgggagcgcaatcagaatctgataaatgcctgcaccaaagacatgccacctatgggttcccccgtgatacccaccgacctcccgctgcgcgcctcaccctcccatatcccttccgtggtggtacttcctattacacaacaggggtatcagcacgaatacgttgaccagcccaagatgtcagaggtcgctcagatggccttggaagatcaggccgccaccctggaatataaaaccatcaaggagcacctgtcttcaaaatctcctaatcacggagtgaacttagtggagaatctcgacagtctgccacccaaagtgccccagcgcgaggcatctcttggcccccccggagccagcctgagccagaccggcctgtcgaagcgactggagatgcatcactcctcaagttacggcgttgattacaagcgttcttatccaaccaattccctgactcggtcacatcaggcaactaccttgaagagaaataataccaactcctcgaactcttctcatctttcacgcaatcagtctttcggacgcggtgataaccccccacctgcaccccaaagggtagatagtatccaggtccattcctctcagcccagcgggcaggcggttacggtgtctagacaacctagcttgaacgcttataacagtttaactcggtcgggcctgaagcgaaccccaagtcttaaacctgatgtgccaccgaaacccagcttcgcacctctttccaccagtatgaagcccaacgatgcctgcacgtag

SEQ ID NO: 283682 - DNA, 345 bp, Artificial Sequence
  derived and/or modified sequence
atgcggagtgaggccctccttctctacttcaccctcctgcacttcgctggagcaggattcccagaggatagtgagcctatctccatctcacacgggaactatactaaacagtatccggtcttcgtggggcataagccgggcagaaataccacccagagacacaggcttgatatacagatgatcatgattatgaatggtacgctctatatcgcggctcgcgaccatatttacacagtagacattgatacttcccatacagaggagatatattgcagcaaaaaactgacatggaagtctagacaggccgatgttgacacatgcagaatgaaggggaagcacaaatag

SEQ ID NO: 283683 - DNA, 480 bp, Artificial Sequence
  derived and/or modified sequence
atgaggtcagaggccctgctgctgtactttacgctgctgcactttgctggagccggttttcccgaagactcggagcccatctccatttcccacggtaactataccaaacagtatccagtgtttgtcgggcataaacctggacggaatacaacccagaggcaccgactcgatattcaaatgattatgatcatgaacggcacactctacatagccgcccgggaccatatttatactgtggacattgacacatcccacactgaggagatctactgctccaagaagctgacatggaagtcaagacaggctgacgtagacacctgcaggatgaagggcaaacacaaggatgaatgccacaatttcataaaggtgcttctaaaaaagaacgacgacgctctcttcgtatgtggaactaacgcatttaatcctagttgtagaaattataagatggacactctggagccttttggagatgaattttag

SEQ ID NO: 283684 - DNA, 1524 bp, Artificial Sequence
  derived and/or modified sequence
atgtctgtgtacaacagcgagaagtgcagctatgatggagtggaggacaagaggatcatgggcatgcagctggaccgggccagcagcagcctgtatgtggccttcagcacctgtgtgatcaaggtgcccctgggccgctgtgaaagatatggcaagtgcaagaagacctgcatcgccagccgggacccctactgcggctggatcaaggagggcggggcctgcagccacctgagccccaacagccggctgacctttgagcaggacatcgagcggggcaacacagatggcctgggggactgccacaacagctttgtggccctgaatggagtcatccgggagagctacctgaagggccatgaccagctggtgcctgtgaccctgctggccatcgctgtgatcctggcctttgtgatgggcgctgtgttttctggcatcaccgtgtactgtgtgtgtgaccacaggaggaaggatgtggccgtggtgcagaggaaggagaaggagctgacccacagccggcggggctccatgagctctgtgaccaagctgagcggcctgtttggagacacccagagcaaggaccccaagccagaggccatcctgacccccctgatgcacaacgggaagctggccaccccaggcaacacagccaagatgctgatcaaggctgaccagcaccacctggacctgacagccctgcccaccccagagagcacccccaccctgcagcagaagaggaagcccagccggggcagccgggagtgggagaggaaccagaacctgatcaatgcctgcaccaaggacatgccacccatgggcagccctgtgatccccacagacctgcccctgcgggccagccccagccacatccccagcgtggtggtgctgcccatcacccagcagggctaccagcacgagtatgtggaccagcccaagatgtctgaggtggcccagatggccctggaggaccaggccgccaccctggagtacaagaccatcaaggagcacctgagcagcaagagccccaaccacggcgtgaacctggtggagaacctggacagcctgccccccaaggtgccccagcgggaggccagcctgggccccccaggggccagcctgagccagacaggcctgagcaagaggctggagatgcaccacagcagcagctatggagtggactacaagaggagctaccccaccaacagcctgaccaggagccaccaggccaccaccctgaagaggaacaacaccaacagcagcaacagcagccacctgagcaggaaccagagctttggccgcggggacaaccccccaccagccccccagagggtggacagcatccaggtgcacagcagccagcccagcggccaggccgtgacagtgtcccggcagcccagcctgaatgcctacaacagcctgaccaggagcggcctgaagaggacccccagcctgaagccagatgtgccccccaagcccagctttgcccccctgagcacctccatgaagcccaatgatgcctgcacctag

SEQ ID NO: 283685 - DNA, 1230 bp, Artificial Sequence
  derived and/or modified sequence
atgaagaatgccagccctgagacccgggagggcgtcatccgggagagctacctgaagggccatgaccagctggtgcctgtgaccctgctggccatcgctgtgatcctggcctttgtgatgggcgctgtgttttctggcatcaccgtgtactgtgtgtgtgaccacaggaggaaggatgtggccgtggtgcagaggaaggagaaggagctgacccacagccggcggggctccatgagctctgtgaccaagctgagcggcctgtttggagacacccagagcaaggaccccaagccagaggccatcctgacccccctgatgcacaacgggaagctggccaccccaggcaacacagccaagatgctgatcaaggctgaccagcaccacctggacctgacagccctgcccaccccagagagcacccccaccctgcagcagaagaggaagcccagccggggcagccgggagtgggagaggaaccagaacctgatcaatgcctgcaccaaggacatgccacccatgggcagccctgtgatccccacagacctgcccctgcgggccagccccagccacatccccagcgtggtggtgctgcccatcacccagcagggctaccagcacgagtatgtggaccagcccaagatgtctgaggtggcccagatggccctggaggaccaggccgccaccctggagtacaagaccatcaaggagcacctgagcagcaagagccccaaccacggcgtgaacctggtggagaacctggacagcctgccccccaaggtgccccagcgggaggccagcctgggccccccaggggccagcctgagccagacaggcctgagcaagaggctggagatgcaccacagcagcagctatggagtggactacaagaggagctaccccaccaacagcctgaccaggagccaccaggccaccaccctgaagaggaacaacaccaacagcagcaacagcagccacctgagcaggaaccagagctttggccgcggggacaaccccccaccagccccccagagggtggacagcatccaggtgcacagcagccagcccagcggccaggccgtgacagtgtcccggcagcccagcctgaatgcctacaacagcctgaccaggagcggcctgaagaggacccccagcctgaagccagatgtgccccccaagcccagctttgcccccctgagcacctccatgaagcccaatgatgcctgcacctag

SEQ ID NO: 283686 - DNA, 345 bp, Artificial Sequence
  derived and/or modified sequence
atgaggtctgaggccctgctgctgtacttcaccctgctgcactttgctggggccggcttccctgaggacagcgagcccatcagcatcagccacggcaactacaccaagcagtaccctgtgtttgtgggccacaagccaggcaggaacaccacccagaggcaccggctggacatccagatgatcatgatcatgaatggcaccctgtacatcgccgcccgggaccacatctacacagtggacatcgacaccagccacacagaggagatctactgcagcaagaagctgacctggaagagccggcaggctgatgtggacacctgcaggatgaagggcaagcacaagtag

SEQ ID NO: 283687 - DNA, 480 bp, Artificial Sequence
  derived and/or modified sequence
atgaggtctgaggccctgctgctgtacttcaccctgctgcactttgctggggccggcttccctgaggacagcgagcccatcagcatcagccacggcaactacaccaagcagtaccctgtgtttgtgggccacaagccaggcaggaacaccacccagaggcaccggctggacatccagatgatcatgatcatgaatggcaccctgtacatcgccgcccgggaccacatctacacagtggacatcgacaccagccacacagaggagatctactgcagcaagaagctgacctggaagagccggcaggctgatgtggacacctgcaggatgaagggcaagcacaaggatgagtgccacaacttcatcaaggtgctgctgaagaagaatgatgatgccctgtttgtgtgtggcaccaatgccttcaaccccagctgcaggaactacaagatggacaccctggagccctttggagatgagttctag

SEQ ID NO: 283688 - DNA, 1524 bp, Artificial Sequence
  derived and/or modified sequence
atgagcgtgtacaacagcgagaagtgcagctacgacggcgtggaggacaagcgcattatgggaatgcagttggatcgggcgtcctcgtcgttgtatgtggctttctctacgtgcgtgatcaaggtaccccttggacggtgtgagcgctacgggaaatgtaaaaaaacatgcatcgcgtctagagacccctactgtgggtggattaaggagggtggggcctgctcgcacctctcacccaactcaagacttacattcgagcaagatatcgaaagaggcaatacagatggcttaggtgactgtcataatagctttgtggccttaaacggagtcatccgggaaagctacctcaaaggacatgatcagttggtaccagtgaccctgctggcaatagccgtcattctcgcattcgtcatgggagccgtattctctgggataacagtgtactgcgtatgtgatcaccgcagaaaggatgtcgctgtggtgcagaggaaggaaaaagagctcacacacagccgtagggggagcatgtccagtgtcaccaagcttagtggtctgttcggtgatacccagagtaaggatccaaaaccagaagccatcctcacacctctcatgcacaatggcaaactggcgactcccggtaataccgccaaaatgttgatcaaagccgaccagcaccacttggacctgacagcattacccacacccgagagcactcctacgctgcaacaaaagcgcaagccctcaagaggatctcgggagtgggaaagaaaccaaaacctgattaacgcctgcaccaaggatatgccccctatggggagtcctgtgatcccaaccgatttaccactgcgcgcaagtccaagccatatcccttccgtggttgtcctgcccattactcagcagggctatcaacatgagtatgtggaccagcctaaaatgagcgaagtcgcccagatggcactggaagatcaagccgcaactctggagtacaagacaatcaaggagcacctgagcagcaagtctccaaatcatggggtgaacctagttgagaatctggatagcttacctcctaaggttccccagcgggaagcatctctgggcccccccggtgcttcattaagccagaccgggcttagcaaaagattggagatgcaccattccagttcttatggggtagactataaaagatcctaccccactaactcactgacaagaagccatcaggcaaccacgctgaagcgtaacaacaccaattcatctaactcgtcccacctgtctcggaatcagtcattcgggcggggtgataaccctcctccagcaccccagagagttgactctattcaggttcacagctctcagcccagtggccaagctgtgacagtgagccggcagccatctcttaacgcctacaactctctcactcgaagcgggctcaaaaggactccatcgctcaagcctgatgttccccccaagccgagctttgcacccttaagtactagcatgaagccaaatgatgcatgcacttag

SEQ ID NO: 283689 - DNA, 1230 bp, Artificial Sequence
  derived and/or modified sequence
atgaagaacgccagccccgagacccgggagggcgtgatccgggagtcctacctcaagggtcacgatcagctcgtccctgtgacccttttggccatagcagtcatcctggctttcgtcatgggggctgttttttccggcattacagtttattgtgtctgcgatcatcggaggaaggatgtggccgtggtacaacgaaaggaaaaagaactgacccacagtagacgcggcagcatgtcttctgttacaaagctgtccggcttgttcggcgatacccaaagcaaggaccctaaacctgaggccatattgaccccactaatgcataatggcaagttagctacaccgggcaataccgccaaaatgctcatcaaagcagaccaacaccatcttgatctcacagcactgcctacaccggagtcaacacctactctgcaacagaagcgcaagccctctcgcggttctagagaatgggagagaaatcagaatctgatcaatgcttgcaccaaggacatgcccccaatgggatcacccgtgattcctaccgatctgcctctgagggcgagcccttcccatatcccgtcagtcgtcgtgcttccaatcacccagcagggttatcagcacgagtacgtggaccagccaaagatgtccgaagtggctcagatggcattggaggaccaagccgcgacactggagtataagactatcaaggagcatctctcctctaagtcacctaatcacggtgtaaacttagtggagaacctggacagcttgccacccaaagttccacagcgggaagcaagtctgggtcctccaggcgcctctctgtcccagaccggactgtctaaaaggcttgaaatgcaccatagctccagttacggggtggactacaagcgctcttaccccactaatagcttaacgaggtcccaccaggctaccaccttgaagcgtaacaatactaatagctccaattcatctcatctgagccgaaaccaatcgttcggacgcggcgacaatccaccccctgcaccacagcgcgtggattccattcaagtccattcttcgcagccttctgggcaggccgtaaccgtgtcaagacagccaagcctcaacgcttacaacagtcttactaggtcaggactcaaacggacgccctcactgaagcccgatgtgcccccaaagccatcttttgctccactcagcacctctatgaaaccaaatgacgcttgtacctag

SEQ ID NO: 283690 - DNA, 345 bp, Artificial Sequence
  derived and/or modified sequence
atgcggagcgaggccctgctgctgtacttcaccctgctgcacttcgcaggcgcgggcttcccagaggactcagagccaatctcgatttcccacggcaactacacaaagcagtatccagtttttgttggtcataaaccaggacgcaacacaacacagcggcatcggctggatatccaaatgatcatgatcatgaatggtaccctgtacatcgcggctagagaccatatctatacagtggacatcgatacatcccacacagaagagatttattgtagcaagaagctgacttggaagagtcgccaggccgatgtggatacatgccggatgaagggtaagcataagtag

SEQ ID NO: 283691 - DNA, 480 bp, Artificial Sequence
  derived and/or modified sequence
atgcggagcgaggccctgctgctgtacttcaccctgctgcacttcgctggcgccggattccccgaggacagtgagcccatttcaattagtcatggtaattataccaagcagtaccccgtgttcgtcgggcacaagcccggaaggaatacaactcagcggcataggttggatatccagatgatcatgatcatgaatggtacactgtatatcgcagctcgtgatcacatatatactgtagacatcgacacctctcacacagaggagatttactgtagcaaaaagctcacgtggaaaagcagacaggcagatgtggatacatgccggatgaaaggaaaacacaaggacgagtgccacaattttatcaaggtgctgctgaagaagaatgatgatgccttattcgtatgcggaacaaatgctttcaacccctcatgtcggaattacaaaatggacaccctagagcctttcggcgacgaattttag

SEQ ID NO: 283692 - DNA, 1524 bp, Artificial Sequence
  derived and/or modified sequence
atgagcgtgtataactcagagaaatgttcatatgacggagtggaggataaacgtatcatgggcatgcagctggaccgtgcaagctcttcgctgtacgtggcgtttagtacctgcgtgatcaaagtgccgttgggcaggtgtgaaagatatggcaagtgtaaaaagacatgtattgcttcccgggacccctactgtggatggattaaggaaggcggtgcttgttcccacctaagccccaacagccgtctcacattcgagcaggacatcgagaggggaaacaccgatggtctgggagactgtcacaactcattcgtggccttaaacggtgtgattcgggaatcctatctcaagggacatgaccaactcgtcccagtgaccctgctggcgatcgccgtgatccttgcctttgtaatgggtgccgtctttagcggaattacagtctattgtgtctgtgatcacagacgtaaggatgtcgcagtggtgcagcggaaggagaaggaactcacacactcgcgcagaggctcaatgagcagcgttacaaaactgtccggcctgtttggtgatactcagtcgaaggatcccaaaccagaagccattttaacccccctgatgcacaacggtaagctggcaactcccggtaacacggcgaaaatgctgataaaagccgatcaacaccacttggatctgacagccctgccgacccccgaaagcactccaacgctccaacaaaaaaggaaacccagtcgcggtagccgcgaatgggagaggaaccagaacttaattaacgcctgcactaaagatatgcctccgatggggtcacccgtaatcccaacggatctgccattgagggcatccccctcacatattccgagcgtggtggtcctacctatcacacagcaaggataccagcatgaatacgttgatcagcctaaaatgagcgaagtggcacagatggcactggaggatcaggccgcaacactagagtacaagacgatcaaagagcacctgagcagcaaatctcctaatcacggcgtgaacctggtggagaatcttgatagcctgccccctaaggtaccacagcgcgaggcttcgctgggaccacccggtgcctcactgtctcaaacgggtctttccaagaggctagagatgcaccatagttcttcctacggagtggattataagcgatcttaccctacaaactctctgacacggagtcaccaggcaacaacactcaagagaaataatactaactcctccaacagcagccatctgtctcgaaatcaatctttcggtcggggtgacaacccccctccggctccacagagagtggactcgatccaggtgcactcaagccaaccaagtgggcaggccgttacagtgagtcgccaacccagcctgaacgcctacaatagtctgactcggagtgggttgaagcggacaccctctctgaagcccgacgtgccacctaagcccagctttgctccactaagtacttccatgaagcctaatgatgcctgtacatag

SEQ ID NO: 283693 - DNA, 1230 bp, Artificial Sequence
  derived and/or modified sequence
atgaagaacgcgagcccagaaacgcgagaaggggttattagggagtcttacctgaagggtcatgatcagctcgtcccagtgaccttgctggccatcgctgttatcctcgccttcgtgatgggagccgtcttcagtggtattactgtgtattgcgtttgcgaccaccgtagaaaggatgttgccgtagtgcagcgaaaggagaaagaattgacgcactcaagaagaggctctatgtcctcagtgaccaaactcagtgggctgttcggcgacacacagtccaaggacccaaagcccgaagcgatcctcactcccctgatgcataatggcaagttggccacacctgggaatactgcaaagatgctaattaaggctgaccagcaccacctagatctgacagccctgcccacaccggaaagcactccaaccttgcagcagaaaaggaagccctcgcgtggatccagggagtgggagcgtaaccagaacctaatcaacgcctgtaccaaagacatgccccctatgggctcccctgtgatccctaccgatttaccgcttagagctagcccaagccacattccgtctgtcgtggtactgccaatcacacagcaagggtaccagcacgaatatgtcgatcagccgaagatgagcgaagttgcacagatggcacttgaagaccaagccgctaccctggaatacaagacaattaaagagcatctctcttccaagagccctaaccatggggtgaatctcgtggaaaatctggacagtctgcccccaaaagtccctcaacgggaagcctctcttggccctccaggtgcctctctgtctcagacagggctgagtaagaggcttgaaatgcaccattcctcttcctacggtgtggactacaaacgaagttacccaacaaattctctgaccagatctcaccaggccacaacactcaaaagaaacaatacaaatagctctaactcctcacatctttccagaaaccagagctttggaaggggtgacaatccaccacccgcaccacagagggtcgactctatccaagtgcatagtagccagccaagcggccaagcagtgactgtgtctagacagccttctctcaacgcgtacaacagtttgactaggagtgggttaaagagaactccttctttgaagcccgacgttccccctaagcctagcttcgcacccctgagcacaagtatgaaacccaatgatgcgtgcacatag

SEQ ID NO: 283694 - DNA, 345 bp, Artificial Sequence
  derived and/or modified sequence
atgagatccgaggctctcctcctgtacttcactctgctacactttgccggagccggttttcccgaagacagcgaaccaatttcaatctcacatggaaattataccaagcaatacccagttttcgtcggccacaaaccagggaggaacacgacccaacggcaccggctcgacatccagatgatcatgattatgaatggcacgctttatatcgccgcacgcgaccacatctacactgttgacatcgacacctcccacacggaggaaatctactgcagcaagaagctaacctggaaatcccgtcaggctgacgtggacacttgtaggatgaaaggaaaacacaaatag

SEQ ID NO: 283695 - DNA, 480 bp, Artificial Sequence
  derived and/or modified sequence
atgagatcagaagccctgcttctctatttcaccctactgcatttcgctggcgcaggttttccggaggacagcgaacctatttctattagtcacggtaattacaccaagcagtaccccgtctttgtcggccacaaaccgggacgaaataccactcaacggcaccgtctcgatatccagatgatcatgattatgaatggtactctctatattgcagccagagatcacatctatacggtggatattgatactagccataccgaggagatctattgtagcaagaagctcacctggaaatcacgtcaggctgacgtggatacatgcaggatgaagggaaaacacaaggatgaatgccacaacttcattaaggtgctgctgaaaaaaaatgatgacgcactctttgtgtgcgggacaaatgctttcaatccatcctgccggaattataagatggacactcttgaaccattcggagatgaattttag

SEQ ID NO: 283696 - DNA, 2116 bp, Artificial Sequence
  derived and/or modified sequence
catatcagaatcacactgtggtttttctgggatcagagaagggaatcatcttgaagtttttggccagaataggaaatagtggttttctaaatgacagccttttcctggaggagatgagtgtttacaactctgaaaaatgcagctatgatggagtcgaagacaaaaggatcatgggcatgcagctggacagagcaagcagctctctgtatgttgcgttctctacctgtgtgataaaggttccccttggccggtgtgaacgatatgggaagtgtaaaaaaacctgtattgcctccagagacccatattgtggatggataaaggaaggtggtgcctgcagccatttatcacccaacagcagactgacttttgagcaggacatagagcgtggcaatacagatggtctgggggactgtcacaattcctttgtggcactgaatggagtgattcgggaaagttacctcaaaggccacgaccagctggttcccgtcaccctcttggccattgcagtcatcctggctttcgtcatgggggccgtcttctcgggcatcaccgtctactgcgtctgtgatcatcggcgcaaagacgtggctgtggtgcagcgcaaggagaaggagctcacccactcgcgccggggctccatgagcagcgtcaccaagctcagcggcctctttggggacactcaatccaaagacccaaagccggaggccatcctcacgccactcatgcacaacggcaagctcgccactcccggcaacacggccaagatgctcattaaagcagaccagcaccacctggacctgacggccctccccaccccagagtcaaccccaacgctgcagcagaagcggaagcccagccgcggcagccgcgagtgggagaggaaccagaacctcatcaatgcctgcacaaaggacatgccccccatgggctcccctgtgattcccacggacctgcccctgcgggcctcccccagccacatccccagcgtggtggtcctgcccatcacgcagcagggctaccagcatgagtacgtggaccagcccaaaatgagcgaggtggcccagatggcgctggaggaccaggccgccacactggagtataagaccatcaaggaacatctcagcagcaagagtcccaaccatggggtgaaccttgtggagaacctggacagcctgccccccaaagttccacagcgggaggcctccctgggtcccccgggagcctccctgtctcagaccggtctaagcaagcggctggaaatgcaccactcctcttcctacggggttgactataagaggagctaccccacgaactcgctcacgagaagccaccaggccaccactctcaaaagaaacaacactaactcctccaattcctctcacctctccagaaaccagagctttggcaggggagacaacccgccgcccgccccgcagagggtggactccatccaggtgcacagctcccagccatctggccaggccgtgactgtctcgaggcagcccagcctcaacgcctacaactcactgacaaggtcggggctgaagcgtacgccctcgctaaagccggacgtaccccccaaaccatcctttgctcccctttccacatccatgaagcccaatgatgcgtgtacataatcccagggggagggggtcaggtgtcgaaccagcaggcaaggcgaggtgcccgctcagctcagcaaggttctcaactgcctcgagtacccaccagaccaagaaggcctgcggcagagccgaggacgctgggtcctcctctctgggacacaggggtactcacgaaaactgggccgcgtggtttggtgaaggtttgcaacggcggggactcaccttcattctcttccttcactttcccccacaccctacaacaggtcggacccacaaaagacttcagttatcatcacaaacatgagccaaaagcacatacctaccccatcccccacccccacacacacacacacacacacatgcacacaacacatacacacacacgcacagaggtgaacagaaactgaaacattttgtccacaacttcacgggacgtggccagactgggtttgcgttccaacctgcaaaacacaaatacattttttaaaatc

SEQ ID NO: 283697 - DNA, 1678 bp, Artificial Sequence
  derived and/or modified sequence
aattgaagggaggaggacccttaggaaggaaagaaaaagagaatgtacttttcaggctaaggtttctgggttttaaaaccatcacttcagaaatcaaaatattttagcagaaaaacccccatgagaaagcttcaaggtctcggctgtgacaaagacaacatttcagtagaagtttaaggttgcgtgttgtgggcttgggaaggggtagagatctttatttcctttcattctaattctgtgccactgatacctgccagtaaaatacatgaaacatattccagaaagagttgatttagtagatgaaaaatgcgtctcccgagaccagagaaggagtgattcgggaaagttacctcaaaggccacgaccagctggttcccgtcaccctcttggccattgcagtcatcctggctttcgtcatgggggccgtcttctcgggcatcaccgtctactgcgtctgtgatcatcggcgcaaagacgtggctgtggtgcagcgcaaggagaaggagctcacccactcgcgccggggctccatgagcagcgtcaccaagctcagcggcctctttggggacactcaatccaaagacccaaagccggaggccatcctcacgccactcatgcacaacggcaagctcgccactcccggcaacacggccaagatgctcattaaagcagaccagcaccacctggacctgacggccctccccaccccagagtcaaccccaacgctgcagcagaagcggaagcccagccgcggcagccgcgagtgggagaggaaccagaacctcatcaatgcctgcacaaaggacatgccccccatgggctcccctgtgattcccacggacctgcccctgcgggcctcccccagccacatccccagcgtggtggtcctgcccatcacgcagcagggctaccagcatgagtacgtggaccagcccaaaatgagcgaggtggcccagatggcgctggaggaccaggccgccacactggagtataagaccatcaaggaacatctcagcagcaagagtcccaaccatggggtgaaccttgtggagaacctggacagcctgccccccaaagttccacagcgggaggcctccctgggtcccccgggagcctccctgtctcagaccggtctaagcaagcggctggaaatgcaccactcctcttcctacggggttgactataagaggagctaccccacgaactcgctcacgagaagccaccaggccaccactctcaaaagaaacaacactaactcctccaattcctctcacctctccagaaaccagagctttggcaggggagacaacccgccgcccgccccgcagagggtggactccatccaggtgcacagctcccagccatctggccaggccgtgactgtctcgaggcagcccagcctcaacgcctacaactcactgacaaggtcggggctgaagcgtacgccctcgctaaagccggacgtaccccccaaaccatcctttgctcccctttccacatccatgaagcccaatgatgcgtgtacataatcccagggggagggggtcaggtgtcgaaccagcaggcaaggcgaggtgcccgctcagctcagcaaggttctcaactgcctcgagtacccaccagaccaagaaggcctgcggcagagccgaggacgctgggtcctcctctctgggacaca

SEQ ID NO: 283698 - DNA, 538 bp, Artificial Sequence
  derived and/or modified sequence
aacaaataaggcaggaatgggctgtatctgctgttgaccatctcaacgcccaagcctgcctttcctggcttagggaggaggccctgttggggaactgagctttctccatagccagagatttttggttccagggcttcttgacatgaaactcccaaaagggtgaagtagagaaataaagtctccccgctgaactactatgaggtcagaagccttgctgctatatttcacactgctacactttgctggggctggtttcccagaagattctgagccaatcagtatttcgcatggcaactatacaaaacagtatccggtgtttgtgggccacaagccaggacggaacaccacacagaggcacaggctggacatccagatgattatgatcatgaacggaaccctctacattgctgctagggaccatatttatactgttgatatagacacatcacacacggaagaaatttattgtagcaaaaaactgacatggaaatctagacaggccgatgtagacacatgcagaatgaagggaaaacataag

SEQ ID NO: 283699 - DNA, 563 bp, Artificial Sequence
  derived and/or modified sequence
gactcgggctccccaggacaatgtctctttcttcaccaagctgatgggtgaagtagagaaataaagtctccccgctgaactactatgaggtcagaagccttgctgctatatttcacactgctacactttgctggggctggtttcccagaagattctgagccaatcagtatttcgcatggcaactatacaaaacagtatccggtgtttgtgggccacaagccaggacggaacaccacacagaggcacaggctggacatccagatgattatgatcatgaacggaaccctctacattgctgctagggaccatatttatactgttgatatagacacatcacacacggaagaaatttattgtagcaaaaaactgacatggaaatctagacaggccgatgtagacacatgcagaatgaagggaaaacataaggatgagtgccacaactttattaaagttcttctaaagaaaaacgatgatgcattgtttgtctgtggaactaatgccttcaacccttcctgcagaaactataagatggatacattggaaccattcggggatgaattcag

SEQ ID NO: 283700 - protein, 314 aa, Artificial Sequence
  derived and/or modified sequence
MSDNGVCVLAFKCPGLLRYTAYRCKQLSDTSIIAVASHCPLLQKVHVGNQDKLTDEGLKQLGSKCRELKDIHFGQCYKISDEGMIVIAKGCLKLQRIYMQENKLVTDQSVKAFAEHCPELQYVGFMGCSVTSKGVIHLTKLRNLSSLDLRHITELDNETVMEIVKRCKNLSSLNLCLNWIINDRCVEVIAKEGQNLKELYLVSCKITDYALIAIGRYSMTIETVDVGWCKEITDQGATLIAQSSKSLRYLGLMRCDKVRVDYQVVCFLHISIVNSLMSYPLSFSISTPVYYILYIHFICIYAIIAMHCLPAFVN

SEQ ID NO: 283701 - DNA, 3773 bp, Artificial Sequence
  derived and/or modified sequence
gatattttccaatttgtcactggatgagcgttgcctttccgcatcattggtttgcaagtactggcgtgacctttgtttagacttccagttttggaagcagctggatcttagtagtcgtcagcaggtcactgatgaattgttggaaaaaattgcatcaagaagtcagaatataattgaaatcaacatttctgattgtcgcagtatgtctgataatggcgtatgtgttttagcatttaaatgtcctggacttcttaggtatacagcctacaggtgtaaacagctttctgacacctctattattgcggttgcctctcactgtcctttacttcagaaagtgcatgtaggcaaccaggacaaactcactgatgaaggactcaagcagctgggctcaaaatgcagagaactcaaagatattcatttcggccagtgttacaagatctcagatgaaggcatgatcgtcatagctaagggctgtctgaaattacaaaggatatacatgcaggaaaacaaattagtgacagatcagtcagtgaaagcatttgctgaacactgtcctgagcttcaatatgtaggcttcatgggttgttcagtcacttctaaaggagtcattcacctaaccaagctaagaaacctttccagcttggacctacgtcatatcactgaactggataatgaaaccgtgatggaaattgtcaagaggtgcaaaaatcttagctctctcaatctctgtctgaactggatcataaatgacaggtgtgtggaggtcattgcaaaggaaggacaaaacctgaaagagctatatttggtgtcctgtaaaatcacagattatgcactgatagccattgggcgatacagcatgacaatagagactgtggatgtcggatggtgtaaagaaatcacagaccaaggagccaccctgattgcacagagcagcaagtctctgagatatttggggctgatgagatgtgataaagtaagagttgactatcaagttgtttgctttctacatatcagtatagttaatagcttgatgtcatatcctctctccttctctatctccacccccgtgtattatatattatatatacattttatatgtatatatgcaattatagctatgcattgtttgcctgcttttgtaaactaatctgagattatctttgtatttccccacttaataatgaattttgtgcttaagtagaaagaaaaagtaatcatatacatagtcaactagagtttggcatcctattcataagtccatggaccaaaatgtaaaagattacatgacaaactgcaatttgcagggtctaaccgtaaaattgtattctgggtttcaagtttccagcaacagtaaaggtggaaagaacagtgccaaattggtttttcacaagtgtgtaattttggtactgaacatctatgtattctggccattcgggaccaacaaagggccagtaagggggtatgtgggaatttgcatctccccatacatcagatgccactcccagcacatgataagaagtggttccagaggtcctggtggaaggcctgtagaaccagccagggatgtgagcatgagtttaggaaatggtgtagcatttaacgtgggaccctttgaagactgagaaaacagataataaaaatctatactgacacctgtaatcccagcacattgggaggccaaggcagaaggatcacttgagcccaggaatttgagaccagcctggacaacatgggaaaaccctgtctctatccccctctcccccaacaaaaaaaaattagccaggcataatggcacacacctgtagtcccagctactcgggaagctaaggtgggaggatcacctgagctcaagaggccgaggttgcagtgagccgtgattgtgccgcaaccacctcagcctggatgacggagcacgactgtgtcccaaacaaacaaaaaaaacctatactggacaccaggcactccacaggtgttttcttctttgtttattccatgttttacctataacaagtctaagaaatagttatttgcattgtgaaggggagaaaatggaggctcagaaagaccagtcagtggccccaggatactctggcaagacttcatgccgggtctttggagtctgtatccagtgctgctggcacaacccagggggcagtctgtggccacggggactgcttcccttggaaaaggtccagttcagatacttgctcagaaagtgccgccatcttgtactaatttacacatgtgtgctacttttgtaaatggtgattaggaacaaatctagcaaaataatgtgaaactaaatagacacgccattcaaagggcatgcatcttctaaatgtagcaaatgtgggggcaaatgaagtatggcccaaagctcttgtgtcctttgtgattttttgttaattggctaattcttttctccaaacactttagaatcccaacttatacgagacctttgccagctagttatgtttagagaaatgttattatatattctcagcccagcccagaagcgacttactttgtaactaagcaacagcactgagatccggggcttgcgagtctcccacaaatctttccactaaccaacctaatgccgctgctaaccctgccactttaaaatgacttcttttaagacaagttaaagggtccaccataggcatagtcctctagaaacaggaatcaatgacagcagaactcctcagcttccagcagaaggaactgccacatgaatgctaactaaagctaccaaaatgtacacattcatacatatgtgtccgcagccattctcagaaattgtcatatttctaacctgtaatctttagatggttaagatcagctccatcttcggagatacactgtagaagttgtatgttacagttactacaggagaatgttattccagacatatttgctgaccagcattttgctgatttttagttaagaaatgggttattttctacccaaatgcaaattagtccaaaattaaatagagacagtattcagattagctgtatccctgagggttttagcccttttcctgggctgcctctgaatcctttctctaaccagagagccactctgagaacccattggctccagcacgacgccgtctggtcagagcctgctgcagtgcagcccagggagatgctggacccagccttgctgtctggcttcctcagacttaaagcagctcagagccaaacacgagaggctctgtgaggatggaagacagttccaaaccacacacaaagcacaagtaaagccttgcacagaaaagcctgcttgttggtttagttggatggaaatctaaagtagctattcagttttcagattttgtatcatgccatccatctccagattttaagttaccatcaagattcaaaggaagatatgagtaacaaagaaaagaaattagtagcaacggtatggtctgcggagagccagagttcaggttcagatctgggctttgcacttactagttgtgtcaccgcgggcagttactaacctctcagtgcctgttccctcgtttgcaaaatgaggatgatactagtacctatcttgtagaattgtgagcatgtgaatgagttaacatacataaagcacttagaataatgtctattatatataaaatgctctgttactgattagtcttatcatccatatcattatattaacctgtgttgtgatactggaattttccaatgagaaaaaaaaattatattgcctactatcccattttgaaagacaattaaaaagaaaggaaaaaa

SEQ ID NO: 283702 - DNA, 945 bp, Artificial Sequence
  derived and/or modified sequence
atgtcagacaatggggtgtgtgtgttggcctttaaatgtcctggtctgctgaggtatactgcatatcgatgcaaacagctgtctgacaccagtattatcgctgttgcatcccattgccctttactgcagaaggtacacgttgggaaccaggataagcttaccgatgaagggctcaaacaactcggctccaaatgtcgggaattaaaggacatccattttggccagtgctataagatctccgatgaggggatgatagtgattgctaaggggtgtctgaagctgcagcggatatatatgcaggagaacaaactggtgacggatcagtccgtgaaggctttcgcagagcactgccccgaactccagtacgtgggattcatgggttgtagcgttacgtcaaagggggttattcatctcacaaagctgcggaacttgtcgtcgctcgacctccggcacatcactgagctggataacgagacagtcatggaaatcgtgaagagatgtaagaacctcagtagcctcaacctgtgcttgaactggattattaatgaccgctgtgtcgaggttattgctaaagaaggccagaatctgaaggagctttaccttgtgagctgtaaaattacagattatgcccttatcgctattggcaggtattctatgacgatagagacagttgatgtgggttggtgcaaggaaatcactgaccagggcgccacactcattgcgcaatctagtaaatctctgagatatctggggctgatgcggtgcgacaaagttagggtcgattatcaggtggtctgctttctacacattagcattgttaattcactaatgagttaccctcttagcttctcaatttcaacccctgtgtactacattttatacatccacttcatctgcatatacgcgattatagccatgcattgccttcctgcttttgtgaactag

SEQ ID NO: 283703 - DNA, 945 bp, Artificial Sequence
  derived and/or modified sequence
atgtctgacaacggggtgtgtgtgctggccttcaagtgccccggcctgctgcgctacacagcctaccgctgcaagcagctgagtgacaccagcatcatcgctgtggccagccactgccccctgctgcagaaggtgcacgtgggcaaccaggacaagctgacagatgagggcctgaagcagctgggcagcaagtgccgggagctgaaggacatccacttcggccagtgctacaagatcagtgatgagggcatgattgtgattgccaagggctgcctgaagctgcagaggatctacatgcaggagaacaagctggtgacagaccagagcgtgaaggcctttgctgagcactgcccagagctgcagtatgtgggcttcatgggctgcagcgtgaccagcaaaggagtcatccacctgaccaagctgaggaacctgagcagcctggacctgcggcacatcacagagctggacaatgaaacagtgatggagatcgtgaagcgctgcaagaacctgagcagcctgaacctgtgcctgaactggatcatcaatgacagatgtgtggaggtgattgccaaggagggccagaacctgaaggagctgtacctggtgtcctgcaagatcacagattatgccctgattgccatcggccgctacagcatgaccattgaaacagtggatgtgggctggtgcaaggagatcacagaccagggcgccaccctcatcgcccagagcagcaagagcctgcgctacctgggcctgatgagatgtgacaaggtgcgggtggactaccaggtggtgtgcttcctgcacatcagcatcgtgaacagcctgatgagctaccccctgtccttcagcatcagcacccctgtgtactacatcctgtacatccacttcatctgcatctatgccatcatcgccatgcactgcctgcctgcctttgtgaactag

SEQ ID NO: 283704 - DNA, 945 bp, Artificial Sequence
  derived and/or modified sequence
atgagcgacaacggcgtgtgcgtgctggccttcaagtgccccggcttgcttcgctacactgcttaccgctgcaagcaactctccgatacgtcaatcattgctgtggcatcacattgccccctgctgcagaaagtgcatgtgggtaaccaggataagctgaccgacgaggggctcaagcagttaggctctaaatgccgcgagcttaaggacatacatttcggccaatgttacaagatatccgacgagggaatgatagtgatcgctaagggttgtctcaaattacagagaatctacatgcaggagaataaactggtcacagaccaatctgttaaggctttcgctgagcactgtcctgaactccagtatgttgggttcatgggctgtagcgtgacaagcaagggggttatccatcttaccaaactgagaaatctgagtagtctcgatctgaggcacattaccgagctcgacaatgagactgtaatggaaattgtgaagcggtgcaaaaacctgtcatctctaaatctgtgcctgaattggattatcaatgatcgctgcgtcgaagttattgccaaagaggggcagaatcttaaagagctgtatctggtctcctgcaaaatcaccgactacgcactcattgctattgggcgatattctatgactatcgaaactgtggatgtgggctggtgcaaggagataaccgaccagggagcaactctgattgcccagtcgagcaagtccctccgatatttgggacttatgcgctgcgacaaagtgagggtagactatcaagtagtctgctttctgcatatatcgatcgtgaattctctgatgtcctatcctttgagcttcagtatctccacaccagtgtactacatcctttatattcactttatctgtatctacgccatcatcgcgatgcactgcttacccgccttcgtaaactag

SEQ ID NO: 283705 - DNA, 945 bp, Artificial Sequence
  derived and/or modified sequence
atgagcgataacggcgtgtgcgtcctggccttcaagtgccctggtcttctccgctacacagcgtaccgatgtaagcagctgagcgacacatcaatcatagctgtcgccagccactgccctctgctgcagaaagtccatgtcgggaaccaggacaagctgaccgatgaaggcctgaaacaactgggatccaaatgtcgggaactcaaagatatccacttcggacagtgttacaaaatctccgacgagggaatgattgtgatcgccaagggttgcctgaagctgcagaggatttatatgcaggagaataaactggtgactgatcagtcagtgaaagcattcgctgagcattgccccgaattacagtacgttggatttatgggctgttccgtgacaagcaagggtgtaatccacctgaccaaactaaggaatctctcttcgctagatttgaggcacataaccgaactggataacgagacagttatggagattgtgaaaagatgtaaaaatctctcaagtctgaacctttgcctcaactggatcatcaatgatcgctgcgtcgaggtcatagcaaaggagggccagaatctcaaagagttatacctcgtcagctgcaagattacggactatgctctgatagcgattgggagatatagtatgaccatagaaaccgtggatgtcggatggtgtaaagaaataaccgaccagggtgccaccctgatcgctcagagctcaaagtctctgagatatctgggccttatgcgctgtgacaaggtgagggtagattatcaggtggtgtgcttcctgcacatttccatcgtgaatagccttatgtcctaccccctctcatttagcattagcactcccgtgtattacatcctttacatccatttcatctgtatttacgccataattgccatgcactgtctgccagccttcgtcaattag

SEQ ID NO: 283706 - DNA, 945 bp, Artificial Sequence
  derived and/or modified sequence
atgagcgacaacggcgtgtgcgtgctggccttcaagtgccccggcctgctgagatacaccgcctacagatgcaagcagctgagcgacaccagcatcatcgccgtggccagccactgccccctgctgcagaaggtgcacgtgggcaaccaggacaagctgaccgacgagggcctgaagcagctgggcagcaagtgcagagagctgaaggacatccacttcggccagtgctacaagatcagcgacgagggcatgatcgtgatcgccaagggctgcctgaagctgcagagaatctacatgcaggagaacaagctggtgaccgaccagagcgtgaaggccttcgccgagcactgccccgagctgcagtacgtgggcttcatgggctgcagcgtgaccagcaagggcgtgatccacctgaccaagctgagaaacctgagcagcctggacctgagacacatcaccgagctggacaacgagaccgtgatggagatcgtgaagagatgcaagaacctgagcagcctgaacctgtgcctgaactggatcatcaacgacagatgcgtggaggtgatcgccaaggagggccagaacctgaaggagctgtacctggtgagctgcaagatcaccgactacgccctgatcgccatcggcagatacagcatgaccatcgagaccgtggacgtgggctggtgcaaggagatcaccgaccagggcgccaccctgatcgcccagagcagcaagagcctgagatacctgggcctgatgagatgcgacaaggtgagagtggactaccaggtggtgtgcttcctgcacatcagcatcgtgaacagcctgatgagctaccccctgagcttcagcatcagcacccccgtgtactacatcctgtacatccacttcatctgcatctacgccatcatcgccatgcactgcctgcccgccttcgtgaactag

SEQ ID NO: 283707 - protein, 328 aa, Artificial Sequence
  derived and/or modified sequence
MYKANMHFHKLFLSVPTEEPLKQSFTCALQKEILYQGKLFVSENWICFHSKVFGKDTKISIPAFSVTLIKKTKTALLVPNALIIATVTDRYIFVSLLSRDSTYKLLKSVCGHLENTSVGNSPNPSSAENSFRADRPSSLPLDFNDEFSDLDGVVQQRRQDMEGYSSSGSQTPESENSRDFHATESQTVLNVSKGEAKPTRADAHVNRVPEGKAKSLPVQGLSETVGILHKVKSQKCPMLHHILIFYAIVVCALIISTFYMRYRINTLEEQLGLLTSIVDTHNTEQAAPSGLRSQVQFNVEVLCQELTANIVKLEKIQNNLQKLLENGD

SEQ ID NO: 283708 - protein, 371 aa, Artificial Sequence
  derived and/or modified sequence
MTELQQDVEDTKPAKVLGKRESKLGSAHSEAENGVEEKKKACRSPTAQSPTPSVEADSPDQKKIISLCPYLLSKSMLHSGPRYKANMHFHKLFLSVPTEEPLKQSFTCALQKEILYQGKLFVSENWICFHSKVFGKDTKISIPAFSVTLIKKTKTALLVPNALIIATVTDRYIFVSLLSRDSTYKLLKSVCGHLENTSVGNSPNPSSAENSFRADRPSSLPLDFNDEFSDLDGVVQQRRQDMEGYSSSGSQTPESENSRVDFHATESQTVLNVSKGEAKPTRADAHVNRVPEGKAKSLPVQGLSETVGILHKVKSQKCPMLHHILIFYAIVVCALIISTFYMRYRINTLEEQLGLLTSIVDTHNTEQHHLA

SEQ ID NO: 283709 - DNA, 1116 bp, Artificial Sequence
  derived and/or modified sequence
atgaccgagctgcagcaggacgtggaggacaccaagcccgccaaggtgctgggcaagagagagagcaagctgggcagcgcccacagcgaggccgagaacggcgtggaggagaagaagaaggcctgcagaagccccaccgcccagagccccacccccagcgtggaggccgacagccccgaccagaagaagatcatcagcctgtgcccctacctgctgagcaagagcatgctgcacagcggccccagatacaaggccaacatgcacttccacaagctgttcctgagcgtgcccaccgaggagcccctgaagcagagcttcacctgcgccctgcagaaggagatcctgtaccagggcaagctgttcgtgagcgagaactggatctgcttccacagcaaggtgttcggcaaggacaccaagatcagcatccccgccttcagcgtgaccctgatcaagaagaccaagaccgccctgctggtgcccaacgccctgatcatcgccaccgtgaccgacagatacatcttcgtgagcctgctgagcagagacagcacctacaagctgctgaagagcgtgtgcggccacctggagaacaccagcgtgggcaacagccccaaccccagcagcgccgagaacagcttcagagccgacagacccagcagcctgcccctggacttcaacgacgagttcagcgacctggacggcgtggtgcagcagagaagacaggacatggagggctacagcagcagcggcagccagacccccgagagcgagaacagcagagtggacttccacgccaccgagagccagaccgtgctgaacgtgagcaagggcgaggccaagcccaccagagccgacgcccacgtgaacagagtgcccgagggcaaggccaagagcctgcccgtgcagggcctgagcgagaccgtgggcatcctgcacaaggtgaagagccagaagtgccccatgctgcaccacatcctgatcttctacgccatcgtggtgtgcgccctgatcatcagcaccttctacatgagatacagaatcaacaccctggaggagcagctgggcctgctgaccagcatcgtggacacccacaacaccgagcagcaccacctggcctag

SEQ ID NO: 283710 - DNA, 1116 bp, Artificial Sequence
  derived and/or modified sequence
atgaccgagctgcagcaggatgtggaggatacgaagccagcaaaagtcctcgggaagcgagaaagtaaactaggctcagctcacagtgaggccgagaacggagttgaagaaaaaaagaaagcgtgccgatctccgaccgcccaatctccgaccccttccgtcgaagccgactcaccggaccagaagaaaataatttcattatgcccttatctcctatccaaaagtatgctgcacagcggtccacgttacaaagctaacatgcactttcataaactcttcctgagcgttcccacagaagaaccactaaagcagagctttacgtgcgccctgcaaaaagagatcctgtaccaggggaagctgtttgtcagtgagaattggatttgcttccactccaaggtgtttgggaaggatacaaagatatctattcccgccttttcagtgaccctgatcaagaaaacaaagacagcactgttggtgcccaacgctcttatcatcgcaaccgttaccgatagatatatattcgtcagtctgctaagccgggatagtacatacaaattgctgaaatcggtctgcggccacttagaaaataccagcgttggaaacagtcccaatcctagtagcgccgaaaactcctttagagccgatagaccatccagtctcccgctggatttcaatgacgaatttagtgacctggatggagtcgtccagcaaaggcggcaggatatggaaggctattcttcatcgggctcccagacacctgaaagcgaaaactcccgggttgacttccatgcgacggaaagtcagacagtgttgaacgttagcaaaggggaggccaaacctactagggccgacgcacatgtgaaccgtgttccagaaggcaaggctaagtctcttcccgtgcagggtctgagcgaaacagtgggaatcctccacaaagtcaagtcacagaagtgtccaatgctgcaccacatcctcatcttttatgccattgtggtgtgcgcgcttatcatcagcaccttttacatgcggtacagaatcaacactcttgaggaacagctagggctcctgaccagcatcgtggacacacataacacggaacagcaccatttggcctag

SEQ ID NO: 283711 - DNA, 1116 bp, Artificial Sequence
  derived and/or modified sequence
atgacagagctgcagcaggatgtggaggacaccaagccagccaaggtgctgggcaagcgggagagcaagctgggcagcgcccacagcgaggccgagaatggagtggaggagaagaagaaggcctgccgcagccccacagcccagagccccaccccatctgtggaggccgacagcccagaccagaagaagatcatcagcctgtgcccctacctgctgagcaagtccatgctgcacagcggcccccgctacaaggccaacatgcacttccacaagctgttcctgtctgtgcccacagaggagcccctgaagcagagcttcacctgtgccctgcagaaggagatcctgtaccagggcaagctgtttgtgtctgagaactggatctgcttccacagcaaggtgtttgggaaggacaccaagatcagcatcccagccttctctgtgaccctcatcaagaagaccaagacagccctgctggtgcccaatgccctgatcatcgccaccgtgacagaccgctacatctttgtgtccctgctgagccgggacagcacctacaagctgctgaagtctgtgtgtggccacctggagaacacctctgtgggcaacagccccaaccccagcagcgcagaaaattccttccgggctgaccggcccagcagcctgcccctggacttcaatgatgagttcagtgacctggatggagtggtgcagcagaggcggcaggacatggagggctacagcagcagcggcagccagaccccagagagcgagaacagccgggtggacttccacgccacagagagccagacagtgctgaatgtgtccaaaggagaggccaagcccaccagggcagatgcccacgtgaacagagtgcctgagggcaaggccaagagcctgcctgtgcagggcctgtctgagaccgtgggcatcctgcacaaggtgaagagccagaagtgccccatgctgcaccacatcctgatcttctacgccatcgtggtgtgtgccctgatcatcagcaccttctacatgagataccgcatcaacaccctggaggagcagctgggcctgctgaccagcatcgtggacacccacaacacagagcagcaccacctggcctag

SEQ ID NO: 283712 - DNA, 1402 bp, Artificial Sequence
  derived and/or modified sequence
gcggcccggcctggatgcgctgggcggagggtgcaggggagggcacggcgccgcttgcttggcctgcgcacccggacctagaagccgggacgagccggggcagagccaggcgcgcggaagtctgaaggtgccctccagacacggccccgatgactgaactacagcaagatgtggaagacacaaagcctgcgaaagtgctcgggaagagggagagcaaacttggctcagcccactcagaggctgagaatggtgtggaggagaaaaagaaagcctgcaggtcgccaacagcccaatcccctaccccatctgtggaggcggactccccagaccagaagaaaatcattagcctatgcccatatcttctctccaaatctatgcttcattcaggaccaagatacaaggccaatatgcactttcacaagttgtttcttagtgtcccaacggaggaaccactgaagcaaagctttacctgtgctctacagaaagaaatactataccaaggaaagctctttgtatcagaaaactggatttgttttcattccaaagtctttggaaaagacacaaagatctctattccagctttctcggtaaccctaataaagaaaaccaaaactgctcttctagtgccaaacgccctgatcatagcaacagtcacagacaggtacatatttgtctccttactctccagagattcaacttacaaactactaaaatctgtgtgtggacacttagaaaatacaagtgttggtaacagtcccaatccatcttctgctgaaaacagtttccgagcagaccgcccttcatctctgcctctggatttcaatgatgaattctcagatctggatggagtggttcaacaaagaaggcaagacatggaaggatatagcagttctggttctcaaactcctgaatctgagaactctcgagtagatttccatgcgacagaatcccaaacagttctgaatgtctccaagggagaagcaaagccaactcgggcagatgcccatgtgaacagagtacctgaaggaaaagccaagagtctccctgtacagggtctgtcagaaactgttggaatcttacataaagtcaagtctcagaaatgtccgatgcttcaccatattcttatattctatgcaattgttgtctgtgcactaatcatctcgaccttctacatgagatacagaattaatactctggaggagcagctggggttactaacctccattgtggacacccataatactgagcagcaccatctggcctgaggtcacaagtacaattcaatgtggaggttctctgtcaagagcttacagctaacatagtgaaattagaaaagatacaaaataacttacagaagttgcttgagaatggtgactgatcgaccagattgcttgggccatcg

SEQ ID NO: 283713 - DNA, 1116 bp, Artificial Sequence
  derived and/or modified sequence
atgaccgagctgcagcaggacgtggaggacaccaagcccgccaaggtccttgggaaaagggaaagtaagctgggcagcgcccatagtgaagctgagaatggggtggaggagaaaaaaaaggcctgtaggagcccaaccgcccaatcccctaccccatctgtggaggcagatagcccggaccagaaaaaaattattagtctctgtccctacttgctttccaagtccatgctgcactcaggccctcgttacaaagcgaacatgcactttcacaagctgtttctgagtgtccctactgaagaacctctcaagcagtccttcacttgcgctctgcagaaagagatcctgtatcaaggaaaattgttcgtcagcgagaattggatttgcttccactccaaggtgttcggcaaagataccaagatttctatccccgctttctccgttactctcatcaagaaaaccaagaccgccctgctcgtacccaacgcgctgattattgccacagtcaccgacagatatatctttgtgtccctgctcagcagggattccacgtataagcttctgaagtcagtctgtggacatctagaaaacacctctgtgggcaatagccctaaccccagctctgctgagaactcctttcgggccgacagaccatcgagcttgcctttggacttcaacgacgaattctccgacttggacggggtggtgcagcagcgccggcaagacatggaggggtacagcagtagtgggagccagaccccggaatctgaaaattcaagggtcgacttccatgctactgagtctcagacggtgcttaatgtcagtaagggcgaggctaagccaactcgtgcagatgctcatgtcaatcgcgtgcccgaagggaaggctaaatctctgcccgttcaaggcctgagtgagaccgtgggaatattacacaaagtcaaatcacaaaagtgcccaatgttacaccatatcttaatcttctacgccatcgtagtgtgtgccctcattatcagtactttttatatgagatacagaataaatactcttgaggagcaattgggactgctcacttccatcgtggatacccacaatactgaacagcaccacctggcctag

SEQ ID NO: 283714 - DNA, 1116 bp, Artificial Sequence
  derived and/or modified sequence
atgactgaactacagcaggacgtggaggataccaagcctgccaaggtgttaggcaagagggaatccaaactggggtccgcccatagcgaggctgagaacggagtggaggagaaaaaaaaggcctgccggtcccccacggcacagtcccctacaccgtccgtcgaggccgatagtcctgaccagaaaaaaattataagcctctgcccatacttactcagcaagtccatgcttcactctgggcctagatacaaggctaatatgcacttccacaaactgttcctgagtgtgccgacagaagagcccctgaagcagtcttttacttgcgctctgcagaaagaaatcttataccagggcaaacttttcgtgagcgagaactggatttgcttccactcgaaggtgttcgggaaggataccaaaatctccataccagcatttagcgtaacactcatcaagaagactaaaaccgctctactggtgccgaatgcgctgattattgctaccgtcacagacaggtatattttcgtgagtctgctgtcgagggattctacctacaaactcttgaagtccgtttgtggccacctcgagaacacaagcgtgggcaactcaccgaacccctcctctgcagagaacagcttccgcgctgacagacccagtagcctgcctctcgattttaatgacgagttcagcgatcttgacggcgtggtgcagcagcgtcgacaggacatggaggggtacagctcttcaggatctcaaacccccgaaagcgagaactcccgcgtggactttcacgccaccgagagccagacagtgctcaacgtctcgaagggcgaggccaagcctacccgggcagacgcacacgtgaatcgcgttcccgaaggaaaagctaaaagtttgccagttcagggcctctccgagacagtcggtattctgcacaaggtgaagtcacaaaagtgtcccatgctccatcatattttgatattttacgcaattgttgtgtgtgcactgattataagcaccttctacatgagatacagaattaacaccctcgaggagcaattggggttgctcaccagtatcgtggacacacataatacggagcaacaccatctggcctag

SEQ ID NO: 283715 - protein, 283 aa, Artificial Sequence
  derived and/or modified sequence
MAVPPTYADLGKSARDVFTKGYGFGLIKLDLKTKSENGLEFTSSGSANTETTKVTGSLETKYRWTEYGLTFTEKWNTDNTLGTEITVEDQLARGLKLTFDSSFSPNTGKKNAKIKTGYKREHINLGCDMDFDIAGPSIRGALVLGYEGWLAGYQMNFETAKSRVTQSNFAVGYKTDEFQLHTNVNDGTEFGGSIYQKVNKKLETAVNLAWTAGNSNTRFGIAAKYQIDPDACFSAKVNNSSLIGLGYTQTLKPGIKLTLSALLDGKNVNAGGHKLGLGLEFQA

SEQ ID NO: 283716 - DNA, 852 bp, Artificial Sequence
  derived and/or modified sequence
atggccgtgccccccacctacgccgacctgggcaagagcgccagagacgtgttcaccaagggctacggcttcggcctgatcaagctggacctgaagaccaagagcgagaacggcctggagttcaccagcagcggcagcgccaacaccgagaccaccaaggtgaccggcagcctggagaccaagtacagatggaccgagtacggcctgaccttcaccgagaagtggaacaccgacaacaccctgggcaccgagatcaccgtggaggaccagctggccagaggcctgaagctgaccttcgacagcagcttcagccccaacaccggcaagaagaacgccaagatcaagaccggctacaagagagagcacatcaacctgggctgcgacatggacttcgacatcgccggccccagcatcagaggcgccctggtgctgggctacgagggctggctggccggctaccagatgaacttcgagaccgccaagagcagagtgacccagagcaacttcgccgtgggctacaagaccgacgagttccagctgcacaccaacgtgaacgacggcaccgagttcggcggcagcatctaccagaaggtgaacaagaagctggagaccgccgtgaacctggcctggaccgccggcaacagcaacaccagattcggcatcgccgccaagtaccagatcgaccccgacgcctgcttcagcgccaaggtgaacaacagcagcctgatcggcctgggctacacccagaccctgaagcccggcatcaagctgaccctgagcgccctgctggacggcaagaacgtgaacgccggcggccacaagctgggcctgggcctggagttccaggcctag

SEQ ID NO: 283717 - DNA, 852 bp, Artificial Sequence
  derived and/or modified sequence
atggctgtgccaccaacctacgcagatcttggcaaatccgcaagggacgtgtttacaaaaggatacgggttcggactgatcaaacttgacttaaaaaccaagtccgagaatgggctcgagttcaccagttccggatccgctaatacagagaccacgaaagtgactggatctttggaaaccaagtaccgatggactgagtatggtttgaccttcactgagaagtggaataccgataacactctgggaacagaaattaccgtcgaggatcagcttgctagagggctgaagttgacattcgactctagtttttcaccaaatactggcaagaagaacgcaaagatcaaaaccggttacaaacgcgaacatatcaaccttggctgtgacatggattttgacattgcagggccatctattcgtggcgccctggttctgggatacgagggatggctggccggttatcagatgaattttgagacagccaagagtcgagttacacaatccaacttcgctgtcgggtacaagaccgacgagtttcagctgcatacaaacgtcaatgatggtaccgaatttggcggttctatctatcagaaagttaataagaagctggaaaccgcagtgaatttggcctggacagcaggaaacagtaatacaaggtttgggattgcggctaaatatcagatagacccggatgcctgcttttctgcaaaagtgaataattccagcctgattggactgggctacacccaaacgctaaagccaggcatcaagctcaccctttcggctctgctcgatggtaagaacgtcaatgccggcgggcataaacttggactcggcctggagttccaggcctag

SEQ ID NO: 283718 - DNA, 852 bp, Artificial Sequence
  derived and/or modified sequence
atggctgtgcctcccacatacgctgaccttggcaagagtgcacgggacgtattcaccaaagggtatggctttgggctcataaagctcgacctaaaaactaagtccgaaaatggcctagaattcacgagctcaggatctgccaacacggagacaacaaaggtaacggggagtctggagacaaaatacagatggaccgagtatggcttgaccttcaccgaaaaatggaacaccgataacaccctgggcacagaaattacagtcgaggatcagctcgcccgaggtttgaagctgacctttgactcttcgttttccccgaacacaggaaaaaaaaatgcgaaaattaaaacgggatacaaacgcgaacatataaatctgggatgtgatatggacttcgacatcgccggccccagtatccggggagcattggttttgggctatgaagggtggctcgctgggtaccagatgaacttcgagacagctaagagtagggttactcagtcgaatttcgcagtgggatataaaactgacgaattccagctgcacactaatgtaaatgacggtacagagtttggcgggagcatatatcagaaagtgaataaaaagctcgagacagccgttaatctcgcctggactgctggtaacagcaacacaagattcggcatcgccgctaagtatcagattgacccggatgcatgtttttctgcaaaagtgaacaactctagcctcatcggtctgggctacacacagaccctcaaaccaggaatcaagctcacgctgtcggcactgctggacggaaagaatgttaacgccggggggcataaactgggcctcggcctggaattccaggcctag

SEQ ID NO: 283719 - DNA, 852 bp, Artificial Sequence
  derived and/or modified sequence
atggccgtgcctccaacatatgctgacctggggaagtcggcaagagatgtgtttactaagggttatggcttcggcctgattaagctggatttaaagaccaagagtgagaatggcctggaattcaccagcagtggaagtgctaataccgagaccaccaaggtgactggatcattagaaactaaatacaggtggaccgagtatggtctgacttttactgaaaaatggaacacagataatactctggggacagagattacggtcgaggatcaattggctcgcggattgaaactgactttcgactcttccttcagcccaaacactggcaagaagaacgcgaagataaagaccgggtacaaacgcgagcacatcaacctgggctgcgacatggacttcgatatcgccggcccgtccatcaggggggctctggtgctggggtacgaaggatggttagccggctatcaaatgaactttgagacagctaaaagcagagtcacgcagtccaatttcgcggtgggctacaaaaccgatgaattccagttgcacactaacgtcaacgatggtacagagttcggtggctctatctaccagaaggtgaacaaaaaacttgaaactgcagtaaacctagcttggactgccggcaattcaaatacgcgcttcgggatcgccgcaaagtatcaaatcgatccagacgcctgctttagcgcaaaagttaacaactccagtctcatcggactgggctacactcaaacactaaagcccgggatcaagttaactctctctgccctgctcgacgggaaaaatgtcaatgcaggggggcacaagcttggcctggggctcgagttccaggcatag

SEQ ID NO: 283720 - DNA, 852 bp, Artificial Sequence
  derived and/or modified sequence
atggctgtgccccccacctacgccgacctgggcaagagcgccagagatgtgttcaccaagggctacggcttcggcctcatcaagctggacctgaagaccaagtcagaaaatggcctggagttcaccagcagcggcagcgccaacacagagaccaccaaggtgacaggcagcctggagaccaagtaccgctggacagaatatggcctgaccttcacagagaagtggaacacagacaacaccctgggcacagagatcaccgtggaggaccagctggcccggggcctgaagctgacctttgacagcagcttcagccccaacacaggcaagaagaatgccaagatcaagacaggctacaagcgggagcacatcaacctgggctgtgacatggactttgatattgctggccccagcatccggggggccctggtgctgggctatgagggctggctggccggctaccagatgaactttgaaacagccaagagccgggtgacccagagcaactttgctgtgggctacaagacagatgagttccagctgcacaccaacgtgaatgatggaacagaatttggaggcagcatctaccagaaggtgaacaagaagctggagacagctgtgaacctggcctggacagctggcaacagcaacaccaggtttggaattgctgccaagtaccagattgatcctgatgcctgcttcagcgccaaggtgaacaacagcagcctgattggcctgggctacacccagaccctgaagccaggcatcaagctgaccctgagcgccctgctggatggcaagaatgtgaatgctgggggccacaagctgggcctgggcctggagttccaggcctag

SEQ ID NO: 283721 - DNA, 852 bp, Artificial Sequence
  derived and/or modified sequence
atggccgtgccccccacctacgccgacctgggcaagagcgcccgggacgtgtttacaaaaggatacggatttggactgattaagttggacctgaagaccaagtccgagaacggattggaattcaccagctctggatctgcaaacacagagacaactaaggtgaccggatctctcgagacgaaatacaggtggactgagtacggccttacctttaccgaaaaatggaacacagataacactcttgggacagagattactgttgaggaccagctggcacgagggcttaaattgacatttgattctagcttttctcccaacaccggtaaaaaaaacgcgaaaatcaagaccggctacaagcgcgaacatatcaatttgggatgtgacatggactttgatatagctgggccttccatcagaggcgctctcgttcttgggtacgaaggctggctggctggctatcaaatgaattttgagacagctaaatctcgagtgacccaatccaactttgccgtgggctacaagacagacgagttccaactgcacactaacgtcaacgacggcactgagttcggtggctctatttatcaaaaagtaaacaagaaattggagacagcagtaaatctggcttggactgctggaaactccaatacaagatttggaattgcggccaagtaccagatcgaccccgacgcatgctttagtgctaaggtgaataacagcagcctcatcgggctggggtatacgcagaccttgaaacccggcattaagctcacactgtcggccctgcttgatgggaaaaacgtgaacgcaggcggccataagcttggcctgggcctcgagtttcaggcatag

SEQ ID NO: 283722 - DNA, 852 bp, Artificial Sequence
  derived and/or modified sequence
atggccgtgccccccacctacgccgacctgggcaagagcgcccgggatgtctttactaagggatatggctttgggctcatcaagctggatctcaagaccaaatctgaaaacggattggagtttactagcagtgggagcgcaaacactgagactacaaaagtaacaggatccctggaaactaaatacagatggacggaatacgggctgactttcacagaaaaatggaacacagacaatacattggggaccgagataacggtggaagatcaacttgcaagagggctgaaactaacctttgactcttcttttagtcctaacacagggaagaagaatgccaagattaaaactgggtataaaagggagcatattaatcttggctgtgacatggacttcgatattgccggtccaagtattcggggagccctggtcctcggctacgaagggtggttggccggctaccagatgaactttgagaccgctaaatctcgcgtcacccagtccaattttgccgtggggtataaaactgatgaattccagctccatacaaacgtgaacgatgggactgagtttggaggctcaatctatcaaaaagtgaacaaaaagcttgaaactgcagtgaacctcgcctggaccgcaggcaatagcaataccagattcggtatcgccgccaagtaccagatcgaccctgacgcctgcttcagcgctaaagtgaacaactctagtttaattggccttggttatactcaaaccctgaaaccagggatcaaacttactttatctgccctattagacggcaagaacgttaacgccggtggccacaagctgggcctggggctggagttccaggcgtag

SEQ ID NO: 283723 - DNA, 852 bp, Artificial Sequence
  derived and/or modified sequence
atggccgtgccccccacctacgccgacctgggcaagagcgcccgggacgtgttcacaaaaggttacggctttggacttattaagctggatctaaagaccaagtccgagaacgggctcgagttcacttcgagtggttcagccaataccgaaactacaaaagtaacgggatctctggaaacaaaatacaggtggaccgagtacggcctgacattcaccgagaagtggaatactgacaataccctgggcacagaaatcacagttgaagatcaactcgccaggggcttgaaactaacattcgattcgtcctttagcccaaacaccgggaaaaaaaatgctaagattaagacaggctataagagagagcacataaatttgggctgcgatatggacttcgatatcgctggtccctccattagaggtgcactggtcctgggttatgaaggctggctggctggttaccagatgaattttgagacggcaaaatctagggtcacacagagcaattttgccgttgggtataaaactgacgagttccagctccacacgaacgtcaacgatggcactgagtttggaggaagcatttaccagaaagttaacaaaaagctggaaactgccgttaacctcgcatggactgcaggaaacagtaatacacggtttggaattgctgctaagtatcagattgacccagacgcctgcttctctgcgaaagtgaacaacagcagccttatcggccttgggtatacacagacactgaagcctggcattaaactcacgctctctgcccttcttgatggcaaaaacgtgaatgccggtggccataaactcggcctgggcttagagtttcaggcctag

SEQ ID NO: 283724 - DNA, 852 bp, Artificial Sequence
  derived and/or modified sequence
atggcagttccgccaacctatgctgatctgggaaaaagcgcccgagatgtcttcaccaaagggtatggctttgggctcatcaagttagaccttaaaacgaaaagcgaaaacggacttgaatttacttcctccggctctgctaacacagagacgactaaggtcactggaagtctggagacaaagtaccggtggaccgaatatggtctcacattcaccgagaagtggaacacagacaacacacttggcacagaaattacagtcgaagaccaattagccagaggactcaagttaacgtttgactcaagcttttctcccaacactggtaaaaaaaatgctaagattaaaaccggctataagagagagcacatcaacctgggctgtgatatggatttcgacatcgcgggacctagtattcggggtgccctggtgctaggttacgaaggatggctagccggataccagatgaactttgagacggccaaaagtagagtcactcagtctaacttcgccgtcggttataaaactgatgaatttcagttgcacacaaacgtcaatgacggaacggagtttggaggttctatttaccagaaagtgaacaaaaagctagagacagcggtgaatctggcttggaccgccggtaacagcaatactcgcttcggcatagcagccaaataccagatcgatcccgatgcttgctttagtgctaaagtgaataactcatctctgattggcctaggatatactcagactctgaaaccgggtatcaagttaacgctgtccgcccttctggacggcaagaacgttaatgcagggggtcataaactggggctggggctggagttccaagcgtag

SEQ ID NO: 283725 - DNA, 852 bp, Artificial Sequence
  derived and/or modified sequence
atggccgtgcctccgacatacgcagatctcggcaagagcgcccgagatgtttttactaagggttacggtttcggtcttattaagttggacctgaagaccaaatctgagaatggactggaatttacaagctcagggtccgcaaataccgagactaccaaagtcactggctctctggaaaccaagtaccggtggacagagtatggccttaccttcacggaaaaatggaacactgataacaccttaggcaccgagataactgtggaggatcagctcgccaggggtctcaagctcacttttgactcctctttttcgcccaacacaggtaagaagaacgccaaaatcaagaccggctataagcgggagcatatcaacctgggatgtgatatggactttgacatcgctgggccaagcattcggggagccctggtcctgggttacgaggggtggctcgcagggtatcagatgaattttgagactgccaaaagcagggtgactcagtctaattttgcagtgggctataaaactgacgagtttcagctgcacaccaacgtgaacgatggaactgaatttgggggaagcatctatcaaaaagttaacaagaaactggaaacagccgtaaatttagcgtggaccgctgggaactccaatactagattcggcattgctgcaaaataccagatagaccccgacgcttgtttctccgccaaggtaaataattcctcattgatcgggctggggtatacccagaccctaaagccaggaattaagctgactctctccgctctgctcgatggtaagaacgtgaatgccggagggcataagctgggcctggggttggagttccaggcctag

SEQ ID NO: 283726 - DNA, 852 bp, Artificial Sequence
  derived and/or modified sequence
atggctgtaccgcctacatatgcggatctagggaagagcgcccgagacgttttcaccaaaggatacggttttggtctgatcaaactagacttaaagaccaagagcgagaacggacttgagttcaccagctcaggctctgcgaacactgagacaacaaaagtcactggcagcctagagacaaagtaccgctggacggaatatggcctaacgttcacagaaaaatggaacactgataataccctgggcaccgagattactgtagaggatcagctagccagaggattgaaactgacttttgactcttccttttcacctaacaccggcaagaagaacgctaaaattaagaccggatataaacgggagcatatcaacttaggttgcgacatggacttcgacatcgccggtcccagcattaggggcgcactggtgctgggatacgagggctggctcgctggctaccaaatgaatttcgaaacggccaagtccagagtaacacagagtaatttcgcggttgggtataaaaccgacgaatttcagctccatactaatgttaacgacggtactgaatttggcggtagcatctaccagaaggttaataaaaagctcgaaaccgctgttaatttggcttggactgccggaaattccaataccagattcggcatcgccgcaaagtaccaaatcgatcctgacgcatgcttttctgctaaagtaaataactctagcttgatcggactagggtacacacaaacgctgaagcccggaatcaaattaacactgtctgctctgctggatgggaaaaacgtcaatgcaggcggacacaaactgggtctgggacttgagttccaggcttag

SEQ ID NO: 283727 - DNA, 1953 bp, Artificial Sequence
  derived and/or modified sequence
attagcgcagggacctccgggccacagctcagagaatcggaaggcctcctcccccttcccgagcgctgccactggggccgaggtttccagcaagaacccgcgtgtccctgcgcacgcacacacggtgcacacgtcagtccggcgcctccccgtgccccgactcacgcaggtcctcccgcgcgcccgcaacacgcccgcaggctcctgtgtctgctgccggggcagcggggcccggaaggcagaagatggctgtgccacccacgtatgccgatcttggcaaatctgccagggatgtcttcaccaagggctatggatttggcttaataaagcttgatttgaaaacaaaatctgagaatggattggaatttacaagctcaggctcagccaacactgagaccaccaaagtgacgggcagtctggaaaccaagtacagatggactgagtacggcctgacgtttacagagaaatggaataccgacaatacactaggcaccgagattactgtggaagatcagcttgcacgtggactgaagctgaccttcgattcatccttctcacctaacactgggaaaaaaaatgctaaaatcaagacagggtacaagcgggagcacattaacctgggctgcgacatggatttcgacattgctgggccttccatccggggtgctctggtgctaggttacgagggctggctggccggctaccagatgaattttgagactgcaaaatcccgagtgacccagagcaactttgcagttggctacaagactgatgaattccagcttcacactaatgtgaatgacgggacagagtttggcggctccatttaccagaaagtgaacaagaagttggagaccgctgtcaatcttgcctggacagcaggaaacagtaacacgcgcttcggaatagcagccaagtatcagattgaccctgacgcctgcttctcggctaaagtgaacaactccagcctgataggtttaggatacactcagactctaaagccaggtattaaactgacactgtcagctcttctggatggcaagaacgtcaatgctggtggccacaagcttggtctaggactggaatttcaagcataaatgaatactgtacaattgtttaattttaaactattttgcagcatagctaccttcagaatttagtgtatcttttaatgttgtatgtctgggatgcaagtattgctaaatatgttagccctccaggttaaagttgattcagctttaagatgttacccttccagaggtacagaagaaacctatttccaaaaaaggtcctttcagtggtagactcggggagaacttggtggcccctttgagatgccaggtttcttttttatctagaaatggctgcaagtggaagcggataatatgtaggcactttgtaaattcatattgagtaaatgaatgaaattgtgatttcctgagaatcgaaccttggttccctaaccctaattgatgagaggctcgctgcttgatggtgtgtacaaactcacctgaatgggacttttttagacagatcttcatgacctgttcccaccccagttcatcatcatctcttttacaccaaaaggtctgcagggtgtggtaactgtttcttttgtgccattttggggtggagaaggtggatgtgatgaagccaataattcaggacttattccttcttgtgttgtgtttttttttggcccttgcaccagagtatgaaatagcttccaggagctccagctataagcttggaagtgtctgtgtgattgtaatcacatggtgacaacactcagaatctaaattggacttctgttgtattctcaccactcaatttgttttttagcagtttaatgggtacattttagagtcttccattttgttggaattagatcctccccttcaaatgctgtaattaacaacacttaaaaaacttgaataaaatattgaaacctca

SEQ ID NO: 283728 - DNA, 1807 bp, Artificial Sequence
  derived and/or modified sequence
gccgctcgctcggctccgctccctggctcggctccctgcctccgcgtcgcagcccccgccgtagccgcctccgagcccgccgccacatcctctgagaagatggctgtgccacccacgtatgccgatcttggcaaatctgccagggatgtcttcaccaagggctatggatttggcttaataaagcttgatttgaaaacaaaatctgagaatggattggaatttacaagctcaggctcagccaacactgagaccaccaaagtgacgggcagtctggaaaccaagtacagatggactgagtacggcctgacgtttacagagaaatggaataccgacaatacactaggcaccgagattactgtggaagatcagcttgcacgtggactgaagctgaccttcgattcatccttctcacctaacactgggaaaaaaaatgctaaaatcaagacagggtacaagcgggagcacattaacctgggctgcgacatggatttcgacattgctgggccttccatccggggtgctctggtgctaggttacgagggctggctggccggctaccagatgaattttgagactgcaaaatcccgagtgacccagagcaactttgcagttggctacaagactgatgaattccagcttcacactaatgtgaatgacgggacagagtttggcggctccatttaccagaaagtgaacaagaagttggagaccgctgtcaatcttgcctggacagcaggaaacagtaacacgcgcttcggaatagcagccaagtatcagattgaccctgacgcctgcttctcggctaaagtgaacaactccagcctgataggtttaggatacactcagactctaaagccaggtattaaactgacactgtcagctcttctggatggcaagaacgtcaatgctggtggccacaagcttggtctaggactggaatttcaagcataaatgaatactgtacaattgtttaattttaaactattttgcagcatagctaccttcagaatttagtgtatcttttaatgttgtatgtctgggatgcaagtattgctaaatatgttagccctccaggttaaagttgattcagctttaagatgttacccttccagaggtacagaagaaacctatttccaaaaaaggtcctttcagtggtagactcggggagaacttggtggcccctttgagatgccaggtttcttttttatctagaaatggctgcaagtggaagcggataatatgtaggcactttgtaaattcatattgagtaaatgaatgaaattgtgatttcctgagaatcgaaccttggttccctaaccctaattgatgagaggctcgctgcttgatggtgtgtacaaactcacctgaatgggacttttttagacagatcttcatgacctgttcccaccccagttcatcatcatctcttttacaccaaaaggtctgcagggtgtggtaactgtttcttttgtgccattttggggtggagaaggtggatgtgatgaagccaataattcaggacttattccttcttgtgttgtgtttttttttggcccttgcaccagagtatgaaatagcttccaggagctccagctataagcttggaagtgtctgtgtgattgtaatcacatggtgacaacactcagaatctaaattggacttctgttgtattctcaccactcaatttgttttttagcagtttaatgggtacattttagagtcttccattttgttggaattagatcctccccttcaaatgctgtaattaacaacacttaaaaaacttgaataaaatattgaaacctca

SEQ ID NO: 283729 - DNA, 1873 bp, Artificial Sequence
  derived and/or modified sequence
gtcccgggcggggcctgggggcggagcgcgccgggccgggcgcgcaggaggggaggcgggtccgcgccgccgccgtccgcgccgccccgcccttggcccagccgctcgctcggctccgctccctggctcggctccctgcctccgcgtcgcagcccccgccgtagccgcctccgagcccgccgccacatcctctgagcagaagatggctgtgccacccacgtatgccgatcttggcaaatctgccagggatgtcttcaccaagggctatggatttggcttaataaagcttgatttgaaaacaaaatctgagaatggattggaatttacaagctcaggctcagccaacactgagaccaccaaagtgacgggcagtctggaaaccaagtacagatggactgagtacggcctgacgtttacagagaaatggaataccgacaatacactaggcaccgagattactgtggaagatcagcttgcacgtggactgaagctgaccttcgattcatccttctcacctaacactgggaaaaaaaatgctaaaatcaagacagggtacaagcgggagcacattaacctgggctgcgacatggatttcgacattgctgggccttccatccggggtgctctggtgctaggttacgagggctggctggccggctaccagatgaattttgagactgcaaaatcccgagtgacccagagcaactttgcagttggctacaagactgatgaattccagcttcacactaatgtgaatgacgggacagagtttggcggctccatttaccagaaagtgaacaagaagttggagaccgctgtcaatcttgcctggacagcaggaaacagtaacacgcgcttcggaatagcagccaagtatcagattgaccctgacgcctgcttctcggctaaagtgaacaactccagcctgataggtttaggatacactcagactctaaagccaggtattaaactgacactgtcagctcttctggatggcaagaacgtcaatgctggtggccacaagcttggtctaggactggaatttcaagcataaatgaatactgtacaattgtttaattttaaactattttgcagcatagctaccttcagaatttagtgtatcttttaatgttgtatgtctgggatgcaagtattgctaaatatgttagccctccaggttaaagttgattcagctttaagatgttacccttccagaggtacagaagaaacctatttccaaaaaaggtcctttcagtggtagactcggggagaacttggtggcccctttgagatgccaggtttcttttttatctagaaatggctgcaagtggaagcggataatatgtaggcactttgtaaattcatattgagtaaatgaatgaaattgtgatttcctgagaatcgaaccttggttccctaaccctaattgatgagaggctcgctgcttgatggtgtgtacaaactcacctgaatgggacttttttagacagatcttcatgacctgttcccaccccagttcatcatcatctcttttacaccaaaaggtctgcagggtgtggtaactgtttcttttgtgccattttggggtggagaaggtggatgtgatgaagccaataattcaggacttattccttcttgtgttgtgtttttttttggcccttgcaccagagtatgaaatagcttccaggagctccagctataagcttggaagtgtctgtgtgattgtaatcacatggtgacaacactcagaatctaaattggacttctgttgtattctcaccactcaatttgttttttagcagtttaatgggtacattttagagtcttccattttgttggaattagatcctccccttcaaatgctgtaattaac

SEQ ID NO: 283730 - protein, 81 aa, Artificial Sequence
  derived and/or modified sequence
MLDSCKLKSACNLPFICNKKIINTAGTSNAEVPLADPGMYQLDITLRRGQSLAARDRGGTSDPYVKFKIGGKEVFRSKIIH

SEQ ID NO: 283731 - protein, 306 aa, Artificial Sequence
  derived and/or modified sequence
MKKDEPPLDFPDTLEGFEYAFNEKGQLRHIKTGEPFVFNYREDLHRWNQKRYEALGEIITKYVYELLEKDCNLKKVSIPEGYGVIVLNPNENYIEVEKPKIHVQSSSDSSDEPAEKRERKDKVSKETKKRRDFYEKYRNPQREKEMMQLYIRENGSPEEHAIYVWDHFIAQAAAENVFFVAHSYGGLAFVELMIQREADVKNKVTAVALTDSVHNVWHQEAGKTIREWMRENCCNWVSSSEPLDTSVESMLPDCPRVSAGTDRHELTSWKSFPSIFKFFTEASEAKTSSLKPAVTRRSHRIKHEEL

SEQ ID NO: 283732 - DNA, 1387 bp, Artificial Sequence
  derived and/or modified sequence
gcaactcgaacttggtcggggcgcggatcccgagagggaaagtcataacaaccgcacgagggagttcgactggcgaactggaaggccacgcctcctcccgcctgccccctcagccctgtggctgggggcagagctcagatttattatctaggatagatttggatgaactaatgaaaaaagatgaaccgcctcttgattttcctgataccctggaaggatttgaatatgcttttaatgaaaagggacagttaagacacataaaaactggggaaccatttgtttttaactaccgggaagatttacacagatggaaccagaaaagatacgaggctctaggagagatcatcacgaagtatgtatatgagctcctggaaaaggattgtaatttgaaaaaagtatctattccagaaggatatggagtaatagtactaaatcccaatgaaaactatattgaagtagaaaagccgaagatacacgtacagtcatcatctgatagttcagatgaaccagcagaaaaacgggaaagaaaagataaagtttctaaagaaacaaagaagcgacgtgatttctatgagaagtatcgtaacccccaaagagaaaaagaaatgatgcaattgtatatcagagaaaatggttctcctgaagaacatgcaatctatgtttgggatcatttcatagctcaggctgctgctgagaatgtgtttttcgttgctcacagctatggaggacttgcttttgttgaactgatgattcaacgagaagccgatgtaaaaaataaggtaactgctgtggcattgacagactctgttcacaatgtgtggcatcaagaagctggcaaaacgattcgagaatggatgagagagaactgttgtaattgggtctctagctcagaaccattagacacatcagtggagtccatgctacctgattgcccccgggtctcagcaggcaccgaccgtcacgagctaacttcctggaagagctttccgtctattttcaaattctttaccgaagcctcagaggccaagaccagctccctgaagccggctgtgacgcgccgctcccaccgcatcaagcacgaagagctgtaagaggagcgagcgcgacgggggaggccgccctggcgcacccacccgcacgcctcctcactgcttgtgtcgagcggactcccagcccctcattagattgttttcttcccagagcccagggtcgtgatatatacatctaaatagcgttttgcattatttctagatgagtgcaactgtcaaagcaatatgggttcactggtcgtgcttcctgcgggctgagcgcgggctgagcgctgccagtcagcgctcacattaaggctgacagcgccctgcctggctcggccggcgaagctctaatt

SEQ ID NO: 283733 - protein, 535 aa, Artificial Sequence
  derived and/or modified sequence
MKLWVSALLMAWFGVLSCVQAEFFTSIGHMTDLIYAEKELVQSLKEYILVEEAKLSKIKSWANKMEALTSKSAADAEGYLAHPVNAYKLVKRLNTDWPALEDLVLQDSAAGFIANLSVQRQFFPTDEDEIGAAKALMRLQDTYRLDPGTISRGELPGTKYQAMLSVDDCFGMGRSAYNEGDYYHTVLWMEQVLKQLDAGEEATTTKSQVLDYLSYAVFQLGDLHRALELTRRLLSLDPSHERAGGNLRYFEQLLEEEREKTLTNQTEAELATPEGIYERPVDYLPERDVYESLCRGEGVKLTPRRQKRLFCRYHHGNRAPQLLIAPFKEEDEWDSPHIVRYYDVMSDEEIERIKEIAKPKLARATVRDPKTGVLTVASYRVSKSSWLEEDDDPVVARVNRRMQHITGLTVKTAELLQVANYGVGGQYEPHFDFSRNDERDTFKHLGTGNRVATFLNYMSDVEAGGATVFPDLGAAIWPKKGTAVFWYNLLRSGEGDYRTRHAACPVLVGCKWVSNKWFHERGQEFLRPCGSTEVD

SEQ ID NO: 283734 - protein, 50 aa, Artificial Sequence
  derived and/or modified sequence
MKLWVSALLMAWFGVLSCVQAEFFTSIGHMTDLIYAEKELVQSLKEYILV

SEQ ID NO: 283735 - DNA, 1608 bp, Artificial Sequence
  derived and/or modified sequence
atgaaactatgggtgagcgcgttgctaatggcatggttcggcgtgttgagctgtgttcaggctgagttttttaccagcataggtcacatgaccgacctgatttatgccgaaaaggagctggttcaaagcctcaaggaatacatcctcgtagaggaagccaaactgtctaaaattaaaagttgggcaaacaagatggaagctctgacaagcaagagcgccgccgatgcagaggggtatctggctcatcctgtcaatgcatacaagctggtaaagcgcctaaataccgactggccggcactcgaggacctggtactgcaagatagcgctgccggcttcatcgctaacctcagcgtgcagcggcaattttttcccactgacgaggatgagataggagctgcaaaagccttgatgcggctccaagacacctatagactggatcccggcaccatcagccggggggagctgcccgggacgaagtatcaagccatgctctcggtagatgactgctttgggatgggacgctccgcctataatgagggggattactatcacacagtgttgtggatggagcaggtgttgaaacaattggacgcaggcgaggaagccaccactaccaagtcgcaggttctggactacctgtcctatgccgtgttccaattgggcgaccttcaccgcgcacttgaactgactagaaggctgttatctctcgacccctcccacgagagagcaggtggcaatctccggtactttgagcaactgctggaggaggagcgagagaagactctgaccaaccaaactgaagctgaactagctactcctgaagggatttatgagcgtcccgtcgattacctgccagaacgagacgtttatgagtctctgtgtcgcggcgagggcgtgaaactcacgccaagacgccagaaacgccttttttgccgctaccatcacgggaatagggcaccacaactcctgatagcacctttcaaagaagaagatgagtgggatagccctcacatcgttaggtactacgatgtgatgtccgatgaagagatcgagaggatcaaagagatcgccaagcccaaactggccagggccacagtccgggacccaaaaactggcgttctgacagtggcatcctacagagttagcaaatcgtcctggttggaggaggacgatgatcctgtcgttgcaagagttaaccgacggatgcagcatattacaggtctgactgtgaagacggcggagctactgcaggtggccaattatggggttggcggtcaatatgagcctcacttcgactttagcagaaatgatgagagggacacattcaagcacttaggcactgggaacagagtagctaccttcctgaactacatgtcggatgtggaggcgggcggcgcaaccgtgttccccgatcttggcgccgccatttggccaaaaaaggggactgctgttttctggtacaacttactccgctccggtgaaggtgattaccgtactaggcacgctgcctgcccagttctggttggctgcaagtgggtgagtaacaagtggtttcacgaacgcggacaagagttcctcagaccatgtggaagtactgaggtggactag

SEQ ID NO: 283736 - DNA, 1608 bp, Artificial Sequence
  derived and/or modified sequence
atgaagctgtgggttagcgccttgctcatggcatggtttggagtgctgtcttgtgtgcaggctgagttttttacctctatcggtcatatgacagatctcatctatgccgagaaggagctggttcaaagccttaaggaatacatcctggttgaagaggctaaactgtctaagatcaaatcttgggccaacaaaatggaggcactgacatccaaatctgcagctgatgccgagggctatctagcgcacccagtcaatgcctataagctcgtgaagaggcttaatacagactggccagcccttgaggatttagtgttgcaggacagcgccgcaggattcattgccaatttgtctgtccagaggcagttttttccaaccgatgaagatgagataggtgcagccaaggcactgatgcgcctgcaggatacatatcgactggaccctggaactatctcccgcggagagctcccaggtactaaataccaggccatgctcagtgtcgacgattgctttggaatgggaaggtcagcttacaacgaaggagattattaccataccgtcctgtggatggagcaagtcctgaaacagctagacgcaggcgaggaagccactacgactaaatcccaggtgctggactatctctcgtacgcagtgttccagttaggcgacctacaccgtgccctggagttgactaggcggctgctgagtctcgatccaagccacgaaagggctggcggcaatctccggtacttcgagcagctgttagaagaggaaagagaaaagaccctgaccaatcagactgaggccgagcttgcaacgccagaaggcatctacgagcgccccgtcgactatctgcctgagagggatgtgtacgaatccctatgccgaggagagggggttaagctgacccctcggcgacagaagcgtttgttttgtcggtaccatcacggtaatagagcgccacagttactcattgctccatttaaggaggaggatgagtgggacagtcctcacatcgtgcgctactacgatgtgatgtccgacgaagagattgagaggatcaaagagattgccaaacccaagctggcgcgggccacggttagggaccctaagaccggagtcctaacagtggcgtcttatcgtgtctctaaaagcagctggctggaagaggacgacgatcctgtggtggcacgggtcaaccgaagaatgcagcatataactgggttaactgtgaaaacagcggaactcttgcaggtggcgaattatggagtgggaggacagtacgaaccacactttgacttttccaggaacgacgaaagagataccttcaagcacctgggcactgggaatcgcgttgccacatttcttaactatatgtcggacgtcgaagccggaggcgctacagtttttccagatttgggggcagccatctggccaaagaagggaacagctgtgttttggtacaatctgctacgcagtggggaaggggactatcgcacacgtcatgctgcctgcccagtgctggtcggctgtaaatgggtgagcaacaagtggttccatgagcggggacaggagttcctgcgaccgtgtggcagcaccgaggtagactag

SEQ ID NO: 283737 - DNA, 1608 bp, Artificial Sequence
  derived and/or modified sequence
atgaaactttgggtctcggcattgctgatggcgtggttcggggtgctgagctgcgtccaagcagagtttttcactagcatcggccatatgaccgaccttatctacgcagagaaggagctagtgcagtccttgaaagagtatatcctcgtggaggaagctaagttgagcaaaatcaagtcctgggcgaacaagatggaagcactaacttccaagagtgcggcagacgccgagggatatttggcccaccctgtaaatgcttataaacttgtcaagcggctgaacaccgattggcccgccttggaagacttggttttgcaggactcagctgccggatttattgctaacctgtcagtgcagaggcagttttttcctaccgatgaagacgagatcggggcagccaaggcgctcatgaggttgcaggacacttaccgcctggatcctggcactatatcgagaggagagttgccaggtaccaaataccaggccatgctttctgtcgatgattgtttcggtatggggagatccgcctacaatgagggggattactatcacaccgtactgtggatggagcaggtgctgaaacagctcgatgccggcgaagaagccacgacgaccaaaagccaggtgctcgactacttatcttacgctgtttttcagttaggcgaccttcaccgggctctggagctgactagacggctcctttcattggaccctagtcatgaaagggccgggggtaacctgcggtattttgaacagctattggaagaagaaagagagaaaactctgaccaatcaaacggaggctgaactagccacccccgaaggaatttacgaacgacctgtcgactatttgcccgagagagacgtctatgagagtctttgccgtggggagggggtcaaactgaccccccgccgtcagaaacgcctcttttgtcgatatcaccatgggaatagagcacctcagttattgattgccccctttaaggaggaggatgaatgggactccccgcatattgtccggtactacgacgtgatgtctgatgaagaaatcgaacgaatcaaggagattgccaagccaaagctcgcacgggcaacagttcgagatccgaaaaccggtgttttgacggttgccagctacagggtcagcaaatcaagctggcttgaagaagacgatgatcctgtggttgcccgtgtcaaccgccggatgcaacacataactgggctcactgttaagaccgcagagttgttgcaggtggccaactacggcgttggcggccagtatgaaccacactttgattttagccggaacgacgaacgtgacacgtttaagcacctgggtaccggcaacagggtggccactttcctgaactacatgagtgacgtggaggccggcggcgcaacagtgtttcccgacctaggagccgcaatctggcctaagaaagggactgctgtcttctggtacaacctgctccgatctggggagggggattaccgcactcgccacgcagcttgcccagtcttagtgggttgcaaatgggtgtctaacaaatggttccacgaacggggtcaggaatttctgcgaccatgtggatccactgaagtggactag

SEQ ID NO: 283738 - DNA, 1608 bp, Artificial Sequence
  derived and/or modified sequence
atgaagctgtgggtgtctgccctgctgatggcctggtttggagtgctgagctgtgtgcaggccgagttcttcaccagcatcggccacatgacagacctgatctatgcagagaaggagctggtgcagagcctgaaggagtacatcctggtggaggaggccaagctgagcaagatcaagtcctgggccaacaagatggaggccctgaccagcaagtctgctgctgatgctgagggctacctggcccaccctgtgaatgcctacaagctggtgaagaggctgaacacagactggccagccctggaggacctggtgctgcaggacagcgctgctggcttcatcgccaacctgtctgtgcagaggcagttcttccccacagatgaagatgagatcggggccgccaaggccctgatgaggctgcaggacacctaccgcctggaccccggcaccatcagcagaggagagctgcccggcaccaagtaccaggccatgctgtctgtggatgactgcttcggcatgggccgcagcgcctacaatgaaggagactactaccacacagtgctgtggatggagcaggtgctgaagcagctggatgctggggaggaggccaccaccaccaagagccaggtgctggactacctgtcctatgctgtgttccagctgggggacctgcaccgggccctggagctgacccggcggctgctgagcctggaccccagccatgaaagagctgggggcaacctgcgctactttgagcagctgctggaggaggagcgggagaagaccctgaccaaccagacagaggccgagctggccaccccagagggcatctatgaaagacctgtggactacctgcctgagagagatgtgtatgagagcctgtgccgcggggagggcgtgaagctgaccccccggcggcagaagaggctcttctgccgctaccaccacggcaacagagccccccagctgctgattgcccccttcaaggaggaggatgagtgggacagcccccacatcgtgcgctactatgatgtgatgtctgatgaggagattgaaagaatcaaggagatcgccaagcccaagctggcccgggccaccgtgcgggaccccaagacaggagtgctgactgtggccagctacagagtgtccaagagctcctggctggaggaggatgatgatcctgtggtggcccgggtgaacagaaggatgcagcacatcaccggcctgactgtgaagacagctgagctgctgcaggtggccaactatggagtgggcggccagtatgagccccactttgacttcagcagaaatgatgagcgggacaccttcaagcacctgggcactggaaacagagtggccaccttcctgaactacatgtctgatgtggaggccggcggggccaccgtcttcccagacctgggcgccgccatctggcccaagaagggcacagctgtgttctggtacaacctgctgcggagcggggagggggactaccgcaccaggcatgctgcctgccctgtgctggtgggctgcaagtgggtgagcaacaagtggttccacgagcggggccaggagttcctgcggccctgtggcagcacagaggtggactag

SEQ ID NO: 283739 - DNA, 1608 bp, Artificial Sequence
  derived and/or modified sequence
atgaagctgtgggtgagcgccctgctgatggcctggttcggcgtgctttcctgcgtgcaggccgagttcttcacctccataggtcatatgaccgatttgatttatgccgagaaagaacttgtgcagtcccttaaggagtacattctggtcgaggaagccaaactctccaagatcaaatcatgggcaaataagatggaggccctcaccagcaagtctgcggccgacgcagaaggctacctggctcacccagtgaacgcctacaagctggtgaagcgcctcaatactgactggccagccctggaggacctcgttctgcaggacagtgctgcaggtttcattgctaatctgagtgtccagcgacagtttttcccgactgatgaggacgaaattggggccgccaaggccttgatgcgcctgcaggacacatatcgcctagacccaggaactatctcacggggggagctgcccgggactaagtatcaggccatgctgtccgtggacgactgttttggcatgggccgctcagcatacaacgagggggactattaccataccgtgttatggatggagcaggtgttgaagcagcttgacgctggtgaggaggcaacaaccaccaaaagccaggtcctggactaccttagctacgccgtgttccagctgggggacctgcacagggctttggaactcaccaggagattgctgtccctggacccttctcatgagcgggcaggcgggaacctgcggtactttgaacagttactcgaagaggagagagaaaagaccctgaccaaccagaccgaggccgaactggctacgccagagggcatatatgaaagaccggttgactatcttccggaacgagatgtctatgagtcactctgtagaggcgagggggtgaagctgaccccacgccgccagaaaagactgttctgtcgctatcatcacgggaaccgcgcgccccagttactgatagcccctttcaaggaagaggacgaatgggattcgccacacatcgttcggtattacgatgtcatgtctgacgaagagatagaaaggataaaggagatcgcgaaacccaaattggcacgggccacggtgcgcgatcctaagacaggtgtgcttacagtggcctcctacagagtgagcaagtcttcgtggctggaagaggacgacgatcctgttgtagcccgtgtcaatagacggatgcagcacattaccggtcttactgtcaaaacagccgagctgctccaggtcgccaactacggtgttggcggacagtatgagccacacttcgacttttccagaaacgatgagcgggatacatttaagcacctgggaaccggaaacagggtcgctacatttttgaactatatgagtgacgttgaagcagggggggcaacagtgttccctgatcttggggcagcaatttggcctaaaaagggaaccgccgtcttttggtacaatctactgcggagcggcgagggtgattaccgcactcgccatgcagcttgtccggtgctggtaggctgtaagtgggtgagcaataagtggtttcacgagaggggtcaagagtttctgaggccatgcggatctaccgaagtcgactag

SEQ ID NO: 283740 - DNA, 1608 bp, Artificial Sequence
  derived and/or modified sequence
atgaagctgtgggtgagcgccctgctgatggcctggttcggcgtgctgtcgtgtgttcaggctgaattcttcactagtataggccatatgactgacctgatctacgcagagaaggaacttgtacagtccctgaaggagtatatcctggtcgaagaggccaaactatccaagatcaagagctgggccaacaaaatggaggccctgacctcgaaatcagccgctgatgctgaagggtatttagctcaccccgtcaacgcctacaaattggtgaagcgcctgaacactgattggcctgccctggaagacctggtgttgcaggactccgccgcggggttcattgccaatctctccgttcaacgccagtttttccccacagatgaggatgaaatcggcgctgctaaggccctgatgcgcctgcaggatacctacaggttagatcccggtaccatttcccgcggagaactgccaggcacgaagtatcaggcaatgctgtctgtggacgactgctttgggatgggaaggtctgcctataatgagggggattattatcatacggtgctgtggatggaacaggtgcttaagcagctggatgcaggcgaggaagccactactacaaagagtcaggtcctcgattacctgtcctacgccgtgttccagttgggtgacctacaccgggctctggagctgacccgacggctcttgtctttagacccttcacacgagagagcaggaggcaatctcagatatttcgagcagctgctggaagaggagagagaaaagaccttgacgaatcagacggaggctgaactggcaacaccagagggcatttatgagcgccctgtagattatctccccgaacgtgatgtgtacgagtctctgtgcaggggagagggggtgaagcttaccccccggagacagaagaggctgttttgtagatatcatcacggcaaccgcgcccctcagctgctcatcgcgcccttcaaggaggaggatgaatgggattctccccatatcgtcagatactacgatgttatgagtgacgaagaaatcgagagaatcaaagaaattgccaaacccaagctggcaagagcaaccgtccgggatcctaagacaggtgtgttaacagtggcctcatatagggtctcgaaaagtagttggctggaagaggacgacgatcctgttgttgctcgggtcaaccgcagaatgcagcacatcacgggacttacagtcaagactgccgagttgcttcaagtggcaaactacggggttggggggcagtacgagcctcattttgattttagcaggaatgacgagcgtgatactttcaagcatctcggcactgggaatcgagtcgccaccttcctgaattacatgtcggatgtggaggcgggaggcgcaaccgtgtttcctgatctgggcgctgctatttggccaaagaagggcactgcggtattttggtacaatctcttgcgcagcggagagggagactacagaaccagacacgcagcatgtcccgttttggtaggttgcaagtgggtttcaaacaagtggtttcatgagcgtggccaggagtttttgagaccgtgtggttctaccgaggtggattag

SEQ ID NO: 283741 - DNA, 1608 bp, Artificial Sequence
  derived and/or modified sequence
atgaagctgtgggtgagcgccctgctgatggcctggttcggcgtgctttcatgtgtgcaagccgagtttttcacctctattgggcacatgacagatctgatttacgccgaaaaagaacttgtgcagtctctgaaagaatatatcctggttgaggaggctaaactgtcaaaaatcaagagctgggccaacaagatggaagcactaacttctaaatcagccgccgatgcagaaggctacctcgcgcaccctgtgaatgcatacaaattggtgaaaagattaaatacagattggccagccctggaggaccttgtgcttcaggattctgccgctggttttattgccaatttgagcgtacagaggcaatttttcccgacggacgaggacgagattggagccgcaaaggccctaatgcggcttcaagacacctacagattagacccaggcacgatctctcggggggaattgcccggcacaaaataccaggcaatgctttccgtggatgactgctttggtatgggccgtagtgcttacaacgagggcgactactatcatacagttctgtggatggaacaagtccttaaacagctggacgcgggtgaggaagccactactaccaagagccaggtgctggactatctaagttatgccgtttttcagctcggcgacttacatcgggctctggaactgactcgcagacttctgtctctggacccgtctcatgagcgcgcaggcggcaatcttcggtatttcgagcagctgttggaagaagaacgggaaaaaactctgacaaaccagactgaggctgagctggccactcctgaaggcatctacgagaggcctgtggactatctcccagaacgggatgtctatgaatccttatgtcgcggagagggcgtcaaactcaccccacggcgtcagaagcgcttattttgtaggtaccaccatggcaatcgcgctcctcagctgctgatagcaccttttaaagaagaggacgagtgggatagtccccatattgttaggtactacgacgttatgtcggacgaagaaatcgagcgtattaaggaaatcgcgaagcctaagctcgctcgggccaccgtccgggatccgaaaaccggtgtgctcacagtggcttcctatagggtgagtaagagcagctggctggaagaggatgatgatccggtggtggcacgagtcaacagacgcatgcagcatataacaggtctcacagtcaagacagccgaacttctccaggtggccaattacggcgtgggtggtcaatacgagccccacttcgatttctcacgcaacgatgaacgggacacttttaaacacctcgggaccggaaatagagttgccacattcctgaattacatgagcgacgtagaggccgggggcgccactgtctttcccgacctcggggctgccatctggcccaaaaagggcactgcagtattctggtataacctgcttagaagcggggagggcgattaccgtacccgtcatgctgcctgcccggttctggtgggctgtaaatgggtgtctaacaagtggttccatgaaaggggccaggagtttctgcgcccatgtggaagtactgaagtggactag

SEQ ID NO: 283742 - DNA, 1608 bp, Artificial Sequence
  derived and/or modified sequence
atgaaactgtgggtcagtgccttactgatggcttggttcggagtgctatcatgcgtccaagcagaatttttcactagcatcgggcatatgaccgatcttatctatgcagagaaggaactggttcaaagtctgaaggagtacatcctggtcgaggaggccaagctgtctaagattaaatcttgggccaataaaatggaggctctgacatctaagtcagctgcagacgccgagggttacctcgcccacccagtgaacgcctacaagctggtcaaacgtttaaataccgattggccagccctggaagatctagttctgcaggactctgccgcaggtttcatcgccaacctgtcagttcagcgccagttttttcctacagacgaagacgaaatcggggcagcaaaggcacttatgcggctccaggacacctaccgactcgaccctggaacaatttcgcggggagaattgccgggaaccaagtaccaggccatgctgtccgttgatgactgctttggtatggggagatcagcgtacaacgagggtgattactatcacaccgtgctgtggatggaacaggtactcaagcagctagacgccggagaggaagcgaccaccacgaaatcccaggtcttagactatctgagctacgcggtctttcaactcggagatttgcatcgggcactggagctgacccggaggctacttagcctggaccccagccatgagcgtgccggagggaatctccggtatttcgagcagctgctagaggaggaacgggaaaagacactcactaaccagaccgaagctgagctggctacccctgaggggatctatgagaggccagtcgactatctgccggagcgcgatgtgtatgaatcgctgtgcagaggggagggagtgaaactgactcccagaaggcagaagaggctgttctgcagatatcaccacggaaaccgcgctcctcagttgctgatcgcgcctttcaaggaggaagacgagtgggatagtccacacatcgtgagatactacgacgtcatgtcagatgaagaaatagagagaatcaaagagatcgcgaaaccaaagctggccagggctacggtccgggaccccaagacgggcgtgctgacagtggcctcttatcgtgttagcaagtcaagctggcttgaagaagacgatgatcccgtcgttgctcgggtaaatcgtcgcatgcagcatatcaccggcttgacagtgaaaaccgccgagttgctgcaagttgcaaactatggtgtggggggtcaatacgagccccactttgacttctccaggaatgacgaacgtgatactttcaaacacctggggacaggaaacagggtggctacattcctgaactacatgagtgatgtggaggccggaggcgcaacggtgttcccagatctaggcgcagctatttggcctaagaaagggaccgctgtgttctggtataacctcttgagaagtggagagggggattatcgaacgagacacgccgcttgccccgttctcgttggttgtaaatgggtgagtaataaatggttccatgaaagggggcaggagtttcttcgcccttgtggctccacagaggttgattag

SEQ ID NO: 283743 - DNA, 1608 bp, Artificial Sequence
  derived and/or modified sequence
atgaaactgtgggtgtctgccttgttgatggcttggtttggtgtgctgagttgcgtgcaggctgagtttttcacctctataggtcatatgaccgatctcatttatgccgagaaggaattagtgcagtccttgaaggaatacatccttgtggaggaggccaaactaagcaagattaaaagctgggcaaacaagatggaagcactaacatccaagtcagccgctgacgccgagggttaccttgctcaccctgtcaacgcatacaagttagtcaagcgccttaacacagactggccagccctggaggaccttgtgctccaagattccgccgctgggtttattgccaatttaagcgttcagcgccagttttttcctaccgacgaggacgaaattggcgctgcgaaggcacttatgagactgcaagatacctatcgtttagaccccggaaccattagcagaggggaactgcctggcacaaagtatcaggcaatgcttagcgtggatgattgcttcggtatggggaggagcgcttacaatgagggcgattactaccataccgtgttgtggatggaacaagtgctgaagcagctggatgccggagaagaggccacaaccactaagagccaagtacttgactacttaagttacgcggtgttccaactcggtgacctgcatagagccctcgagctgacaagaagattgctgtcactggatccgagtcatgagcgcgctggcggtaatcttagatactttgaacagctgctggaagaggaaagggagaaaacactcactaaccaaactgaggccgagctcgccaccccagaaggtatctatgagcggcctgttgactaccttccggagagagatgtctatgaatctttgtgccggggtgagggcgtgaagctgaccccacgccgtcagaaaagactcttttgcaggtaccatcatggaaacagagccccacagctgctgatcgcgcctttcaaggaggaagacgagtgggactcaccgcatatcgtgcgctactacgacgtgatgtctgatgaggagatcgaaaggatcaaggaaattgcaaagcccaaactcgccagagctaccgtgcgcgaccccaagacgggcgtgttgaccgtggcctcttatcgcgtgtccaaatcttcctggttggaggaggacgacgatccagtcgtagcacgcgtaaaccgccgaatgcagcatatcactgggttaactgtgaagacggctgagttactgcaggtcgccaattatggggtcggaggacagtacgagcctcacttcgatttctctagaaatgacgagagggatactttcaagcatttgggaaccgggaacagagtcgcaacctttctgaactatatgtcggatgtcgaagccggtggagccactgtgttccctgatctgggggctgctatttggccgaagaaaggtacagcggtattctggtataacttattaagatcgggagaaggagactacagaacaagacatgcagcctgccctgttctagttgggtgtaagtgggtttcgaataagtggttccacgagcgaggccaggagttcctacgcccatgtggcagcaccgaagtggactag

SEQ ID NO: 283744 - DNA, 1608 bp, Artificial Sequence
  derived and/or modified sequence
atgaaactgtgggtgtctgccctacttatggcgtggtttggagtgctctcttgtgtccaggcagaattcttcacatccatcggacatatgaccgacctcatctacgctgaaaaggaactggtgcagagtctgaaggagtatatactggtggaagaagccaagctgtccaagataaagtcttgggccaacaagatggaggctctgaccagtaaaagcgctgcagatgcagagggatacttagctcatcctgtgaacgcctacaagcttgttaaacgtctgaataccgactggcccgcactggaggatttagtgctccaggacagcgctgccggattcatcgccaatctttctgttcaacggcagttcttccccaccgacgaagatgagatcggtgccgcaaaggcattgatgaggctgcaggatacatacaggctcgaccccggaaccatatcaagaggtgaactgcccggaaccaaataccaagccatgttgtccgtggatgactgctttggcatgggcaggtcagcttataacgagggggattactaccacacagtgctttggatggagcaagtgcttaagcaactggacgctggtgaagaagccacgactacaaagtctcaagtcctcgactatctctcctacgccgtgtttcagcttggggacctgcatcgggctttagagttgaccagacgtttgctctctctcgacccgagtcatgagcgagccggtggcaacctgcggtactttgagcaactgctggaagaggaacgcgagaaaaccctgactaaccagactgaggctgagctggccactcctgagggaatttacgagcgccctgtcgactatttgcccgaacgcgacgtgtacgagagtttgtgccgaggtgagggcgtaaaactcaccccgaggcgccagaaacggctgttctgtcgctaccaccacggcaacagagcgcctcaactgctcattgcaccctttaaagaggaggacgaatgggacagtcctcacatagtgcgttattatgatgtgatgtccgacgaggaaattgagcgcatcaaggagatcgccaagccaaaattggctagagctacagttcgtgatcctaagactggagtgttgacagtcgcctcatatagggtgagcaagtcaagttggctggaggaagacgacgaccctgtagttgcccgtgtgaatcgcagaatgcagcacattacaggactcactgttaaaactgctgagctgctacaggtggccaattacggggtgggaggccagtatgagcctcattttgattttagccgcaatgacgagagagacacgtttaaacatttaggtacaggcaaccgcgtggctacatttctgaattacatgtccgacgtagaagcaggaggagctacagtgtttcccgaccttggcgctgctatctggcccaagaaagggactgcggtgttctggtacaaccttttgcgctctggcgaaggcgattaccggacaaggcacgcggcttgcccggtgctcgtgggttgcaaatgggttagcaacaagtggttccacgagaggggccaggagtttcttcggccatgcgggtctaccgaggtggattag

SEQ ID NO: 283745 - DNA, 2230 bp, Artificial Sequence
  derived and/or modified sequence
ggaggcgccgagctgaccgggcgacgccgcgggaggttctggaaacgccgggagctgcgagtgtccagctgcggagacccgtgataattcgttaactaattcaacaaacgggacccttctgtgtgccagaaaccgcaagcagttgctaacccagtgggacaggcggattggaagagcgggaaggtcctggcccagagcagtgtgacacttccctctgtgaccatgaaactctgggtgtctgcattgctgatggcctggtttggtgtcctgagctgtgtgcaggccgaattcttcacctctattgggcacatgactgacctgatttatgcagagaaagagctggtgcagtctctgaaagagtacatccttgtggaggaagccaagctttccaagattaagagctgggccaacaaaatggaagccttgactagcaagtcagctgctgatgctgagggctacctggctcaccctgtgaatgcctacaaactggtgaagcggctaaacacagactggcctgcgctggaggaccttgtcctgcaggactcagctgcaggttttatcgccaacctctctgtgcagcggcagttcttccccactgatgaggacgagataggagctgccaaagccctgatgagacttcaggacacatacaggctggacccaggcacaatttccagaggggaacttccaggaaccaagtaccaggcaatgctgagtgtggatgactgctttgggatgggccgctcggcctacaatgaaggggactattatcatacggtgttgtggatggagcaggtgctaaagcagcttgatgccggggaggaggccaccacaaccaagtcacaggtgctggactacctcagctatgctgtcttccagttgggtgatctgcaccgtgccctggagctcacccgccgcctgctctcccttgacccaagccacgaacgagctggagggaatctgcggtactttgagcagttattggaggaagagagagaaaaaacgttaacaaatcagacagaagctgagctagcaaccccagaaggcatctatgagaggcctgtggactacctgcctgagagggatgtttacgagagcctctgtcgtggggagggtgtcaaactgacaccccgtagacagaagaggcttttctgtaggtaccaccatggcaacagggccccacagctgctcattgcccccttcaaagaggaggacgagtgggacagcccgcacatcgtcaggtactacgatgtcatgtctgatgaggaaatcgagaggatcaaggagatcgcaaaacctaaacttgcacgagccaccgttcgtgatcccaagacaggagtcctcactgtcgccagctaccgggtttccaaaagctcctggctagaggaagatgatgaccctgttgtggcccgagtaaatcgtcggatgcagcatatcacagggttaacagtaaagactgcagaattgttacaggttgcaaattatggagtgggaggacagtatgaaccgcacttcgacttctctaggaatgatgagcgagatactttcaagcatttagggacggggaatcgtgtggctactttcttaaactacatgagtgatgtagaagctggtggtgccaccgtcttccctgatctgggggctgcaatttggcctaagaagggtacagctgtgttctggtacaacctcttgcggagcggggaaggtgactaccgaacaagacatgctgcctgccctgtgcttgtgggctgcaagtgggtctccaataagtggttccatgaacgaggacaggagttcttgagaccttgtggatcaacagaagttgactgacatccttttctgtccttccccttcctggtccttcagcccatgtcaacgtgacagacacctttgtatgttcctttgtatgttcctatcaggctgatttttggagaaatgaatgtttgtctggagcagagggagaccatactagggcgactcctgtgtgactgaagtcccagcccttccattcagcctgtgccatccctggccccaaggctaggatcaaagtggctgcagcagagttagctgtctagcgcctagcaaggtgcctttgtacctcaggtgttttaggtgtgagatgtttcagtgaaccaaagttctgataccttgtttacatgtttgtttttatggcatttctatctattgtggctttaccaaaaaataaaatgtccctaccagaagccttaaa

SEQ ID NO: 283746 - DNA, 2569 bp, Artificial Sequence
  derived and/or modified sequence
agcgttgtttttccttggcagctgcggagacccgtgataattcgttaactaattcaacaaacgggacccttctgtgtgccagaaaccgcaagcagttgctaacccagtgggacaggcggattggaagagcgggaaggtcctggcccagagcagtgtggtgagcgctgtgctggaagggaatgcgggcagtgggtacttggtagagcactgactgcctccggccagaggacttcccggaggaggtgacccatgagctggagtggtcagaggaaggctggcaaaagggcatcgtggacagaggaacagcctatgtgagtgggagcagagaccttggccaatgccattccttatggccttgtagtggaagcaaggtgatggggaaggaacactgtaggggatagctgtccacggacgctgtctacaagaccctggagtgagataacgtgcctggtactgtgccctgcatgtgtaagatgcccagttgaccttcgcagcaggagcctggatcagggcacttcctgcctcaggtattgctggacagcccagacacttccctctgtgaccatgaaactctgggtgtctgcattgctgatggcctggtttggtgtcctgagctgtgtgcaggccgaattcttcacctctattgggcacatgactgacctgatttatgcagagaaagagctggtgcagtctctgaaagagtacatccttgtggaggaagccaagctttccaagattaagagctgggccaacaaaatggaagccttgactagcaagtcagctgctgatgctgagggctacctggctcaccctgtgaatgcctacaaactggtgaagcggctaaacacagactggcctgcgctggaggaccttgtcctgcaggactcagctgcaggttttatcgccaacctctctgtgcagcggcagttcttccccactgatgaggacgagataggagctgccaaagccctgatgagacttcaggacacatacaggctggacccaggcacaatttccagaggggaacttccaggaaccaagtaccaggcaatgctgagtgtggatgactgctttgggatgggccgctcggcctacaatgaaggggactattatcatacggtgttgtggatggagcaggtgctaaagcagcttgatgccggggaggaggccaccacaaccaagtcacaggtgctggactacctcagctatgctgtcttccagttgggtgatctgcaccgtgccctggagctcacccgccgcctgctctcccttgacccaagccacgaacgagctggagggaatctgcggtactttgagcagttattggaggaagagagagaaaaaacgttaacaaatcagacagaagctgagctagcaaccccagaaggcatctatgagaggcctgtggactacctgcctgagagggatgtttacgagagcctctgtcgtggggagggtgtcaaactgacaccccgtagacagaagaggcttttctgtaggtaccaccatggcaacagggccccacagctgctcattgcccccttcaaagaggaggacgagtgggacagcccgcacatcgtcaggtactacgatgtcatgtctgatgaggaaatcgagaggatcaaggagatcgcaaaacctaaacttgcacgagccaccgttcgtgatcccaagacaggagtcctcactgtcgccagctaccgggtttccaaaagctcctggctagaggaagatgatgaccctgttgtggcccgagtaaatcgtcggatgcagcatatcacagggttaacagtaaagactgcagaattgttacaggttgcaaattatggagtgggaggacagtatgaaccgcacttcgacttctctaggaatgatgagcgagatactttcaagcatttagggacggggaatcgtgtggctactttcttaaactacatgagtgatgtagaagctggtggtgccaccgtcttccctgatctgggggctgcaatttggcctaagaagggtacagctgtgttctggtacaacctcttgcggagcggggaaggtgactaccgaacaagacatgctgcctgccctgtgcttgtgggctgcaagtgggtctccaataagtggttccatgaacgaggacaggagttcttgagaccttgtggatcaacagaagttgactgacatccttttctgtccttccccttcctggtccttcagcccatgtcaacgtgacagacacctttgtatgttcctttgtatgttcctatcaggctgatttttggagaaatgaatgtttgtctggagcagagggagaccatactagggcgactcctgtgtgactgaagtcccagcccttccattcagcctgtgccatccctggccccaaggctaggatcaaagtggctgcagcagagttagctgtctagcgcctagcaaggtgcctttgtacctcaggtgttttaggtgtgagatgtttcagtgaaccaaagttctgataccttgtttacatgtttgtttttatggcatttctatctattgtggctttaccaaaaaataaaatgtccctaccagaagcctt

SEQ ID NO: 283747 - DNA, 3349 bp, Artificial Sequence
  derived and/or modified sequence
aaacgccgggagctgcgagtgtccagctgcggagacccgtgataattcgttaactaattcaacaaacgggacccttctgtgtgccagaaaccgcaagcagttgctaacccagtgggacaggcggattggaagagcgggaaggtcctggcccagagcagtgtggtgagcgctgtgctggaagggaatgcgggcagtgggtacttggtagagcactgactgcctccggccagaggacttcccggaggaggtgacccatgagctggagtggtcagaggaaggctggcaaaagggcatcgtggacagaggaacagcctatgtgagtgggagcagagaccttggccaatgccattccttatggccttgtagtggaagcaaggtgatggggaaggaacactgtaggggatagctgtccacggacgctgtctacaagaccctggagtgagataacgtgcctggtactgtgccctgcatgtgtaagatgcccagttgaccttcgcagcaggagcctggatcagggcacttcctgcctcaggtattgctggacagcccagacacttccctctgtgaccatgaaactctgggtgtctgcattgctgatggcctggtttggtgtcctgagctgtgtgcaggccgaattcttcacctctattgggcacatgactgacctgatttatgcagagaaagagctggtgcagtctctgaaagagtacatccttgtggaggaagccaagctttccaagattaagagctgggccaacaaaatggaagccttgactagcaagtcagctgctgatgctgagggctacctggctcaccctgtgaatgcctacaaactggtgaagcggctaaacacagactggcctgcgctggaggaccttgtcctgcaggactcagctgcaggttttatcgccaacctctctgtgcagcggcagttcttccccactgatgaggacgagataggagctgccaaagccctgatgagacttcaggacacatacaggctggacccaggcacaatttccagaggggaacttccaggaaccaagtaccaggcaatgctgagtgtggatgactgctttgggatgggccgctcggcctacaatgaaggggactattatcatacggtgttgtggatggagcaggtgctaaagcagcttgatgccggggaggaggccaccacaaccaagtcacaggtgctggactacctcagctatgctgtcttccagttgggtgatctgcaccgtgccctggagctcacccgccgcctgctctcccttgacccaagccacgaacgagctggagggaatctgcggtactttgagcagttattggaggaagagagagaaaaaacgttaacaaatcagacagaagctgagctagcaaccccagaaggcatctatgagaggcctgtggactacctgcctgagagggatgtttacgagagcctctgtcgtggggagggtgtcaaactgacaccccgtagacagaagaggcttttctgtaggtaccaccatggcaacagggccccacagctgctcattgcccccttcaaagaggaggacgagtgggacagcccgcacatcgtcaggtactacgatgtcatgtctgatgaggaaatcgagaggatcaaggagatcgcaaaacctaaacttgcacgagccaccgttcgtgatcccaagacaggagtcctcactgtcgccagctaccgggtttccaaaagctcctggctagaggaagatgatgaccctgttgtggcccgagtaaatcgtcggatgcagcatatcacagggttaacagtaaagactgcagaattgttacaggttgcaaattatggagtgggaggacagtatgaaccgcacttcgacttctctaggaatgatgagcgagatactttcaagcatttagggacggggaatcgtgtggctactttcttaaactacatgagtgatgtagaagctggtggtgccaccgtcttccctgatctgggggctgcaatttggcctaagaagggtacagctgtgttctggtacaacctcttgcggagcggggaaggtgactaccgaacaagacatgctgcctgccctgtgcttgtgggctgcaagtgggtctccaataagtggttccatgaacgaggacaggagttcttgagaccttgtggatcaacagaagttgactgacatccttttctgtccttccccttcctggtccttcagcccatgtcaacgtgacagacacctttgtatgttcctttgtatgttcctatcaggctgatttttggagaaatgaatgtttgtctggagcagagggagaccatactagggcgactcctgtgtgactgaagtcccagcccttccattcagcctgtgccatccctggccccaaggctaggatcaaagtggctgcagcagagttagctgtctagcgcctagcaaggtgcctttgtacctcaggtgttttaggtgtgagatgtttcagtgaaccaaagttctgataccttgtttacatgtttgtttttatggcatttctatctattgtggctttaccaaaaaataaaatgtccctaccagaagccttaaagagccttacttggagtatttttaagactggaagcttttaccaggttcatcatttcctatgcatcaccttcatgcaggcagagtctggataatgaatgctttagcagcaaaaaagcatcttgggtcttggatttcagacctggtttcaacacttgtgttccctctaagtgtcagtgtccttttctggaaagtagggtaaatagtttctctttgtctcccagagaacatagcacatgtgttcatgattgtaatgctgttataatgtgtacttcatttttaaattttgagataagaattgttcatgatacacagatgtatacttaaaaaaatatgaaggtgagcaggagcacctgtgtcaacaccaagttagaaaagagaacgttttcaagtcagtacctcaggagccccttgggaacccctcctagatcacatctccttcactgcccccagcactttggagataaatcattgtctcatgatgtgtggtactcattcctttgcttgtctttatagttttaccatctatgattagatccctaaataagtagttattctgttttccctgattttgaacttttactaatagaatgagagtaaatatttttgggtatgtggcttcttttgttcaacattgttttaagattcatccgtgttgcttgtgtagctgtaatttgttttaatctttatagtacattcagttttgttaatgcttattgtaggactgtaccataatacaggcagcatgctgctgataaacactggaattgatttca

SEQ ID NO: 283748 - DNA, 1608 bp, Artificial Sequence
  derived and/or modified sequence
atgaagctgtgggttagcgccttgctgatggcatggttcggagtgctttcttgtgtccaggcagaattttttacatcgatagggcatatgactgacctgatatatgctgagaaagaactcgtgcagtctttgaaagagtatattctggtggaggaagcaaagctatccaaaatcaagtcgtgggctaacaagatggaagccctcacttccaagtccgccgccgacgccgaaggatacctggctcaccctgttaacgcatacaagctggtcaaacggcttaatacagactggcctgcgctggaagacctggtgcttcaggactcggccgctgggtttatcgcgaacctctctgtccagcgacagttttttccgaccgacgaggatgagattggagccgcaaaggcactcatgcggctgcaggatacatatagactcgacccgggaacgataagtcggggtgagctgcctggcacaaagtatcaagcaatgcttagcgtcgacgattgcttcggaatgggtaggagcgcatataatgaaggggactattatcacacagtactgtggatggaacaggtcctgaaacagttagacgcaggggaggaggccactacaacaaaaagccaggtgctggattatctgtcctacgctgttttccagctcggcgatctacaccgggctctcgagttgacaagacgtttactttccttggatccatctcacgagagggctggcggaaacctaagatattttgaacagttgttggaggaggagagggagaagaccctgacaaatcagactgaagccgaactggctacacccgaaggcatttacgagcgccctgtggattacctccccgagcgtgacgtctacgagagcctgtgtcgaggtgagggcgtgaaattgacaccaaggagacagaagaggcttttctgcagataccaccacggtaaccgtgccccacagctgcttatcgcaccatttaaggaggaagacgaatgggattctccccacatagttcggtattacgacgtgatgtcagacgaagagattgaacggatcaaggagatcgcaaagccgaaactcgctagagccaccgtgcgagatcccaaaaccggtgttctcacggttgcttcctacagggtgagtaagagttcctggctggaggaagatgacgatccagttgtcgcccgcgttaatagacggatgcagcatattactggtctgacagtaaaaaccgctgaactgctccaagtcgcaaattatggggttgggggccagtacgaacctcattttgatttttcacgcaacgacgaacgagacacctttaagcatttgggtaccggaaaccgggttgccacttttctgaattacatgagcgatgtagaggccgggggggctacagtgtttcccgacctgggggcggccatctggccgaagaagggaaccgcagttttctggtacaacctcctccggtccggcgagggggactatcgaactaggcacgctgcttgcccagtgttagttggatgcaaatgggtcagcaataaatggtttcacgaaagaggccaggaattcttgagaccctgtggttcaacagaggtggattag

SEQ ID NO: 283749 - DNA, 1608 bp, Artificial Sequence
  derived and/or modified sequence
atgaaactgtgggtgagtgcactgctgatggcatggttcggcgtcctttcatgcgtgcaggctgagttttttacaagtatagggcatatgaccgacttgatttatgctgagaaagagctcgttcagagtcttaaggagtacatcctggtcgaggaagctaaactctctaagatcaagtcatgggcaaacaaaatggaggctctcacctctaaatccgcagctgatgcagagggctacctggcgcaccccgttaacgcttacaaattggtcaagagattaaacaccgattggcccgctttggaggacctcgtgctccaagactctgcagccggattcatcgcaaatctgtccgtgcagaggcagttttttcccactgacgaagatgaaatcggcgcagccaaagcccttatgagactgcaagatacctacagattggaccccggaactatatcacggggcgaactgcccggcacaaagtatcaggctatgctctccgtagacgactgctttggtatgggtagatcagcatataacgaaggagattactaccataccgttctatggatggaacaagtactcaagcaactagacgccggtgaggaagccacaaccacaaagtcccaagtgttagactatctctcctacgccgtcttccagttaggagacctgcaccgagccttggagctgactcgtcgcctgctaagcctggatccatcacacgagcgcgctggcggaaacctgaggtacttcgagcaactgcttgaagaagagagagaaaaaacacttaccaaccagactgaagccgaactcgctacaccagagggaatctatgaacggcctgtggattatttacccgaacgtgatgtgtatgaatccctgtgcagaggtgaaggtgtcaagctaaccccccgtagacagaaacgcctcttctgtcggtaccatcacggaaaccgcgctccacagctgctgattgctccttttaaggaggaagacgagtgggattcccctcatattgtcaggtactatgatgtcatgtcagatgaagagatcgagcgcattaaggagatcgccaagcccaagctggcccgagcaacagttagggaccctaaaaccggagtactgacagtagcatcatacagggtgagtaaatcaagctggctggaagaagacgatgatccggttgtcgcccgcgtaaatcgccggatgcagcatataaccggcctgacagtgaagacagccgaacttctccaggtagcaaattacggcgttggcgggcaatatgaacctcatttcgacttttctagaaatgatgaaagggatacattcaagcatcttggaaccgggaatagggtcgccacatttcttaattatatgagtgatgtcgaagctggtggcgccaccgtgtttcccgacctgggcgcggctatatggcccaaaaaaggcacagcagtattctggtataatttattacggagtggcgagggagattacaggacacgccatgccgcctgtccagtgctggtgggctgtaagtgggttagtaataagtggttccatgaacgcggacaggagtttcttcgaccttgcggatcaactgaagtggattag

SEQ ID NO: 283750 - DNA, 1608 bp, Artificial Sequence
  derived and/or modified sequence
atgaagctgtgggtgagcgccctgctgatggcctggttcggcgtgctgagctgcgtgcaggccgagttcttcaccagcatcggccacatgaccgacctgatctacgccgagaaggagctggtgcagagcctgaaggagtacatcctggtggaggaggccaagctgagcaagatcaagagctgggccaacaagatggaggccctgaccagcaagagcgccgccgacgccgagggctacctggcccaccccgtgaacgcctacaagctggtgaagagactgaacaccgactggcccgccctggaggacctggtgctgcaggacagcgccgccggcttcatcgccaacctgagcgtgcagagacagttcttccccaccgacgaggacgagatcggcgccgccaaggccctgatgagactgcaggacacctacagactggaccccggcaccatcagcagaggcgagctgcccggcaccaagtaccaggccatgctgagcgtggacgactgcttcggcatgggcagaagcgcctacaacgagggcgactactaccacaccgtgctgtggatggagcaggtgctgaagcagctggacgccggcgaggaggccaccaccaccaagagccaggtgctggactacctgagctacgccgtgttccagctgggcgacctgcacagagccctggagctgaccagaagactgctgagcctggaccccagccacgagagagccggcggcaacctgagatacttcgagcagctgctggaggaggagagagagaagaccctgaccaaccagaccgaggccgagctggccacccccgagggcatctacgagagacccgtggactacctgcccgagagagacgtgtacgagagcctgtgcagaggcgagggcgtgaagctgacccccagaagacagaagagactgttctgcagataccaccacggcaacagagccccccagctgctgatcgcccccttcaaggaggaggacgagtgggacagcccccacatcgtgagatactacgacgtgatgagcgacgaggagatcgagagaatcaaggagatcgccaagcccaagctggccagagccaccgtgagagaccccaagaccggcgtgctgaccgtggccagctacagagtgagcaagagcagctggctggaggaggacgacgaccccgtggtggccagagtgaacagaagaatgcagcacatcaccggcctgaccgtgaagaccgccgagctgctgcaggtggccaactacggcgtgggcggccagtacgagccccacttcgacttcagcagaaacgacgagagagacaccttcaagcacctgggcaccggcaacagagtggccaccttcctgaactacatgagcgacgtggaggccggcggcgccaccgtgttccccgacctgggcgccgccatctggcccaagaagggcaccgccgtgttctggtacaacctgctgagaagcggcgagggcgactacagaaccagacacgccgcctgccccgtgctggtgggctgcaagtgggtgagcaacaagtggttccacgagagaggccaggagttcctgagaccctgcggcagcaccgaggtggactag

SEQ ID NO: 283751 - protein, 200 aa, Artificial Sequence
  derived and/or modified sequence
MSSRGGKKKSTKTSRSAKAGVIFPVGRMLRYIKKGHPKYRIGVGAPVYMAAVLEYLTGNTLEKKGGKEFVEAVLELRKKNGPLEVAGAAVSAGHGLPAKFVIHCNSPVWGADKCEELLEKTVKNCLALADDKKLKSIAFPSIGSGRNGFPKQTAAQLILKAISSYFVSTMSSSIKTVYFVLFDSESIGIYVQEMAKLDAN

SEQ ID NO: 283752 - DNA, 603 bp, Artificial Sequence
  derived and/or modified sequence
atgtccagtaggggcgggaagaagaagagtacgaaaacttcccgctcagccaaagccggggtcattttccctgtgggacgcatgttgcgttatatcaagaagggtcacccgaagtacaggatcggagtgggggcgccagtgtatatggctgctgtcctcgagtatcttactggaaatactctggaaaagaaggggggcaaggaatttgtggaagcagtcttggaactccgcaagaagaatggacccctggaagtggcaggggccgccgtctccgctggacatggtttgccagccaagttcgtgattcactgtaactctcctgtatggggcgcggacaaatgcgaggaacttctcgaaaagactgtgaagaattgtctggctttggccgatgacaagaagctgaagtctatcgccttccctagcattggtagcggcaggaatggatttcctaagcagactgcggcccagctaatcctgaaagctatctcctcatattttgtgagcactatgagcagttcaattaaaacagtgtattttgtgctatttgattctgagagcataggaatctacgtgcaggaaatggctaagctcgatgctaactag

SEQ ID NO: 283753 - DNA, 603 bp, Artificial Sequence
  derived and/or modified sequence
atgagcagcagaggaggcaagaagaagagcaccaagaccagccgcagcgccaaggccggggtcatcttccctgtgggccgcatgctgcgctacatcaagaagggccaccccaagtacagaattggagtgggcgcccctgtgtacatggctgctgtgctggagtacctgactggaaacaccctggagaagaagggcggcaaggagtttgtggaggccgtgctggagctgaggaagaagaatggccccctggaggtggccggggctgctgtgtctgctggccacggcctgcctgccaagtttgtgatccactgcaacagccctgtgtggggcgctgacaagtgtgaggagctgctggagaagacagtgaagaactgcctggccctggctgatgacaagaagctgaagagcatcgccttccccagcatcggcagcggcagaaatggcttccccaagcagacagctgcccagctgatcctgaaggccatcagcagctactttgtgtccaccatgagcagcagcatcaagacagtgtactttgtgctgtttgacagcgagagcatcggcatctacgtgcaggagatggccaagctggatgccaactag

SEQ ID NO: 283754 - DNA, 603 bp, Artificial Sequence
  derived and/or modified sequence
atgagcagccggggcggcaagaagaagagcaccaagaccagccggtctgccaaagcaggggtgatcttcccagtggggaggatgctgaggtatatcaagaaaggacaccccaaataccggataggagtgggcgcgccggtgtatatggctgcagtgttagagtacctcacggggaataccttggaaaagaaaggtgggaaggagtttgtcgaagctgtgctggagttgcgcaagaagaatggacctctcgaggtagccggcgccgccgtgagcgctggtcatggtctgcctgcaaagtttgtgattcactgcaatagtcccgtctggggcgcagataagtgtgaggagctactggaaaagacggtcaaaaactgcctagcactggctgatgacaagaaacttaaatcaatagcatttccgagcatcgggtcgggaaggaatggcttccccaagcagaccgcagcacagctgattcttaaggcaatctccagctatttcgtgtccacgatgtcctcttccatcaagaccgtttattttgtgctgtttgattcagaatccatcggcatctatgtccaggaaatggccaagctggatgcaaactag

SEQ ID NO: 283755 - DNA, 603 bp, Artificial Sequence
  derived and/or modified sequence
atgtcttctcggggaggaaaaaagaagtcaaccaaaacctctcgaagcgcaaaggcaggcgttattttccccgtggggcgtatgctgcggtatatcaaaaaaggccaccccaaataccgaattggtgtgggggctcctgtctacatggctgcagtgctggagtacttgacaggaaacacactagagaagaaaggcggaaaggagtttgtggaggctgttcttgaactgcgaaaaaagaatggtccactggaagtcgccggagcggctgttagtgccggacatggcctccccgcaaaatttgtgattcattgtaacagtccagtgtggggcgcagacaaatgcgaggagcttctggaaaagaccgtaaagaattgtcttgccttggctgacgacaaaaagctgaagtccattgctttcccgagcatcgggtctggtcgaaacggattcccgaaacagaccgctgctcagcttatactgaaagccattagttcatattttgtaagcactatgtcctcttcgataaagaccgtgtattttgtgctctttgacagtgagtccatcggcatatacgttcaggagatggcaaagctggacgcaaactag

SEQ ID NO: 283756 - DNA, 603 bp, Artificial Sequence
  derived and/or modified sequence
atgagcagcagaggcggcaagaagaagagcaccaagaccagcagaagcgccaaggccggcgtgatcttccccgtgggcagaatgctgagatacatcaagaagggccaccccaagtacagaatcggcgtgggcgcccccgtgtacatggccgccgtgctggagtacctgaccggcaacaccctggagaagaagggcggcaaggagttcgtggaggccgtgctggagctgagaaagaagaacggccccctggaggtggccggcgccgccgtgagcgccggccacggcctgcccgccaagttcgtgatccactgcaacagccccgtgtggggcgccgacaagtgcgaggagctgctggagaagaccgtgaagaactgcctggccctggccgacgacaagaagctgaagagcatcgccttccccagcatcggcagcggcagaaacggcttccccaagcagaccgccgcccagctgatcctgaaggccatcagcagctacttcgtgagcaccatgagcagcagcatcaagaccgtgtacttcgtgctgttcgacagcgagagcatcggcatctacgtgcaggagatggccaagctggacgccaactag

SEQ ID NO: 283757 - DNA, 924 bp, Artificial Sequence
  derived and/or modified sequence
agttcactcggcagcggcgccgggcggagggggagagcgcgggccgcgcgggcgggaagcgaagaggcgggcgggccagcgaggagcgcggagagaaaaggcgcgagcggccaggagggctcaggccgagacaccttgcagctgccgccgccgccaccgagccgccgctgtgctcactgatccgcctccagggccaccgccatgtcgagccgcggtgggaagaagaagtccaccaagacgtccaggtctgccaaagcaggagtcatctttcccgtggggcggatgctgcggtacatcaagaaaggccaccccaagtacaggattggagtgggggcacccgtgtacatggccgccgtcctggaatacctgacaggaaacacgctggagaagaaaggtggcaaggagtttgtggaagctgtcctggaactccggaaaaagaacgggcccttggaagtagctggagctgctgtcagcgcaggccatggcctgcctgccaagtttgtgatccactgtaatagtccagtttggggtgcagacaagtgtgaagaacttctggaaaagacagtgaaaaactgcttggccctggctgatgataagaagctgaaatccattgcatttccatccatcggcagcggcaggaacggttttccaaagcagacagcagctcagctgattctgaaggccatctccagttacttcgtgtctacaatgtcctcttccatcaaaacggtgtacttcgtgctttttgacagcgagagtataggcatctatgtgcaggaaatggccaagctggacgccaactaggctgagcaatgacagaaccagctgcaccatgtaccccaccttcagtttaaaagaaaaaaaaaatccccttcactcctactgggaggtgggacccctttcattttcagttttgctcatcta

SEQ ID NO: 283758 - DNA, 1797 bp, Artificial Sequence
  derived and/or modified sequence
atgcgggcgcaggaggacttagaaggacgcacacagcatgaaaccactagggacccaagtaccccattgcccacagagccaaagtttgatatgctctacaaaatagaggatgtcccaccctggtacctctgtatcttactgggttttcagcattatctgacttgtttttcagggaccattgccgttcccttccttctggccgaggctctgtgtgtcgggcacgaccagcacatggtctcacagctcatcggaacaatcttcacctgcgtggggattaccacactcatacagaccactgtggggatccgattgcctctgtttcaggcctctgccttcgccttcttggtgcctgccaaagccatcttggccctggagcgatggaagtgtcccccagaagaggaaatctacgggaattggagtttgccattgaacacctcccacatttggcacccacgaataagagaagtccagggcgccattatggtatctagtgtggtagaggtggtcatcggactcctcggattgccgggggcactactcaactatatagggccattgaccgtcacgcctacagtgtccctgatcggcctgtctgtgttccaggctgccggcgaccgtgccggaagccactggggtattagcgcctgtagtattctgctgattattctctttagccagtacctgaggaatcttacatttcttcttcctgtctatagatggggaaaaggattaactcttttgaggatccagatctttaaaatgtttcctattatgttggcaatcatgactgtgtggcttctctgttacgtcctgactctaaccgacgttctgcccactgatcccaaagcctacggttttcaggcacggaccgatgctcggggggatatcatggccattgcaccatggatcaggataccctacccctgtcagtgggggctgccaactgtgacagccgccgccgttctgggaatgttcagcgctacccttgccggcattattgaaagtatcggggattattatgcttgtgctcgtctggcaggggccccccccccccctgtgcatgccataaacagaggcatattcaccgaagggatctgttgtataatagctggactgctggggacaggtaacggcagtacctctagcagccccaacattggggtgttagggatcactaaggtgggaagtaggcgcgtggtgcagtatggagcagctatcatgctagtcctcgggacaatcggaaagtttaccgctctattctcgagcctgcctgatccaattctaggtggcatgttttgcactctgttcggtatgatcacggctgtggggctttcaaatctgcagttcgttgatatgaatagctctcgcaatctatttgttcttgggtttagtatgtttttcggcctgacgcttccgaattatttagaatccaaccctggagcaatcaacacaggaatcctggaagtcgatcagatcctcatagttctgcttactacagagatgtttgttggcggatgcctagctttcatcctggataatacggtccccggctcacccgaagagcggggactgatccaatggaaggctggcgcccacgccaattcggacatgtcctcatccctgaagagctatgattttcccatcggaatgggaatagtcaaacgcatcacatttctcaagtatattccaatatgcccagtgtttaagggatttagcagctcaagcaaggatcagatcgcaatacctgaagacaccccagagaataccgaaacagccagtgtttgcactaaagtgtag

SEQ ID NO: 283759 - DNA, 1797 bp, Artificial Sequence
  derived and/or modified sequence
atgagggcccaggaggacctggagggccgcacccagcacgagaccacccgggaccccagcacccccctgcccacagagcccaagtttgacatgctgtacaagattgaagatgtgcccccctggtacctgtgcatcctgctgggcttccagcactacctgacctgcttcagcggcaccatcgctgtgcccttcctgctggccgaggccctgtgtgtgggccatgaccagcacatggtgtcccagctgattggcaccatcttcacctgtgtgggcatcaccaccctcatccagaccaccgtgggcatccggctgcccctcttccaggccagcgcctttgccttcctggtgcctgccaaggccatcctggccctggagcgctggaagtgccccccagaggaggagatctacggcaactggagcctgcccctgaacaccagccacatctggcacccccgcatccgggaggtgcagggcgccatcatggtgtcctctgtggtggaggtggtgattggcctgctgggcctgcccggggccctgctgaactacatcggccccctgactgtgacccccaccgtgtccctgattggcctgagcgtcttccaggccgccggggacagagctggcagccactggggcatcagcgcctgcagcatcctgctgatcatcctcttcagccagtacctgaggaacctgaccttcctgctgcctgtgtaccgctggggcaagggcctgaccctgctgcgcatccagatcttcaagatgttccccatcatgctggccatcatgacagtgtggctgctgtgctacgtgctgaccctgacagatgtgctgcccacagaccccaaggcctacggcttccaggccaggacagatgcccggggggacatcatggccatcgccccctggatccgcatcccctacccctgccagtggggcctgcccaccgtgacagctgctgctgtgctgggcatgttcagcgccaccctggccggcatcatcgagagcatcggggactactatgcctgtgcccggctggccggggcccctcctcctcctgtgcacgccatcaacagaggcatcttcacagagggcatctgctgcatcatcgccggcctgctgggcactggaaatggcagcaccagcagcagccccaacatcggcgtgctgggcatcaccaaggtgggcagcagaagagtggtgcagtacggggccgccatcatgctggtgctgggcaccatcggcaagttcaccgccctcttcagcagcctgcctgaccccatcctgggcggcatgttctgcaccctgtttggcatgatcacagctgtgggcctgagcaacctgcagtttgtggacatgaacagcagcaggaacctgtttgtgctgggcttctccatgttcttcggcctgaccctgcccaactacctggagagcaaccctggggccatcaacacaggcatcctggaggtggaccagatcctgattgtgctgctgaccacagagatgtttgtgggcggctgcctggccttcatcctggacaacacagtgcccggcagccctgaggagcggggcctcatccagtggaaggccggggcccacgccaacagcgacatgagcagcagcctgaagagctatgacttccccatcggcatgggcatcgtgaagaggatcaccttcctgaagtacatccccatctgccctgtgttcaagggcttcagcagcagcagcaaggaccagatcgccatccctgaggacaccccagaaaatacagaaacagcctctgtgtgcaccaaggtgtag

SEQ ID NO: 283760 - DNA, 1797 bp, Artificial Sequence
  derived and/or modified sequence
atgcgggcccaggaggacctggagggccggacccagcacgagaccacacgcgaccctagcacacctcttcccaccgagccaaagtttgacatgttgtacaaaatcgaagatgtcccaccatggtacctttgcattctcctgggattccaacactatttgacctgcttttcaggaaccattgctgtcccatttctcttagccgaggctttgtgtgtggggcacgatcaacacatggtatcgcagctgataggaacaattttcacatgcgtgggcattacaacacttatccagacaacggtaggtatccggctcccccttttccaggcttccgcattcgccttcctcgtgcccgccaaggcaatactggccctggagaggtggaaatgtccacccgaggaagagatttatggaaattggtctcttcctctaaacaccagtcatatatggcaccctcggattcgggaggttcaaggcgctatcatggtctcctcagttgttgaggtggtgattggacttctcgggctgcccggagcactcttaaactatattgggccactcacagtgacccctactgtttccctgattgggctgagtgtgttccaggccgctggtgacagggcggggtcccactggggcatcagtgcatgtagtatccttctcatcatcctgttttcgcagtatctgcgcaacctcacctttttgcttcctgtatatcgatgggggaagggattgaccctgttaaggattcagatcttcaaaatgtttccgataatgttggcgattatgacggtctggctcctgtgctacgtgttgactctcacggacgtactgcccacagatcccaaggcctacggttttcaggccagaacggatgcgcgtggagatattatggcaattgccccctggatacggattccatacccctgccagtgggggttgcccacagtaaccgcagctgccgtcctaggaatgttctccgccaccctggcagggattattgagagtataggagactattacgcctgcgctagactcgccggagcacctccccctccagtgcatgcaattaatcgggggattttcaccgaaggaatttgctgtatcatcgcaggccttctggggaccggcaacggctctacttcatcaagccccaacatcggcgtcctggggataacaaaagtcgggagccgtagggtggtgcaatacggcgctgctattatgctcgtgctaggcactattggaaagttcaccgccttgttctcatccctaccagacccaattcttggcggcatgttttgcactttgttcggcatgatcactgccgttggcctctcaaacctccagtttgtggacatgaatagctcacgcaacctgttcgtgttaggcttttcaatgttttttggattgacacttccaaactacctggagtcaaatcctggcgcaatcaacaccgggattcttgaggtggatcagatactgattgtgttgctgactactgagatgtttgtcggagggtgcctggcatttattctggataataccgtcccagggtctcccgaggagcggggacttattcagtggaaagcaggtgcccacgctaactcagacatgtcctccagccttaagagctatgattttccaataggaatgggcatcgtcaagcgaatcacgttcctaaagtacatcccgatctgccccgtttttaagggctttagtagttcttcgaaagaccagatcgctatccctgaggacacgcctgagaatacagaaacggcttcggtgtgtactaaagtatag

SEQ ID NO: 283761 - DNA, 1797 bp, Artificial Sequence
  derived and/or modified sequence
atgagggcgcaggaggatctggagggtcgcacgcagcacgagacaactagagatcccagcacacccttgcctacggagccaaagtttgacatgctttacaagatcgaggatgtcccgccatggtacctctgcattctgctgggattccagcactatctgacatgcttctcaggtactattgccgtcccattcctgttagcggaagccctttgcgttgggcacgaccagcatatggtgtcacagcttatcggaacaatatttacttgcgttggaatcacaacactgattcagaccacagttggcattaggctccccttattccaggctagcgcattcgcgtttcttgtgccagcaaaggctattctggccctggagcggtggaagtgccccccagaggaggaaatctatggcaattggtccctgcctctgaatacctctcacatctggcaccctcgcatccgggaagtgcaaggggcaattatggtttcttcggtcgtggaagtcgtcatcggtctcctcggattaccgggagctctgcttaactatattggtcccctcactgtcacccctaccgtctctctgataggattaagtgtattccaggcggctggcgatagagcaggttcccactgggggattagcgcctgctccatcctgctcataatcttattttcccaatatctcagaaatctgacattcctgctgcctgtctaccgctgggggaaagggctgacattgcttcggattcagatcttcaaaatgttccctattatgcttgccattatgacagtgtggctcttatgctatgtcctgactctgaccgacgtgcttcccactgaccctaaagcatacgggttccaggcacgcacggatgccaggggtgacataatggctatagccccatggattcgcataccgtatccatgccagtgggggcttcccacggtcacagccgctgcagtgcttggaatgttttctgccacattggcaggtattatcgaatccatcggcgattattacgcatgcgccaggctggcgggagctcctcctcctcctgtccacgccatcaacagggggatattcaccgaaggtatctgctgtattatcgctgggctcctgggaactgggaatgggagcacttctagctctcctaacattggagtgctggggattacgaaagtgggaagtcgcagggtggtgcagtacggggctgctatcatgctagttctaggcaccattggcaagtttacagccttattctcttctcttccagaccccattttggggggaatgttctgtaccctgttcggaatgatcacagccgtagggctctctaaccttcagttcgtggacatgaactcaagtcggaatttattcgtgttgggattttccatgttctttggtctgacgctgccaaactacctggaatcaaatccgggagccatcaatacgggaatattggaggtggatcagatcttaatcgtgctgttaacaactgaaatgttcgtgggagggtgtctggctttcatcctggacaacacggtcccaggctctccagaagagagaggcctgatacaatggaaggccggagctcacgctaactccgatatgtcctccagcctgaagagttatgacttcccaattggaatgggaatcgtgaaaagaatcacatttctgaaatacatccccatctgtcctgtgttcaagggattctcttctagctccaaggatcaaatcgcgattcctgaggacactcccgaaaatacagaaactgcaagtgtatgcactaaggtttag

SEQ ID NO: 283762 - DNA, 2299 bp, Artificial Sequence
  derived and/or modified sequence
gtcatcccctcttctcctcaggaactgctcaaacctgtgccccaaagatgagggcccaggaggacctcgagggccggacacagcatgaaaccaccagggacccctcgaccccgctacccacagagcctaagtttgacatgttgtacaagatcgaggacgtgccaccttggtacctgtgcatcctgctgggcttccagcactacctgacatgcttcagtggtaccatcgccgtgcccttcctgctggctgaggcgctgtgtgtgggccacgaccagcacatggttagtcagctcatcggcaccatcttcacgtgcgtgggcatcaccactctcatccagaccaccgtgggcatccggctgccgctgttccaggccagtgcctttgcatttctggttccagccaaagccatactggctctggagagatggaaatgccccccggaagaggagatctacggtaactggagtctgcccctgaacacctctcatatttggcacccacggatacgggaggtccagggtgcaatcatggtgtccagcgtggtggaggtggtgattggcctgctggggctgcctggggccctgctcaactacattgggcctctcacagtcacccccactgtctccctcattggcctttctgtcttccaagctgctggcgaccgagctggctcccactggggcatctcagcttgctccattctcctgatcatcctcttctcccagtacctgcgcaacctcaccttcctgctgcctgtctaccgctggggcaagggcctcactctcctccgcatccagatcttcaaaatgtttcctatcatgctggccatcatgaccgtgtggctgctctgctatgtcctgaccttgacagacgtgctgcccacagacccaaaagcctatggcttccaggcacgaaccgatgcccgtggtgacatcatggctattgcaccctggatccgcatcccctacccctgtcagtggggcctgcccacggtgactgcggctgctgtcctgggaatgttcagcgccactctggcaggcatcattgagtccatcggagattactacgcctgtgcccgcctggctggtgcaccaccccctccagtacatgctatcaacaggggcatcttcaccgaaggcatttgctgcatcatcgcggggctattgggcacgggcaacgggtccacctcgtccagtcccaacattggcgtcctgggaattaccaaggtgggcagccggcgcgtggtgcagtatggtgcggctatcatgctggtcctgggcaccatcggcaagttcacggccctcttctcctcgctccctgaccccatcctggggggcatgttctgcactctctttggcatgattacagctgtggggctgtccaacctgcaatttgtggacatgaactcctctcgcaacctcttcgtgctgggattttccatgttcttcgggctcacgctgcccaattacctggagtccaaccctggcgccatcaatacaggcattcttgaagtggatcagattctgattgtgctgctgaccacggagatgtttgtgggcgggtgccttgctttcatacttgacaacacagtgccagggagcccagaggagcgtggtctgatacagtggaaagctggggctcatgccaacagtgacatgtcttccagcctcaagagctacgatttccccattgggatgggcatagtaaaaagaattacctttctgaaatacattcctatctgcccagtcttcaaaggattttcttcaagttcaaaagatcagattgcaattccagaagacactccagaaaatacagaaactgcatctgtgtgcaccaaggtctgaaaaatgacttccaggaaaggaagcatggtatataacaggaaaagaaaactacatggggaaccagaagacctaagcctgaaatcccagccctgcccctaactaacttctgtgtaaactcagataagtcacctttctctgggattcaaatttttgcatcagttaaaaaaaaaggggtgggggggaatgggccaaagtctgagtcttagagacttgtaccaatgttatgctatgtctctaaatctttactctcctaagtagacttgtcagcatctaggaagaacagctagaaattttcctctgtgatattttagactgcaagttgaaaaaaataaaaagaaatgagggcaggttccagggcctgaaatgtaggtatgctgcaaggcttttacattgaatttgaccctacatcacttcaagactaatgcataatattaaacatcatgttgaagaaataa

SEQ ID NO: 283763 - DNA, 1797 bp, Artificial Sequence
  derived and/or modified sequence
atgagagcccaggaggacctggagggcagaacccagcacgagaccaccagagaccccagcacccccctgcccaccgagcccaagttcgacatgctgtacaagatcgaggacgtgcccccctggtacctgtgcatcctgctgggcttccagcactacctgacctgcttcagcggcaccatcgccgtgcccttcctgctggccgaggccctgtgcgtgggccacgaccagcacatggtgagccagctgatcggcaccatcttcacctgcgtgggcatcaccaccctgatccagaccaccgtgggcatcagactgcccctgttccaggccagcgccttcgccttcctggtgcccgccaaggccatcctggccctggagagatggaagtgcccccccgaggaggagatctacggcaactggagcctgcccctgaacaccagccacatctggcaccccagaatcagagaggtgcagggcgccatcatggtgagcagcgtggtggaggtggtgatcggcctgctgggcctgcccggcgccctgctgaactacatcggccccctgaccgtgacccccaccgtgagcctgatcggcctgagcgtgttccaggccgccggcgacagagccggcagccactggggcatcagcgcctgcagcatcctgctgatcatcctgttcagccagtacctgagaaacctgaccttcctgctgcccgtgtacagatggggcaagggcctgaccctgctgagaatccagatcttcaagatgttccccatcatgctggccatcatgaccgtgtggctgctgtgctacgtgctgaccctgaccgacgtgctgcccaccgaccccaaggcctacggcttccaggccagaaccgacgccagaggcgacatcatggccatcgccccctggatcagaatcccctacccctgccagtggggcctgcccaccgtgaccgccgccgccgtgctgggcatgttcagcgccaccctggccggcatcatcgagagcatcggcgactactacgcctgcgccagactggccggcgccccccccccccccgtgcacgccatcaacagaggcatcttcaccgagggcatctgctgcatcatcgccggcctgctgggcaccggcaacggcagcaccagcagcagccccaacatcggcgtgctgggcatcaccaaggtgggcagcagaagagtggtgcagtacggcgccgccatcatgctggtgctgggcaccatcggcaagttcaccgccctgttcagcagcctgcccgaccccatcctgggcggcatgttctgcaccctgttcggcatgatcaccgccgtgggcctgagcaacctgcagttcgtggacatgaacagcagcagaaacctgttcgtgctgggcttcagcatgttcttcggcctgaccctgcccaactacctggagagcaaccccggcgccatcaacaccggcatcctggaggtggaccagatcctgatcgtgctgctgaccaccgagatgttcgtgggcggctgcctggccttcatcctggacaacaccgtgcccggcagccccgaggagagaggcctgatccagtggaaggccggcgcccacgccaacagcgacatgagcagcagcctgaagagctacgacttccccatcggcatgggcatcgtgaagagaatcaccttcctgaagtacatccccatctgccccgtgttcaagggcttcagcagcagcagcaaggaccagatcgccatccccgaggacacccccgagaacaccgagaccgccagcgtgtgcaccaaggtgtag

SEQ ID NO: 283764 - protein, 747 aa, Artificial Sequence
  derived and/or modified sequence
MWGFLKRPVVVTADINLSLVALTGMGLLSRLWRLTYPRAVVFDEVYYGQYISFYMKQIFFLDDSGPPFGHMVLALGGYLGGFDGNFLWNRIGAEYSSNVPVWSLRLLPALAGALSVPMAYQIVLELHFSHCAAMGAALLMLIENALITQSRLMLLESVLIFFNLLAVLSYLKFFNCQKHSPFSLSWWFWLTLTGVACSCAVGIKYMGVFTYVLVLGVAAVHAWHLLGDQTLSNVGADVQCCMRPACMGQMQMSQGVCVFCHLLARAVALLVIPVVLYLLFFYVHLILVFRSGPHDQIMSSAFQASLEGGLARITQGQPLEVAFGSQVTLRNVFGKPVPCWLHSHQDTYPMIYENGRGSSHQQQVTCYPFKDVNNWWIVKDPRRHQLVVSSPPRPVRHGDMVQLVHGMTTRSLNTHDVAAPLSPHSQEVSCYIDYNISMPAQNLWRLEIVNRGSDTDVWKTILSEVRFVHVNTSAVLKLSGAHLPDWGYRQLEIVGEKLSRGYHGSTVWNVEEHRYGASQEQRERERELHSPAQVDVSRNLSFMARFSELQWRMLALRSDDSEHKYSSSPLEWVTLDTNIAYWLHPRTSAQIHLLGNIVIWVSGSLALAIYALLSLWYLLRRRRNVHDLPQDAWLRWVLAGALCAGGWAVNYLPFFLMEKTLFLYHYLPALTFQILLLPVVLQHISDHLCRSQLQRSIFSALVVAWYSSACHVSNTLRPLTYGDKSLSPHELKALRWKDSWDILIRKH

SEQ ID NO: 283765 - protein, 142 aa, Artificial Sequence
  derived and/or modified sequence
MWGFLKRPVVVTADINLSLVALTGMGLLSRLWRLTYPRAVVFDEVYYGQYISFYMKQIFFLDDSGPPFGHMVLALGGYLGGFDGNFLWNRIGAEYSSNVPVWSLRLLPALAGALSVPMAYQIVLELHFSHCAAMGAALLMLI

SEQ ID NO: 283766 - protein, 218 aa, Artificial Sequence
  derived and/or modified sequence
MKQIFFLDDSGPPFGHMVLALGGYLGGFDGNFLWNRIGAEYSSNVPVWSLRLLPALAGALSVPMAYQIVLELHFSHCAAMGAALLMLIENALITQSRLMLLESVLIFFNLLAVLSYLKFFNCQKHSPFSLSWWFWLTLTGVACSCAVGIKYMGVFTYVLVLGVAAVHAWHLLGDQTLSNVGADVQCCMRPACMGQMQMSQGVCVFCHLLARAVALLVI

SEQ ID NO: 283767 - DNA, 2244 bp, Artificial Sequence
  derived and/or modified sequence
atgtggggatttctaaaacgtccagtcgtggtaacagctgatatcaatttgagcctggttgcactcaccggcatgggattgctgtcccggctgtggcgccttacataccctagagctgtggtcttcgatgaagtatactatgggcaatacatctccttttatatgaagcagatctttttccttgacgacagtggcccaccctttggccacatggtcttggcattggggggctacctgggcggcttcgacggcaattttttatggaatcggattggggctgaatactcttctaacgtgccggtgtggagcttgcggctcctgccagctcttgcgggggccttatccgtccctatggcctatcagatcgtcctcgaactgcacttttcccactgcgccgccatgggcgcagcactcctgatgcttatcgagaatgccctgatcacccagtccagactgatgcttttagaaagcgttctgatcttctttaaccttctcgcagtgttaagttacctgaagtttttcaactgccagaaacactcacctttctcactgagttggtggttctggcttacactcacgggagtcgcctgctcctgcgctgtgggaatcaaatacatgggcgtgtttacttatgtgctggtgttaggtgtcgccgccgtgcacgcctggcacctcctgggagatcagacactatcaaatgttggagcagacgtgcagtgttgcatgcggccagcgtgcatgggacagatgcagatgagccagggagtttgtgtgttctgccacttgctcgccagagccgtggctctgttggtcattcctgtcgtgttgtacctgctgtttttctatgtccatttgatccttgtctttcgcagtggcccccacgaccagataatgtcttctgctttccaggcatccctcgagggaggcttagccaggattactcaaggccagccacttgaggtcgccttcggatcccaagtgaccctccgtaatgtctttgggaaaccagtgccgtgctggctacattcacaccaggatacatacccaatgatctacgaaaatggaaggggcagctctcatcagcagcaggtgacctgctaccccttcaaagacgtgaacaattggtggatagtaaaggatcctaggcgccaccaactcgttgtgtctagcccgccgagacccgtgcggcacggtgatatggttcaactggtgcatggtatgaccacgaggagtctgaatacacatgacgtagccgcaccactgagtccccacagccaggaggtgtcttgttatattgattacaatatttctatgcccgcccagaacttgtggcgcctggagattgtcaaccgagggagcgacacagatgtgtggaaaactatcttgtccgaggtgagatttgttcatgtgaacacaagtgcggtgctgaaattgtctggggcccaccttcccgattgggggtataggcagttggagattgtaggtgagaaactgtcccggggataccatggctccaccgtgtggaacgtcgaagagcacagatatggtgcttcccaggaacagagggaaagggagagagaactccatagtccagctcaggtagacgtgtccagaaatttaagtttcatggctaggttttccgaattacagtggcggatgttggcactgcgctccgacgattccgagcacaaatattcgtcatccccactggagtgggtgacactcgacacaaacatagcatactggttacacccacggacttctgcgcaaatccatctcctcggtaacatcgtgatatgggtatctgggtccctggctttagctatctacgctctattatcactgtggtatttgcttcggcggagacggaatgtacatgatttaccacaggacgcgtggctgaggtgggtgctggcaggtgcattgtgcgctggtggttgggctgttaactatctgccctttttccttatggagaaaactctatttctttatcactacctgcctgctcttacattccagatcctgctgctgccagtcgtactccagcatatatccgatcatctgtgcaggagtcagttgcagcgcagcatcttctccgcactggtggtcgcctggtacagtagcgcttgccacgtgagtaacactctaaggccacttacttacggggataagagtttaagtccccacgagcttaaagctctgcgttggaaagatagttgggatattttgataaggaaacattag

SEQ ID NO: 283768 - DNA, 2244 bp, Artificial Sequence
  derived and/or modified sequence
atgtggggcttcctgaagaggcctgtggtggtgacagctgacatcaacctgagcctggtggccctgaccggcatgggcctgctgagccggctgtggaggctgacctaccccagggctgtggtgtttgatgaggtgtactacggccagtacatctccttctacatgaagcagatcttcttcctggatgacagcggcccccccttcggccacatggtgctggccctgggcggctacctgggcggctttgatggcaacttcctgtggaacagaattggagctgagtacagcagcaatgtgcctgtgtggagcctgcggctgctgcctgccctggccggggccctgtctgtgcccatggcctaccagatcgtgctggagctgcacttcagccactgtgccgccatgggcgccgccctgctgatgctgattgaaaatgccctgatcacccagagccggctgatgctgctggagagcgtgctgatcttcttcaacctgctggccgtgctgagctacctgaagttcttcaactgccagaagcacagccccttcagcctgtcctggtggttctggctgaccctgactggagtggcctgcagctgtgctgtgggcatcaagtacatgggcgtcttcacctacgtgctggtgctgggcgtggccgctgtgcacgcctggcacctgctgggggaccagaccctgagcaatgtgggcgcagatgtgcagtgctgcatgaggcctgcctgcatgggccagatgcagatgagccagggcgtgtgtgtgttctgccacctgctggcccgggctgtggccctgctggtgattcctgtggtgctgtacctgctcttcttctacgtgcacctgatcctggtgttccgcagcggcccccatgaccagatcatgagcagcgccttccaggccagcctggagggcggcctggcccgcatcacccagggccagcccctggaggtggccttcggcagccaggtgaccctgagaaatgtgtttgggaagcctgtgccctgctggctgcacagccaccaggacacctaccccatgatctatgaaaatggccggggcagcagccaccagcagcaggtgacctgctaccccttcaaggatgtgaacaactggtggatcgtgaaggacccccggcggcaccagctggtggtgagcagcccccccaggcctgtgagacatggagacatggtgcagctggtgcacggcatgaccaccaggagcctgaacacccatgatgtggccgcccccctgagcccccacagccaggaggtgtcctgctacatcgactacaacatctccatgcctgcccagaacctgtggaggctggagatcgtgaacagaggaagtgacacagatgtgtggaagaccatcctgtctgaggtgcgctttgtgcacgtgaacaccagcgctgtgctgaagctgagcggggcccacctgcctgactggggctaccggcagctggagatcgtgggggagaagctgagccggggctaccacggcagcacagtgtggaatgtggaggagcacagatatggagccagccaggagcagcgggagcgggagcgggagctgcacagccctgcccaggtggatgtgtccaggaacctgtccttcatggcccgcttcagcgagctgcagtggaggatgctggccctgcggagtgatgattctgagcacaagtacagcagcagccccctggagtgggtgaccctggacaccaacatcgcctactggctgcaccccaggaccagcgcccagatccacctgctgggcaacatcgtcatctgggtgtctggcagcctggccctggccatctatgccctgctgagcctgtggtacctgctgcggaggagaagaaatgtgcatgacctgccccaggatgcctggctgcgctgggtgctggccggggccctgtgtgccggcggctgggccgtgaactacctgcccttcttcctgatggagaagaccctcttcctgtaccactacctgcctgccctgaccttccagatcctgctgctgcctgtggtgctgcagcacatcagtgaccacctgtgccgcagccagctgcagaggagcatcttcagcgccctggtggtggcctggtacagcagcgcctgccacgtgagcaacaccctgcggcccctgacctatggagacaagagcctgagcccccatgagctgaaggccctgcgctggaaggacagctgggacatcctgatcaggaagcactag

SEQ ID NO: 283769 - DNA, 2244 bp, Artificial Sequence
  derived and/or modified sequence
atgtggggcttcctgaagcggcccgtggtggtgaccgccgacatcaatcttagcctcgtcgccctaaccggcatgggtctcttgtctcgcctctggcgcctcacatacccgcgcgcggtagtgttcgatgaagtctactatggccagtacatctccttttatatgaaacagatttttttccttgacgacagcggacccccgtttggccatatggtgctggctctgggcggatatctgggagggtttgatggcaactttctatggaacagaattggggcggagtacagttcaaacgtgccagtttggagcttacgtctgctgcccgcacttgcgggggctttgtctgtgcccatggcctatcaaattgtgttggagcttcacttcagtcactgcgccgccatgggagccgccctgttaatgctaattgagaatgcgctaattacccagtcccgcctcatgttgcttgaaagcgttctgattttttttaaccttctggctgtgctgagttacctcaagttcttcaattgccagaaacattcaccattttcgttatcttggtggttctggttgaccctcacaggcgttgcctgttcctgcgcggttggaatcaagtacatgggagtcttcacgtatgtactcgtgctcggtgttgctgctgtgcacgcttggcatttactgggcgaccagactctgagcaatgtcggcgccgacgttcagtgctgtatgaggcccgcctgtatgggacagatgcagatgtctcagggcgtgtgcgtattctgccatttattagctcgcgcagtcgcattgttggtgatacccgttgtgctgtatttgctgttcttctacgtgcatctgatacttgtctttcgaagcggaccacatgatcaaatcatgtcctcagctttccaagctagcttggagggtggactggctcggatcacacagggccagccattagaggtggccttcgggtctcaggtaaccctgcgaaatgtattcggcaaacccgtgccatgctggctccattctcatcaggacacttatcccatgatatacgagaacggccgcggttcctcacatcagcaacaggttacatgttatccatttaaggacgtgaataactggtggatcgtgaaggatccacgcagacatcagttggtggtgagctcgcctcccagacctgtgcgccacggcgacatggtgcagctagttcatggcatgactacacggagcctgaacacacacgacgtggcagcgcccctgtcccctcactctcaggaggtgtcctgctacattgactacaatatttctatgcccgcccaaaacctttggcgtcttgaaattgtcaaccgggggtctgacactgacgtttggaaaacaatattatccgaggtgcggttcgtgcatgtgaatactagcgccgtccttaagctttcaggcgcccatttgcctgactggggctacagacagttagaaatcgtgggggaaaaactgtctcgtggatatcacggatcgaccgtctggaatgtggaggagcataggtatggcgccagccaggagcagagggagagggagagggagttgcactcccccgcccaggtggatgtgagtcggaacttatcattcatggccagattttctgagttacagtggcgaatgctggccctgcggtcagatgactcagagcataaatattcctcaagcccgctggaatgggtcactctggatacaaacatagcctactggcttcatccacggacctccgctcagatccacttgcttggtaatatcgtgatttgggtctctggaagcctcgccctggctatctacgcccttctgtctctttggtacctgttgaggcgtcggcggaatgtgcacgacctgcctcaggatgcctggctgcggtgggtgctggctggagcattgtgcgcaggcggctgggcagtgaattaccttccattttttctgatggagaagacattgtttctctaccattatctcccagcacttacttttcagatactgctgctacctgtagttctgcaacacattagcgatcacttatgcaggtcgcaactgcagcggagtatcttcagcgccctggtcgtcgcttggtacagctccgcctgtcatgtaagcaacacccttaggcccctgacttatggggacaaaagtctcagtccccacgagctcaaagcgctccgatggaaagatagctgggatatactgattcgtaaacattag

SEQ ID NO: 283770 - DNA, 2244 bp, Artificial Sequence
  derived and/or modified sequence
atgtggggtttcctgaaacgacctgtggtggtcaccgccgatataaatctgtcgctggtagcccttacaggcatggggctcttgagcaggctgtggagattaacatacccccgagcagttgtgttcgatgaagtttattacggtcaatacattagcttctacatgaagcagatcttctttcttgacgactccggcccaccttttggccacatggtgctggctttgggcggatatcttggcggatttgacggcaattttctgtggaatcgtatcggagctgagtacagttcgaatgtgcctgtctggtcattgcgtctcctccccgcactcgcgggagcacttagtgttcccatggcctaccaaatcgtgctggagttgcatttcagtcactgcgcagccatgggggctgcacttctaatgctgattgagaatgctctcataactcagtcacggctcatgctactcgagtcagtactcatcttctttaaccttcttgccgtactgtcctacctaaaatttttcaactgtcagaagcattctccattctccctgagttggtggttttggctcaccctcactggagtcgcctgttcatgcgctgttgggataaaatatatgggcgtgtttacctacgtcctggtgctgggcgtcgctgcagtacatgcctggcatctgctgggtgatcagaccctgagtaacgtcggggcagacgtgcaatgctgtatgaggccggcttgcatgggtcaaatgcagatgagtcagggcgtgtgcgtgttttgccacctccttgcgagagccgttgccctcctggtaatacccgtggtgttatatctgctgttcttttatgtacatctcattcttgtattcaggtcgggacctcacgaccaaataatgagttctgcctttcaggcgtcactggagggtggattagcgaggatcacccaaggccagcctctggaagttgctttcggttctcaggtcaccctacggaacgtgttcggaaaaccagtgccatgttggcttcactcacaccaggacacataccctatgatttacgagaacggacggggttcgagccaccaacagcaggttacttgttatccattcaaagacgtcaacaactggtggatcgttaaagatcctagaaggcatcaactcgttgtcagttcaccacccaggcctgtccggcacggcgacatggtgcagctggtgcatgggatgacgaccaggtctctaaacacacatgatgttgctgcccctctcagtccacactcacaggaggtgtcttgctatatcgattacaacatatcaatgcccgctcagaacctctggaggctggagatcgtcaaccgcggaagtgacaccgacgtatggaaaaccattctcagtgaggtcagatttgtccatgtaaatacctctgccgtcttgaaactgtctggcgctcatctcccagattgggggtatcgtcaactggagatcgttggggagaagctgtctagaggctatcacggttctaccgtctggaatgtggaagagcaccgctacggtgccagccaggaacaacgagagcgcgagcgcgaactacactctcccgcacaggttgacgtctcccgaaaccttagttttatggccagatttagtgagcttcagtggcgtatgcttgcactcagaagtgatgattccgaacataagtatagctcaagcccattggaatgggtgaccttggacaccaacattgcatactggctgcatcctaggacctccgctcaaattcacctactcggtaacatcgtaatctgggtcagcggttctcttgcactggctatttacgcgctgctgtccctgtggtacttattacgtcggaggcgtaacgttcatgacctaccccaggacgcctggttaaggtgggttctcgcaggcgctctgtgcgctgggggatgggccgtgaactatcttcctttctttcttatggagaagaccctatttttatatcattacctgcctgcactgaccttccagattctcctccttccggtggtactccagcacatttcagatcatttgtgtcgttcacagcttcagcggtccatcttttctgcactggtggtggcctggtactcttcagcctgtcatgttagcaatacactccggcctctcacgtacggagataagtcccttagcccccatgaattgaaggcgctcaggtggaaggattcttgggacatactcatccgcaaacattag

SEQ ID NO: 283771 - DNA, 3123 bp, Artificial Sequence
  derived and/or modified sequence
cccgcaggctcggtgaatcgaacgttgagcagggcggtgggtggtgcggagtgccgagcggcctcacccccaaccgtcggcccagtcggacggttccgaggcgttgccgggagccgggcgcggctctgtgtggactcggagaaacgcggggcgtctgcctgagcccgcttttctacaagatgtggggatttttgaagcgccctgtagtggtgacggctgacatcaacttgagccttgtggccctgactgggatggggttactgagccggctgtggcgactcacctacccgcgggctgtggtttttgacgaagtatattatgggcagtacatctctttttacatgaaacaaatcttcttcttggatgacagtgggccgccatttggccacatggtgctggccttgggaggttatttaggaggattcgatggcaattttttgtggaacagaattggagcagaatacagtagcaacgtgcctgtgtggtccctgcgcctgctgccagcactcgcgggggccttgtcggtccccatggcctaccagatagtgttggagctccacttttctcattgtgccgccatgggagctgctctgttgatgcttatcgagaatgctctcatcactcagtcaaggctaatgcttttggaatcagtgttaatatttttcaatctattggccgtgttgtcctacctgaagttcttcaactgccaaaagcacagccctttttctctgagctggtggttctggctaacactgacaggggtcgcttgttcctgtgcagtgggcatcaagtacatgggtgtgttcacgtacgtgctcgtgctgggtgttgcagctgtccatgcctggcacctgcttggagaccagactttgtccaatgtaggtgctgatgtccagtgctgcatgaggccggcctgtatggggcagatgcagatgtcacagggggtctgtgtgttctgtcacttgctcgcccgagcagtggctttgctggtcatcccggtcgtcctgtacttactgttcttctacgtccacttgattctagtcttccgctctgggccccacgaccaaatcatgtccagtgccttccaggccagcttagagggaggactagctcggatcactcagggtcagccactggaggtggcctttgggtcccaggtcactctgaggaacgtctttgggaaacctgtgccctgctggcttcattcccaccaggacacctaccccatgatatatgagaacggccgaggcagctcccaccagcaacaggtgacctgttaccccttcaaagatgtcaataactggtggattgtaaaggatcccaggaggcaccagctggtggtgagcagccctccgagacctgtgaggcacggggacatggtgcagctggtccacggcatgaccacccgctccctgaacacgcatgatgttgcagcccccctgagcccccattcacaggaggtctcctgctacattgactataacatctccatgcccgcccagaacctctggagactggaaattgtgaacagaggatctgacacagacgtctggaagaccatcctctcagaggtccgctttgtgcacgtgaacacttccgctgtcttaaagctgagcggggctcacctccctgactgggggtatcggcaactggagatcgtcggggagaagctgtcccggggctaccacgggagcacggtgtggaacgtggaggagcaccgatacggcgcgagccaggagcagagggagcgggaacgggagctgcactcacctgcgcaggtggacgtcagcaggaacctcagcttcatggcgagattctcggagctgcagtggaggatgctggcgctgagaagtgatgactcggaacacaagtacagctccagcccactggagtgggtcaccctggacaccaatattgcctactggctgcaccccaggaccagcgctcagatccacctacttggaaacatagtgatctgggtttcgggcagcctcgctctggccatctacgccctgctgtccttgtggtacctgctccgacggcgaagaaatgtccatgacctccctcaggatgcctggctgcgctgggtgctggctggggcgctgtgtgccggtggctgggcagtgaactacctcccgttcttcctgatggagaagacactcttcctctaccactacctgcccgcactcaccttccaaatccttctgctccctgtggtcctgcagcacatcagcgaccacctgtgcaggtcccagctccagaggagcatcttcagcgccctggtggtggcctggtactcctccgcgtgccacgtgtccaacacgctgcgcccactcacctacggggacaagtcactctcgccacatgaactcaaggcccttcgctggaaagacagctgggacatcttgatccgaaaacactagaacaagagtgtggcaaagaacacccgtgctggggtcgggatgaggttgaagggtcttggtcaatgtacgtaatgagcagggtgggccccacgctgggaggacacgggctgggctgagcagggcctctagtggaacacatgggggtctcattgaaaagctctctgatgagcacctccttttgtgcaaagttaattttttctcgacaataaagatattccgtgtctttacccctgaactaagacacagggagtatttcagaggccagcgtaggagtcattgacaacaaaaagccgagaacccagggccagcagtggagcctcagcagaccagggcctggtccttgctaactgctgcagggtggagtttgatctggcagacccgatcctccttcatgaacacccagcaacctgagcaagtcccggccctgccctcagcgagcccggcaggcgtcctgggacagctcagtgttggagggccacctgaaccacgagccagggctggggcttgcatgtcattgtctatgacagcgtcaagactggcccttggcaccgtgctgtgtggaaaccctcccctctgagactccactgagacgtggctgagtgaaatcttcctcgtcagtggtcaaggtgtgtcatccatacagctccatgcctttgtcttttttaaatgtaattaaaaaaggaaccaactggcgtttgta

SEQ ID NO: 283772 - DNA, 847 bp, Artificial Sequence
  derived and/or modified sequence
cggagtgccgagcggcctcacccccaaccgtcggcccagtcggacggttccgaggcgttgccgggagccgggcgcggctctgtgtggactcggagaaacgcggggcgtctgcctgagcccgcttttctacaagatgtggggatttttgaagcgccctgtagtggtgacggctgacatcaacttgagccttgtggccctgactgggatggggttactgagccggctgtggcgactcacctacccgcgggctgtggtgttatttaggaggattcgatggcaattttttgtggaacagaattggagcagaatacagtagcaacgtgcctgtgtggtccctgcgcctgctgccagcactcgcgggggccttgtcggtccccatggcctaccagatagtgttggagctccacttttctcattgtgccgccatgggagctgctctgttgatgcttatcgagaatgctctcatcactcagtcaaggctaatgcttttggaatcagtgttaatatttttcaatctattggccgtgttgtcctacctgaagttcttcaactgccaaaagcacagtcttccgctctgggccccacgaccaaatcatgtccagtgccttccaggccagcttagagggaggactagctcggatcactcagggtcagccactggaggtggcctttgggtcccaggtcactctgaggaacgtctttgggaaacctgtgccctgctggcttcattcccaccaggacacctaccccatgatgtaagatatgagaacggccgaggcagctcccaccagcaacaggtgacctgttaccccttcaaagatgtcaataactggtggattgtaaagga

SEQ ID NO: 283773 - DNA, 2244 bp, Artificial Sequence
  derived and/or modified sequence
atgtggggcttcctgaagagacccgtggtggtgaccgccgacatcaacctgagcctggtggccctgaccggcatgggcctgctgagcagactgtggagactgacctaccccagagccgtggtgttcgacgaggtgtactacggccagtacatcagcttctacatgaagcagatcttcttcctggacgacagcggcccccccttcggccacatggtgctggccctgggcggctacctgggcggcttcgacggcaacttcctgtggaacagaatcggcgccgagtacagcagcaacgtgcccgtgtggagcctgagactgctgcccgccctggccggcgccctgagcgtgcccatggcctaccagatcgtgctggagctgcacttcagccactgcgccgccatgggcgccgccctgctgatgctgatcgagaacgccctgatcacccagagcagactgatgctgctggagagcgtgctgatcttcttcaacctgctggccgtgctgagctacctgaagttcttcaactgccagaagcacagccccttcagcctgagctggtggttctggctgaccctgaccggcgtggcctgcagctgcgccgtgggcatcaagtacatgggcgtgttcacctacgtgctggtgctgggcgtggccgccgtgcacgcctggcacctgctgggcgaccagaccctgagcaacgtgggcgccgacgtgcagtgctgcatgagacccgcctgcatgggccagatgcagatgagccagggcgtgtgcgtgttctgccacctgctggccagagccgtggccctgctggtgatccccgtggtgctgtacctgctgttcttctacgtgcacctgatcctggtgttcagaagcggcccccacgaccagatcatgagcagcgccttccaggccagcctggagggcggcctggccagaatcacccagggccagcccctggaggtggccttcggcagccaggtgaccctgagaaacgtgttcggcaagcccgtgccctgctggctgcacagccaccaggacacctaccccatgatctacgagaacggcagaggcagcagccaccagcagcaggtgacctgctaccccttcaaggacgtgaacaactggtggatcgtgaaggaccccagaagacaccagctggtggtgagcagcccccccagacccgtgagacacggcgacatggtgcagctggtgcacggcatgaccaccagaagcctgaacacccacgacgtggccgcccccctgagcccccacagccaggaggtgagctgctacatcgactacaacatcagcatgcccgcccagaacctgtggagactggagatcgtgaacagaggcagcgacaccgacgtgtggaagaccatcctgagcgaggtgagattcgtgcacgtgaacaccagcgccgtgctgaagctgagcggcgcccacctgcccgactggggctacagacagctggagatcgtgggcgagaagctgagcagaggctaccacggcagcaccgtgtggaacgtggaggagcacagatacggcgccagccaggagcagagagagagagagagagagctgcacagccccgcccaggtggacgtgagcagaaacctgagcttcatggccagattcagcgagctgcagtggagaatgctggccctgagaagcgacgacagcgagcacaagtacagcagcagccccctggagtgggtgaccctggacaccaacatcgcctactggctgcaccccagaaccagcgcccagatccacctgctgggcaacatcgtgatctgggtgagcggcagcctggccctggccatctacgccctgctgagcctgtggtacctgctgagaagaagaagaaacgtgcacgacctgccccaggacgcctggctgagatgggtgctggccggcgccctgtgcgccggcggctgggccgtgaactacctgcccttcttcctgatggagaagaccctgttcctgtaccactacctgcccgccctgaccttccagatcctgctgctgcccgtggtgctgcagcacatcagcgaccacctgtgcagaagccagctgcagagaagcatcttcagcgccctggtggtggcctggtacagcagcgcctgccacgtgagcaacaccctgagacccctgacctacggcgacaagagcctgagcccccacgagctgaaggccctgagatggaaggacagctgggacatcctgatcagaaagcactag

SEQ ID NO: 283774 - DNA, 117 bp, Artificial Sequence
  derived and/or modified sequence
ggaatcatcgcatagaatcgaatggaattatcatcgaatggaatcgaatggaatcaacatcaaacgaaaaaaaaccggaattatcgaatggaatcgaagagaatcatcgaacggacc

SEQ ID NO: 283775 - protein, 334 aa, Artificial Sequence
  derived and/or modified sequence
MATEEKKPETEAARAQPTPSSSATQSKPTPVKPNYALKFTLAGHTKAVSSVKFSPNGEWLASSSADKLIKIWGAYDGKFEKTISGHKLGISDVAWSSDSNLLVSASDDKTLKIWDVSSGKCLKTLKGHSNYVFCCNFNPQSNLIVSGSFDESVRIWDVKTGKCLKTLPAHSDPVSAVHFNRDGSLIVSSSYDGLCRIWDTASGQCLKTLIDDDNPPVSFVKFSPNGKYILAATLDNTLKLWDYSKGKCLKTYTGHKNEKYCIFANFSVTGGKWIVSGSEDNLVYIWNLQTKEIVQKLQGHTDVVISTACHPTENIIASAALENDKTIKLWKSDC

SEQ ID NO: 283776 - DNA, 1005 bp, Artificial Sequence
  derived and/or modified sequence
atggccaccgaggagaagaagcccgagaccgaggccgccagagcccagcccacccccagcagcagcgccacccagagcaagcccacccccgtgaagcccaactacgccctgaagttcaccctggccggccacaccaaggccgtgagcagcgtgaagttcagccccaacggcgagtggctggccagcagcagcgccgacaagctgatcaagatctggggcgcctacgacggcaagttcgagaagaccatcagcggccacaagctgggcatcagcgacgtggcctggagcagcgacagcaacctgctggtgagcgccagcgacgacaagaccctgaagatctgggacgtgagcagcggcaagtgcctgaagaccctgaagggccacagcaactacgtgttctgctgcaacttcaacccccagagcaacctgatcgtgagcggcagcttcgacgagagcgtgagaatctgggacgtgaagaccggcaagtgcctgaagaccctgcccgcccacagcgaccccgtgagcgccgtgcacttcaacagagacggcagcctgatcgtgagcagcagctacgacggcctgtgcagaatctgggacaccgccagcggccagtgcctgaagaccctgatcgacgacgacaacccccccgtgagcttcgtgaagttcagccccaacggcaagtacatcctggccgccaccctggacaacaccctgaagctgtgggactacagcaagggcaagtgcctgaagacctacaccggccacaagaacgagaagtactgcatcttcgccaacttcagcgtgaccggcggcaagtggatcgtgagcggcagcgaggacaacctggtgtacatctggaacctgcagaccaaggagatcgtgcagaagctgcagggccacaccgacgtggtgatcagcaccgcctgccaccccaccgagaacatcatcgccagcgccgccctggagaacgacaagaccatcaagctgtggaagagcgactgctag

SEQ ID NO: 283777 - DNA, 1005 bp, Artificial Sequence
  derived and/or modified sequence
atggccactgaagaaaaaaagcccgagacagaagccgcgcgggcccagcccactccttccagtagcgctacccagagcaaacccactcccgtgaaacccaactacgccctcaagtttaccctcgctggtcataccaaggccgtaagtagcgtaaaattttcccccaatggcgaatggctggccagctcaagtgcggataaactgataaagatctggggagcctatgacggtaaattcgagaagacaatcagcggccataagctgggtatctctgacgtggcctggtcctcagattcaaacttgctagtgtcagctagcgacgataagaccctgaagatttgggacgtttcatccgggaagtgtctgaaaacactcaagggccatagcaattacgtcttctgctgtaacttcaatccccagtccaatctgattgtgtcggggtcgttcgacgagtccgtccggatatgggacgtcaaaacggggaagtgtctgaagacactgccagcccatagcgaccccgtttcagctgtccacttcaatcgggacgggtcactgatcgtatcaagcagctacgacggtttgtgtaggatctgggacaccgcatctggccagtgcctgaagactctcatcgacgatgataacccacccgtgtcattcgtgaaattctcacccaatggtaagtatatactggcagcaacactggataacaccctgaaactctgggactacagtaaggggaaatgcctcaagacctacacaggccataaaaatgagaaatattgcatatttgctaacttttccgttacagggggaaagtggatagttagcggatccgaggacaacctcgtatacatctggaatctccaaaccaaggaaatcgtccaaaagctgcaaggtcataccgatgtcgtcatctccactgcctgccaccctaccgagaacatcatcgcaagtgctgctctggaaaacgataagaccataaagttgtggaagtcagactgctag

SEQ ID NO: 283778 - DNA, 1005 bp, Artificial Sequence
  derived and/or modified sequence
atggccactgaagaaaagaagcctgagacagaggctgcccgggcacagccaaccccctccagcagtgcaacacaatctaagccaactccagttaagccaaattacgccttgaagtttaccttggccggccacacaaaagcagttagttctgtcaagttttccccaaatggcgagtggttagcctcttcttccgcagacaaattgatcaaaatttggggagcttacgacgggaagttcgagaaaacgatcagtgggcacaaattgggcatcagtgatgtcgcttggagctccgatagcaatctgctggtttctgcttcagacgacaaaacgctgaagatctgggacgtgtctagcggcaaatgcctcaaaactctcaagggacattcaaattatgtgttctgttgcaatttcaacccccagagtaacttgattgtatctgggtcatttgacgagagcgttaggatttgggatgtcaagaccgggaaatgtctcaaaaccctgccggcgcatagtgatcctgtgtcagctgtccatttcaacagagacgggtccctaattgtatcaagttcatacgacgggctgtgcagaatatgggacactgcttccgggcaatgcttgaagacacttatcgatgacgacaatcctcctgtctctttcgtgaagttttcaccgaacgggaaatatattttagccgcaaccctcgataacacgctaaagctttgggattacagcaaggggaagtgcctgaagacttatactgggcataagaatgaaaaatattgtatctttgccaacttctctgtaaccggggggaagtggatcgtgtcgggctcagaagataacctcgtatacatctggaatctgcagacgaaggagatcgtccagaaacttcagggacatacggacgtcgtcatatcaaccgcatgccatccaactgaaaatatcatcgcttccgctgcattggagaacgacaaaacgatcaagctgtggaagtcagactgttag

SEQ ID NO: 283779 - DNA, 1005 bp, Artificial Sequence
  derived and/or modified sequence
atggccacagaggagaagaagccagagacagaggccgcccgggcccagcccacccccagcagcagcgccacccagagcaagcccacccctgtgaagcccaactatgccctgaagttcaccctggccggccacaccaaggctgtgtcctctgtgaagttcagccccaacggggagtggctggccagcagcagcgctgacaagctgatcaagatctggggcgcctatgatggcaagtttgagaagaccatcagcggccacaagctgggcatcagtgatgtggcctggagcagtgacagcaacctgctggtgtctgccagtgatgacaagaccctgaagatctgggatgtgagcagcggcaagtgcctgaagaccctgaagggccacagcaactacgtgttctgctgcaacttcaacccccagagcaacctgattgtgtctggcagctttgatgagagcgtgcgcatctgggatgtgaagacaggcaagtgcctgaagaccctgcctgcccacagcgaccctgtgtctgctgtgcacttcaacagagatggcagcctcatcgtgagcagcagctatgatggcctgtgccgcatctgggacacagccagcggccagtgcctgaagaccctgattgatgatgacaacccccctgtgtcctttgtgaagttcagccccaacgggaagtacatcctggccgccaccctggacaacaccctgaagctgtgggactacagcaagggcaagtgcctgaagacctacacaggccacaagaatgagaagtactgcatctttgccaacttctctgtgactggaggcaagtggatcgtgtctggcagcgaggacaacctggtgtacatctggaacctgcagaccaaggagatcgtgcagaagctgcagggccacacagatgtggtgatcagcacagcctgccaccccacagagaacatcatcgccagcgctgccctggagaatgacaagaccatcaagctgtggaagagtgactgctag

SEQ ID NO: 283780 - DNA, 1005 bp, Artificial Sequence
  derived and/or modified sequence
atggccaccgaggagaagaagcccgagaccgaggccgcccgggcccaacccactccgtctagctctgcaacccaatctaagccaacacctgtcaagcctaactacgcactgaaattcaccctggccggccatactaaggccgtgtctagcgtgaagttctcaccaaacggagagtggttagcttcaagtagcgcggacaaattgatcaagatctggggcgcttacgatggtaagttcgaaaagaccataagcggacataagctgggcatctctgacgtggcttggtcatccgactctaacttactggttagcgcctctgatgacaagaccctgaaaatttgggatgtctcctccggtaaatgccttaagacgctgaaaggccactcaaactacgttttttgttgtaatttcaacccccagagcaatctgatcgtttcgggatccttcgatgagagtgtgaggatttgggatgttaagactgggaagtgcttaaagaccctgcccgcgcactccgacccggtatccgccgtacattttaacagggatgggagcctgatcgtcagtagttcatacgacggcctctgccggatatgggacaccgcgtcgggacaatgcctcaagacactcatcgatgatgataacccaccagtgagctttgttaagttcagcccgaacgggaagtacatcctagccgcaacactcgacaacactctcaaactgtgggactacagcaagggcaaatgtctgaaaacctataccgggcataagaatgagaagtattgtatcttcgctaactttagcgtgacagggggcaaatggatagtcagcggcagtgaagacaacctggtgtatatttggaatctgcagaccaaagaaatcgtccagaagctccaaggccacaccgatgtggtgatctcaacagcatgccatccgactgagaacattatcgccagcgcagccctggagaacgataagactattaagctttggaagagtgactgttag

SEQ ID NO: 283781 - DNA, 1005 bp, Artificial Sequence
  derived and/or modified sequence
atggccaccgaggagaagaagcccgagaccgaggccgcccgggcccaacctacacctagctcttccgccactcagagcaaaccaacaccagtcaagcccaactatgctctgaagttcaccctggctggccatacgaaggctgtatcttccgtcaagttcagccctaatggcgagtggctggccagtagctcggctgacaagttgatcaaaatttggggtgcttacgacgggaagttcgaaaaaacaatcagcggccataaattggggatctcagacgtagcctggtcatccgattccaacctcctggtgtcagcaagcgacgacaaaacactaaaaatctgggatgtcagctccggtaagtgcctgaagacactcaagggacactcgaattacgtgttttgttgcaatttcaacccacagtctaatttgattgttagtggctccttcgatgagagcgtcagaatttgggacgtcaagaccgggaagtgtctgaaaacactcccagctcattcagatcccgtgtctgccgtgcactttaatagagatggttcactgattgtgagtagtagttatgacggcttgtgccggatctgggatacagcaagtgggcagtgcttaaagaccttaatcgatgacgataatccacccgtgtcctttgtgaaattctctcctaacggtaaatacatcctggcagctacattggacaatacactcaagctttgggactacagtaaggggaaatgcctgaagacctatacggggcacaaaaacgagaaatattgcatttttgctaatttctcagttacaggagggaaatggatcgttagtggctcagaggataatttggtctatatatggaacctgcaaaccaaagagattgtgcaaaagctacaaggccacaccgacgtggtgataagcactgcctgtcaccctacagagaatattattgcaagcgccgcacttgaaaatgataagactatcaagctctggaagtcagattgttag

SEQ ID NO: 283782 - DNA, 1005 bp, Artificial Sequence
  derived and/or modified sequence
atggccactgaggaaaagaaaccagagacagaggccgctagagcccaaccaacgccatcatcctccgctacacagtctaaacctaccccagtgaagcccaattacgctttgaagttcaccttagctggccatacaaaggcggtgtcttcggtgaaattctctcccaatggggagtggctggcgagcagttcagcggacaagttaatcaaaatatggggcgcttatgatggtaagtttgagaagacgattagtggacataagcttggtatttcggacgtggcctggtcaagcgatagcaacctgctggtctctgcttccgatgacaagacactgaaaatctgggatgtaagcagcggcaagtgtctcaagaccctcaagggacatagcaattacgtgttctgctgtaacttcaatccccagagcaatttgatcgtttctggctcattcgacgaatctgtgcggatttgggacgttaaaactgggaaatgtctcaagacactcccagcccactcggacccggtgtctgccgtacatttcaacagggatggatctctgatagtttcatcctcatatgacggactgtgcagaatctgggatacagctagcggccaatgcctgaagaccctcatcgacgacgacaatccaccggtttcattcgtcaaattcagcccgaatgggaagtacatcctggccgctacactagataacaccctcaagttgtgggactattcgaaaggtaaatgcctcaagacgtatacaggacacaaaaacgaaaaatattgtatcttcgctaacttttccgtgactgggggaaagtggatcgtcagcggtagcgaagacaatttggtgtacatttggaacctgcagacgaaggagatcgtccagaaattgcaagggcacaccgatgttgtcatctctaccgcatgtcaccccacagagaatataatagcctcagccgctctggagaatgacaagaccatcaaactgtggaagagcgactgctag

SEQ ID NO: 283783 - DNA, 1005 bp, Artificial Sequence
  derived and/or modified sequence
atggctacagaggaaaaaaaacccgagactgaagctgccagggctcagccgacgccaagtagtagtgcaacacaaagcaagcccacccccgtcaaacccaactacgccttaaaattcaccctggccggtcacacaaaggctgtttcctctgtgaagttctcccccaacggagaatggctcgcatcttcctcggcagacaaactcatcaagatatggggcgcttacgacgggaaattcgagaagactatatctgggcacaagctggggatttctgatgtagcttggtccagtgacagcaacttgttagtgtctgcgtccgatgataaaacactgaaaatctgggatgtcagctcaggcaagtgcctcaagactttgaaaggacactccaattatgtgttttgctgcaactttaatccacagagcaatctcattgtgagtggtagcttcgacgaaagtgttcgtatctgggacgttaaaactggaaaatgcttgaaaaccttgcctgcccattctgatcccgtctccgctgtgcactttaaccgcgacggttcactcatagtgagctcatcttacgacggcttgtgcagaatatgggacacagcctcggggcagtgtctgaaaacactcatcgatgacgacaatccaccggtgtcattcgtaaagtttagtcccaacggcaaatatattctggccgctacgttagacaatactctcaagctgtgggattatagcaaggggaagtgcctgaagacatacacgggacataaaaatgagaagtactgtattttcgccaatttctccgtgacaggtgggaagtggatcgtttcagggtcggaggacaatctggtatatatatggaatctgcagacaaaggagatagtacagaaattgcagggtcacacggacgtggtgatctccaccgcctgtcacccaacagagaatatcattgctagcgcagctctcgagaatgacaaaaccattaaactgtggaagtccgattgctag

SEQ ID NO: 283784 - DNA, 3151 bp, Artificial Sequence
  derived and/or modified sequence
gccgcctggcgcccgcccgagctgccgccttgtcgagctgagtccgcgctcccgcccaggcggcggccgacgcgacgccccgagcgcccggccccgccgccgcggcccggcagactgcctctgtcaccgggtccctccacccttgtctcctgtgcggccagcgtcagagccatggcgacggaggagaagaagcccgagaccgaggccgccagagcacagccaaccccttcgtcatccgccactcagagcaagcctacacctgtgaagccaaactatgctctaaagttcacccttgctggccacaccaaagcagtgtcctccgtgaaattcagcccgaatggagagtggctggcaagttcatctgctgataaacttattaaaatttggggcgcgtatgatgggaaatttgagaaaaccatatctggtcacaagctgggaatatccgatgtagcctggtcgtcagattctaaccttcttgtttctgcctcagatgacaaaaccttgaagatatgggacgtgagctcgggcaagtgtctgaaaaccctgaagggacacagtaattatgtcttttgctgcaacttcaatccccagtccaaccttattgtctcaggatcctttgacgaaagcgtgaggatatgggatgtgaaaacagggaagtgcctcaagactttgccagctcactcggatccagtctcggccgttcattttaatcgtgatggatccttgatagtttcaagtagctatgatggtctctgtcgcatctgggacaccgcctcaggccagtgcctgaagacgctcatcgatgacgacaacccccccgtgtcttttgtgaagttctccccgaacggcaaatacatcctggccgccacgctggacaacactctgaagctctgggactacagcaaggggaagtgcctgaagacgtacactggccacaagaatgagaaatactgcatatttgccaatttctctgttactggtgggaagtggattgtgtctggctcagaggataaccttgtttacatctggaaccttcagacgaaagagattgtacagaaactacaaggccacacagatgtcgtgatctcaacagcttgtcacccaacagaaaacatcatcgcctctgctgcgctagaaaatgacaaaacaattaaactgtggaagagtgactgctaagtccctttgctcctgcccgcgagagactgtcgggaagttgacccggattggcaagaaacagggtgtcttggaggtggtcccccagatctgcgcctgggggtcaggacagggcctgatttgagcctcctctctgaagatgatttggccgagcggaaggtgtggaccaccggaaagttcttaaaagttgctggtgacatttcttgccaattctaacactgtctagggaagagttcctagtctattgtgttcaaacagagtcaacaaaagtttttaattttttattacagaagggtgaagttcaatttaacatgcgttgtgttttttcagtaaacgttctgtatctttttgatattccatgacccagtgcacgctgtggcctgtcaccgccaccgtggccccgccagctggcctcccctttggcccacgccggccgcccccattctctgctgcgtagatgccctggcccagggccctgactcctccattcccgccagtagctgttcctagtgtattttcgtctttctggaaaacagcattgagtggttgttttctgtgtaaagagccgtttgtgtcttgggagtttgtggcccacatgccgatagcacggtcatcgcacatgactctcccgtttgtctcagtgtccctgcaacaagcagcaccgcagactgtaataaaaggtggggttttgtgaatggttgtggcaagtgcgtccttgtgaagctcgtctccatgtggctttcttggagaaaggctcccctggggcaagagggtggaaggtttctttggacaggaggtgctgaggctggctgcacctgctctctgaagacgccttcctctctaggttcattgttcagtgttgctgggggcggggaacgggggtggggaggttcttagttgcgaaggagccaagctcctgatggacttgcgttgggatgtgggggacacctgtggcatggtaaggctccctgagtcccttactccaggtcagatgccagtgggactcatgcgccctatgagggctgcagggccagtgctgcccctcggactcctcgaggggttgggtgctaagcgcgagcctcgccgtccctgctggagccctcgcctgcctgcccctctgcctgtgctcctggcagtgtggcttcccggtgctcacctgcacagcagttaacagcagaggccgagcgggagcctctggggagcgaggctgaaacctgaacctgcccatggagacagttgtggtgagggttgccacacacagtgagggcggagcagggtggctgagggcacaggtgcctgggtctgtcccacggggcagggctttggggctgtgatgctctgggaagccagcttgggtcctgggtctacagagggccctggccccggagcccagccagctctgcctctctcagggcctggagtcctgggggagctcagccagctctgcctttctcagggcctggagtcctggatgaatcctgcaggtttttggttgcaccggcccagggaggaagcggggggtttgtcaggtgggctctcctggaggtcctcgagtggcaggggtgaggaggggattatctgaggcatctggagatgtatatcctgtggtttcccctgcccctctgtttccgatgaggtgtacggatgagtgacctgcactaagaagtgagttgccacagtgaaaatgggttggtttttgtcttcgacgctcagggtctgggcgcctcgcatttgcagtctgttgtgacagacacggggagctccgcgtgccagcctgtggctgccctgctgtgggggtcctggggccggcgaggccccttcagtcttgttctggggggacggcccactccggggagggggtgtgctgtgctgagcgctgtatccctgaatatagtttattttttctacatttgaattctgttgtagatttatgtaaaaatacattctttttgaaaataaaaattttcatgtcttctaa

SEQ ID NO: 283785 - DNA, 3069 bp, Artificial Sequence
  derived and/or modified sequence
gctccctgttctgcatctcgctcaacagactgcctctgtcaccgggtccctccacccttgtctcctgtgcggccagcgtcagagccatggcgacggaggagaagaagcccgagaccgaggccgccagagcacagccaaccccttcgtcatccgccactcagagcaagcctacacctgtgaagccaaactatgctctaaagttcacccttgctggccacaccaaagcagtgtcctccgtgaaattcagcccgaatggagagtggctggcaagttcatctgctgataaacttattaaaatttggggcgcgtatgatgggaaatttgagaaaaccatatctggtcacaagctgggaatatccgatgtagcctggtcgtcagattctaaccttcttgtttctgcctcagatgacaaaaccttgaagatatgggacgtgagctcgggcaagtgtctgaaaaccctgaagggacacagtaattatgtcttttgctgcaacttcaatccccagtccaaccttattgtctcaggatcctttgacgaaagcgtgaggatatgggatgtgaaaacagggaagtgcctcaagactttgccagctcactcggatccagtctcggccgttcattttaatcgtgatggatccttgatagtttcaagtagctatgatggtctctgtcgcatctgggacaccgcctcaggccagtgcctgaagacgctcatcgatgacgacaacccccccgtgtcttttgtgaagttctccccgaacggcaaatacatcctggccgccacgctggacaacactctgaagctctgggactacagcaaggggaagtgcctgaagacgtacactggccacaagaatgagaaatactgcatatttgccaatttctctgttactggtgggaagtggattgtgtctggctcagaggataaccttgtttacatctggaaccttcagacgaaagagattgtacagaaactacaaggccacacagatgtcgtgatctcaacagcttgtcacccaacagaaaacatcatcgcctctgctgcgctagaaaatgacaaaacaattaaactgtggaagagtgactgctaagtccctttgctcctgcccgcgagagactgtcgggaagttgacccggattggcaagaaacagggtgtcttggaggtggtcccccagatctgcgcctgggggtcaggacagggcctgatttgagcctcctctctgaagatgatttggccgagcggaaggtgtggaccaccggaaagttcttaaaagttgctggtgacatttcttgccaattctaacactgtctagggaagagttcctagtctattgtgttcaaacagagtcaacaaaagtttttaattttttattacagaagggtgaagttcaatttaacatgcgttgtgttttttcagtaaacgttctgtatctttttgatattccatgacccagtgcacgctgtggcctgtcaccgccaccgtggccccgccagctggcctcccctttggcccacgccggccgcccccattctctgctgcgtagatgccctggcccagggccctgactcctccattcccgccagtagctgttcctagtgtattttcgtctttctggaaaacagcattgagtggttgttttctgtgtaaagagccgtttgtgtcttgggagtttgtggcccacatgccgatagcacggtcatcgcacatgactctcccgtttgtctcagtgtccctgcaacaagcagcaccgcagactgtaataaaaggtggggttttgtgaatggttgtggcaagtgcgtccttgtgaagctcgtctccatgtggctttcttggagaaaggctcccctggggcaagagggtggaaggtttctttggacaggaggtgctgaggctggctgcacctgctctctgaagacgccttcctctctaggttcattgttcagtgttgctgggggcggggaacgggggtggggaggttcttagttgcgaaggagccaagctcctgatggacttgcgttgggatgtgggggacacctgtggcatggtaaggctccctgagtcccttactccaggtcagatgccagtgggactcatgcgccctatgagggctgcagggccagtgctgcccctcggactcctcgaggggttgggtgctaagcgcgagcctcgccgtccctgctggagccctcgcctgcctgcccctctgcctgtgctcctggcagtgtggcttcccggtgctcacctgcacagcagttaacagcagaggccgagcgggagcctctggggagcgaggctgaaacctgaacctgcccatggagacagttgtggtgagggttgccacacacagtgagggcggagcagggtggctgagggcacaggtgcctgggtctgtcccacggggcagggctttggggctgtgatgctctgggaagccagcttgggtcctgggtctacagagggccctggccccggagcccagccagctctgcctctctcagggcctggagtcctgggggagctcagccagctctgcctttctcagggcctggagtcctggatgaatcctgcaggtttttggttgcaccggcccagggaggaagcggggggtttgtcaggtgggctctcctggaggtcctcgagtggcaggggtgaggaggggattatctgaggcatctggagatgtatatcctgtggtttcccctgcccctctgtttccgatgaggtgtacggatgagtgacctgcactaagaagtgagttgccacagtgaaaatgggttggtttttgtcttcgacgctcagggtctgggcgcctcgcatttgcagtctgttgtgacagacacggggagctccgcgtgccagcctgtggctgccctgctgtgggggtcctggggccggcgaggccccttcagtcttgttctggggggacggcccactccggggagggggtgtgctgtgctgagcgctgtatccctgaatatagtttattttttctacatttgaattctgttgtagatttatgtaaaaatacattctttttgaaaataaaaattttcatgtcttctaattt

SEQ ID NO: 283786 - protein, 231 aa, Artificial Sequence
  derived and/or modified sequence
MEVYGFSDSFSGVDSVQELAPPPALPPKQRQLQASCAASSFSSVSHCVQQTKVAFTPEDGSAAQGLSVSVSNSFLSRHGSLPVPSYKSVFRSYSQDFVPHHQASVPPFLPPTSSSSPHFPPAHQSQSSDLAVPTMAGPPPSTVDGPLSASQESSFHGNTVCLPSETSFTDSSENASEEAGEGEYVNLYSSGQSSEELAPSRGEPPAGKDGHPRDPSAVSGVPGKDSRDGSE

SEQ ID NO: 283787 - protein, 158 aa, Artificial Sequence
  derived and/or modified sequence
MSGGLGLRRSPEMSGKIEKADSQRSHLSSFTMKLMDKFHSPKIKRTPSKKGKPAEVSVKIPEKPVNKNLSWLEEKEKEVVSALRYFKTIVDKMAIDKKVLEMLPGSASKVLEAILPLVQNDPRIQHSSALSSCYSRVYQSLANLIRWSDQVMLEGVNS

SEQ ID NO: 283788 - DNA, 477 bp, Artificial Sequence
  derived and/or modified sequence
atgagcggcggcctgggcctgagaagaagccccgagatgagcggcaagatcgagaaggccgacagccagagaagccacctgagcagcttcaccatgaagctgatggacaagttccacagccccaagatcaagagaacccccagcaagaagggcaagcccgccgaggtgagcgtgaagatccccgagaagcccgtgaacaagaacctgagctggctggaggagaaggagaaggaggtggtgagcgccctgagatacttcaagaccatcgtggacaagatggccatcgacaagaaggtgctggagatgctgcccggcagcgccagcaaggtgctggaggccatcctgcccctggtgcagaacgaccccagaatccagcacagcagcgccctgagcagctgctacagcagagtgtaccagagcctggccaacctgatcagatggagcgaccaggtgatgctggagggcgtgaacagctag

SEQ ID NO: 283789 - DNA, 477 bp, Artificial Sequence
  derived and/or modified sequence
atgagtggcgggcttggccttagaaggtcacccgagatgagtgggaagattgagaaagcagactcacaaaggtcccatttaagctccttcacaatgaaactgatggacaagtttcattccccgaaaatcaagcggactccaagtaaaaaaggtaagccggcggaggtcagtgtgaagattccagaaaagcccgtcaacaagaacttaagttggctggaagaaaaagagaaggaagtcgtctctgctctcaggtatttcaaaacgatagtagacaagatggcaattgataagaaggttctggaaatgctaccaggttccgcttccaaggtgctcgaagctatactgccgttagtgcagaatgatccaagaattcaacatagctcagcactgagcagttgctacagtagggtgtatcagtcgcttgccaatctgatcagatggagcgatcaagttatgcttgagggcgtcaatagctag

SEQ ID NO: 283790 - DNA, 477 bp, Artificial Sequence
  derived and/or modified sequence
atgtctgggggcctgggcctgcggcgcagccctgagatgtctgggaagattgagaaggctgacagccagaggagccacctgagcagcttcaccatgaagctgatggacaagttccacagccccaagatcaagaggacccccagcaagaagggcaagccagctgaggtgtctgtgaagatccctgagaagcctgtgaacaagaacctgtcctggctggaggagaaggagaaggaggtggtgtctgccctgcgctacttcaagaccatcgtggacaagatggccatcgacaagaaggtgctggagatgctgcccggcagcgccagcaaggtgctggaggccatcctgcccctggtgcagaatgacccccgcatccagcacagcagcgccctgagcagctgctacagccgggtgtaccagagcctggccaacctgatccgctggagcgaccaggtgatgctggagggcgtgaacagctag

SEQ ID NO: 283791 - DNA, 477 bp, Artificial Sequence
  derived and/or modified sequence
atgagcggcggcctgggcctgcggcggagccccgagatgagcggcaagatcgagaaagccgatagtcagcggtcccatctttcttccttcactatgaaactgatggacaagtttcattcgcccaagatcaaacgaacacctagcaaaaaaggaaaacctgccgaggtgtcagtcaaaattcccgaaaaacctgtgaataagaaccttagttggctcgaggaaaaagagaaggaagttgtcagcgccctgagatatttcaagaccattgttgataaaatggccattgataagaaggtgctggaaatgctgccagggagcgcttccaaagtcctcgaagctattctcccccttgtgcagaatgatccccgcatccaacactcatcagccctgtcatcctgttatagccgggtctaccagtctttggccaacctgataaggtggagtgaccaggtcatgcttgagggcgtcaactcttag

SEQ ID NO: 283792 - DNA, 477 bp, Artificial Sequence
  derived and/or modified sequence
atgtcagggggactggggctccgacgcagcccggaaatgtctggaaagatagagaaagctgacagccagagatcacatctgagctcctttaccatgaaactgatggataagtttcacagtcccaaaattaagcgcacgcccagcaagaagggaaagcctgcggaagtgtccgtgaagattcccgagaagcctgtgaacaagaacctttcctggctggaagaaaaagagaaggaggtggtgtctgccttacggtacttcaaaaccatcgttgacaaaatggctattgataagaaagtgctcgaaatgttgccaggttccgcgtccaaagtactcgaggcaatcctgcctcttgtccagaacgatccaagaatccagcatagcagcgctctctcttcctgttactcacgtgtatatcagtctcttgctaatctgatacggtggtctgaccaagtcatgcttgaaggggttaattcttag

SEQ ID NO: 283793 - DNA, 588 bp, Artificial Sequence
  derived and/or modified sequence
gcggccgcgcggagcccgccatgccggcgcgggtctgaggcgtggcgagccagggccgaggcgagcggcgggcgcgccgcccctgtcgccccgcggcggcccggcccgggcccgatgagcggcggcctcggcctccggcgcagcccggaaatgtccggcaagatcgagaaagcagactctcagcgttctcatctctcttccttcaccatgaagctgatggacaaattccactcacccaaaatcaagagaacgccatcaaagaagggaaaaccagctgaggtgtccgtaaagattccagagaagcctgtgaacaaaaacctgagctggctggaggagaaagagaaggaagttgtcagtgccctgcgctactttaagaccattgtggacaaaatggcaattgataagaaggtactggagatgcttccagggtcagccagcaaggtgctggaggccatcttacccctggtgcagaacgatcctcgaattcagcacagctcagccctctcttcctgctatagccgagtgtaccaaagcctcgccaacctcattcgctggtctgaccaagtgatgctggaaggcgtgaactca

SEQ ID NO: 283794 - protein, 13 aa, Artificial Sequence
  derived and/or modified sequence
APNTPDILEIEFK

SEQ ID NO: 283795 - protein, 13 aa, Artificial Sequence
  derived and/or modified sequence
FELSCYSLAPQIK

SEQ ID NO: 283796 - protein, 412 aa, Artificial Sequence
  derived and/or modified sequence
MSSKGSVVLAYSGGLDTSCILVWLKEQGYDVIAYLANIGQKEDFEEARKKALKLGAKKVFIEDVSREFVEEFIWPAIQSSALYEDRYLLGTSLARPCIARKQVEIAQREGAKYVSHGATGKGNDQVRFELSCYSLAPQIKVIAPWRMPEFYNRFKGRNDLMEYAKQHGIPIPVTPKNPWSMDENLMHISYEAGILENPKNQAPPGLYTKTQDPAKAPNTPDILEIEFKKGVPVKVTNVKDGTTHQTSLELFMYLNEVAGKHGVGRIDIVENRFIGMKSRGIYETPAGTILYHAHLDIEAFTMDREVRKIKQGLGLKFAELVYTGFWHSPECEFVRHCIAKSQERVEGKVQVSVLKGQVYILGRESPLSLYNEELVSMNVQGDYEPTDATGFININSLRLKEYHRLQSKVTAK

SEQ ID NO: 283797 - protein, 169 aa, Artificial Sequence
  derived and/or modified sequence
EPGPLQLMVVAEAQGGKHGVGRIDIVENRFIGMKSRGIYETPAGTILYHAHLDIEAFTMDREVRKIKQGLGLKFAELVYTGFWHSPECEFVRHCIAKSQERVEGKVQVSVLKGQVYILGRESPLSLYNEELVSMNVQGDYEPTDATGFININSLRLKEYHRLQSKVTAK

SEQ ID NO: 283798 - protein, 198 aa, Artificial Sequence
  derived and/or modified sequence
MSSKGSVVLAYSGGLDTSCILVWLKEQGYDVIAYLANIGQKEDFEEARKKALKLGAKKVFIEDVSREFVEEFIWPAIQSSALYEDRYLLGTSLARPCIARKQVEIAQREGAKYVSHGATGKGNDQVRFELSCYSLAPQIKVIAPWRMPEFYNRFKGRNDLMEYAKQHGIPIPVTPKNPWSMDENLMHISYEAGILENP

SEQ ID NO: 283799 - protein, 179 aa, Artificial Sequence
  derived and/or modified sequence
MSSKGSVVLAYSGGLDTSCILVWLKEQGYDVIAYLANIGQKEDFEEARKKALKLGAKKVFIEDVSREFVEEFIWPAIQSSALYEDRYLLGTSLARPCIARKQVEIAQREGAKYVSHGATGKVIAPWRMPEFYNRFKGRNDLMEYAKQHGIPIPVTPKNPWSMDENLMHISYEAGILENP

SEQ ID NO: 283800 - DNA, 1236 bp, Artificial Sequence
  derived and/or modified sequence
atgagcagcaagggcagcgtggtgctggcctacagcggcggcctggacaccagctgcatcctggtgtggctgaaggagcagggctacgacgtgatcgcctacctggccaacatcggccagaaggaggacttcgaggaggcccgcaagaaggccctgaagctgggcgccaagaaggtgttcatcgaggacgtgagccgcgagttcgtggaggagttcatctggcccgccatccagagcagcgccctgtacgaggaccgctacctgctgggcaccagcctggcccgcccctgcatcgcccgcaagcaggtggagatcgcccagcgcgagggcgccaagtacgtgagccacggcgccaccggcaagggcaacgaccaggtgcgcttcgagctgagctgctacagcctggccccccagatcaaggtgatcgccccctggcgcatgcccgagttctacaaccgcttcaagggccgcaacgacctgatggagtacgccaagcagcacggcatccccatccccgtgacccccaagaacccctggagcatggacgagaacctgatgcacatcagctacgaggccggcatcctggagaaccccaagaaccaggccccccccggcctgtacaccaagacccaggaccccgccaaggcccccaacacccccgacatcctggagatcgagttcaagaagggcgtgcccgtgaaggtgaccaacgtgaaggacggcaccacccaccagaccagcctggagctgttcatgtacctgaacgaggtggccggcaagcacggcgtgggccgcatcgacatcgtggagaaccgcttcatcggcatgaagagccgcggcatctacgagacccccgccggcaccatcctgtaccacgcccacctggacatcgaggccttcaccatggaccgcgaggtgcgcaagatcaagcagggcctgggcctgaagttcgccgagctggtgtacaccggcttctggcacagccccgagtgcgagttcgtgcgccactgcatcgccaagagccaggagcgcgtggagggcaaggtgcaggtgagcgtgctgaagggccaggtgtacatcctgggccgcgagagccccctgagcctgtacaacgaggagctggtgagcatgaacgtgcagggcgactacgagcccaccgacgccaccggcttcatcaacatcaacagcctgcgcctgaaggagtaccaccgcctgcagagcaaggtgaccgccaag

SEQ ID NO: 283801 - DNA, 507 bp, Artificial Sequence
  derived and/or modified sequence
gagcccggccccctgcagctgatggtggtggccgaggcccagggcggcaagcacggcgtgggccgcatcgacatcgtggagaaccgcttcatcggcatgaagagccgcggcatctacgagacccccgccggcaccatcctgtaccacgcccacctggacatcgaggccttcaccatggaccgcgaggtgcgcaagatcaagcagggcctgggcctgaagttcgccgagctggtgtacaccggcttctggcacagccccgagtgcgagttcgtgcgccactgcatcgccaagagccaggagcgcgtggagggcaaggtgcaggtgagcgtgctgaagggccaggtgtacatcctgggccgcgagagccccctgagcctgtacaacgaggagctggtgagcatgaacgtgcagggcgactacgagcccaccgacgccaccggcttcatcaacatcaacagcctgcgcctgaaggagtaccaccgcctgcagagcaaggtgaccgccaag

SEQ ID NO: 283802 - DNA, 594 bp, Artificial Sequence
  derived and/or modified sequence
atgagcagcaagggcagcgtggtgctggcctacagcggcggcctggacaccagctgcatcctggtgtggctgaaggagcagggctacgacgtgatcgcctacctggccaacatcggccagaaggaggacttcgaggaggcccgcaagaaggccctgaagctgggcgccaagaaggtgttcatcgaggacgtgagccgcgagttcgtggaggagttcatctggcccgccatccagagcagcgccctgtacgaggaccgctacctgctgggcaccagcctggcccgcccctgcatcgcccgcaagcaggtggagatcgcccagcgcgagggcgccaagtacgtgagccacggcgccaccggcaagggcaacgaccaggtgcgcttcgagctgagctgctacagcctggccccccagatcaaggtgatcgccccctggcgcatgcccgagttctacaaccgcttcaagggccgcaacgacctgatggagtacgccaagcagcacggcatccccatccccgtgacccccaagaacccctggagcatggacgagaacctgatgcacatcagctacgaggccggcatcctggagaacccc

SEQ ID NO: 283803 - DNA, 537 bp, Artificial Sequence
  derived and/or modified sequence
atgagcagcaagggcagcgtggtgctggcctacagcggcggcctggacaccagctgcatcctggtgtggctgaaggagcagggctacgacgtgatcgcctacctggccaacatcggccagaaggaggacttcgaggaggcccgcaagaaggccctgaagctgggcgccaagaaggtgttcatcgaggacgtgagccgcgagttcgtggaggagttcatctggcccgccatccagagcagcgccctgtacgaggaccgctacctgctgggcaccagcctggcccgcccctgcatcgcccgcaagcaggtggagatcgcccagcgcgagggcgccaagtacgtgagccacggcgccaccggcaaggtgatcgccccctggcgcatgcccgagttctacaaccgcttcaagggccgcaacgacctgatggagtacgccaagcagcacggcatccccatccccgtgacccccaagaacccctggagcatggacgagaacctgatgcacatcagctacgaggccggcatcctggagaacccc

SEQ ID NO: 283804 - DNA, 1239 bp, Artificial Sequence
  derived and/or modified sequence
atgagcagcaagggcagcgtggtgctggcctacagcggcggcctggacaccagctgcatcctggtgtggctgaaggagcagggctacgacgtgatcgcctacctggccaacatcggccagaaggaggacttcgaggaggccagaaagaaggccctgaagctgggcgccaagaaggtgttcatcgaggacgtgagcagagagttcgtggaggagttcatctggcccgccatccagagcagcgccctgtacgaggacagatacctgctgggcaccagcctggccagaccctgcatcgccagaaagcaggtggagatcgcccagagagagggcgccaagtacgtgagccacggcgccaccggcaagggcaacgaccaggtgagattcgagctgagctgctacagcctggccccccagatcaaggtgatcgccccctggagaatgcccgagttctacaacagattcaagggcagaaacgacctgatggagtacgccaagcagcacggcatccccatccccgtgacccccaagaacccctggagcatggacgagaacctgatgcacatcagctacgaggccggcatcctggagaaccccaagaaccaggccccccccggcctgtacaccaagacccaggaccccgccaaggcccccaacacccccgacatcctggagatcgagttcaagaagggcgtgcccgtgaaggtgaccaacgtgaaggacggcaccacccaccagaccagcctggagctgttcatgtacctgaacgaggtggccggcaagcacggcgtgggcagaatcgacatcgtggagaacagattcatcggcatgaagagcagaggcatctacgagacccccgccggcaccatcctgtaccacgcccacctggacatcgaggccttcaccatggacagagaggtgagaaagatcaagcagggcctgggcctgaagttcgccgagctggtgtacaccggcttctggcacagccccgagtgcgagttcgtgagacactgcatcgccaagagccaggagagagtggagggcaaggtgcaggtgagcgtgctgaagggccaggtgtacatcctgggcagagagagccccctgagcctgtacaacgaggagctggtgagcatgaacgtgcagggcgactacgagcccaccgacgccaccggcttcatcaacatcaacagcctgagactgaaggagtaccacagactgcagagcaaggtgaccgccaagtag

SEQ ID NO: 283805 - DNA, 510 bp, Artificial Sequence
  derived and/or modified sequence
gagcccggccccctgcagctgatggtggtggccgaggcccagggcggcaagcacggcgtgggcagaatcgacatcgtggagaacagattcatcggcatgaagagcagaggcatctacgagacccccgccggcaccatcctgtaccacgcccacctggacatcgaggccttcaccatggacagagaggtgagaaagatcaagcagggcctgggcctgaagttcgccgagctggtgtacaccggcttctggcacagccccgagtgcgagttcgtgagacactgcatcgccaagagccaggagagagtggagggcaaggtgcaggtgagcgtgctgaagggccaggtgtacatcctgggcagagagagccccctgagcctgtacaacgaggagctggtgagcatgaacgtgcagggcgactacgagcccaccgacgccaccggcttcatcaacatcaacagcctgagactgaaggagtaccacagactgcagagcaaggtgaccgccaagtag

SEQ ID NO: 283806 - DNA, 597 bp, Artificial Sequence
  derived and/or modified sequence
atgagcagcaagggcagcgtggtgctggcctacagcggcggcctggacaccagctgcatcctggtgtggctgaaggagcagggctacgacgtgatcgcctacctggccaacatcggccagaaggaggacttcgaggaggccagaaagaaggccctgaagctgggcgccaagaaggtgttcatcgaggacgtgagcagagagttcgtggaggagttcatctggcccgccatccagagcagcgccctgtacgaggacagatacctgctgggcaccagcctggccagaccctgcatcgccagaaagcaggtggagatcgcccagagagagggcgccaagtacgtgagccacggcgccaccggcaagggcaacgaccaggtgagattcgagctgagctgctacagcctggccccccagatcaaggtgatcgccccctggagaatgcccgagttctacaacagattcaagggcagaaacgacctgatggagtacgccaagcagcacggcatccccatccccgtgacccccaagaacccctggagcatggacgagaacctgatgcacatcagctacgaggccggcatcctggagaacccctag

SEQ ID NO: 283807 - DNA, 540 bp, Artificial Sequence
  derived and/or modified sequence
atgagcagcaagggcagcgtggtgctggcctacagcggcggcctggacaccagctgcatcctggtgtggctgaaggagcagggctacgacgtgatcgcctacctggccaacatcggccagaaggaggacttcgaggaggccagaaagaaggccctgaagctgggcgccaagaaggtgttcatcgaggacgtgagcagagagttcgtggaggagttcatctggcccgccatccagagcagcgccctgtacgaggacagatacctgctgggcaccagcctggccagaccctgcatcgccagaaagcaggtggagatcgcccagagagagggcgccaagtacgtgagccacggcgccaccggcaaggtgatcgccccctggagaatgcccgagttctacaacagattcaagggcagaaacgacctgatggagtacgccaagcagcacggcatccccatccccgtgacccccaagaacccctggagcatggacgagaacctgatgcacatcagctacgaggccggcatcctggagaacccctag

SEQ ID NO: 283808 - DNA, 1382 bp, Artificial Sequence
  derived and/or modified sequence
gggaaataagagagaaaagaagagtaagaagaaatataagagccaccatgtcctcgaagggaagcgtagtcttggcgtattccggaggccttgacacttcatgtattctggtctggctcaaggagcaggggtacgacgtcatcgcctatctggctaacatcggacaaaaggaagatttcgaggaagcgcgcaagaaggcgctgaaactcggagccaaaaaggtattcatcgaagatgtgtcgcgggagtttgtcgaagagtttatctggcctgcgattcagtcgtcagcactttatgaggacagatacctccttggaacttcactggcccgaccgtgcatcgcgcgcaaacaggtagagatcgcacagagggagggggcgaaatatgtctcgcatggtgcaactgggaaaggtaatgatcaggtgcggttcgaactctcctgctactcgttggcaccccagatcaaagtgatcgctccgtggaggatgcccgagttttacaaccgattcaagggaagaaacgatctgatggagtatgcgaagcagcatggaatcccgatccccgtgacgccgaagaatccctggagcatggacgagaatcttatgcacatttcatacgaggccgggatcttggaaaatccgaaaaaccaggcgcctccggggttgtacaccaaaacacaagacccagccaaagcgcccaacacccccgatattcttgaaattgagtttaagaaaggggtgcccgtcaaggtgacgaatgtcaaggacggcacgacccaccaaacatcgttggaactgtttatgtacttgaatgaggtcgcgggaaaacacggtgtggggagaattgacattgtggaaaatcggtttatcgggatgaagagccggggaatctacgaaacaccagcgggaacgattctgtaccatgcccacctcgatattgaagcgtttacaatggacagggaagtgagaaagattaaacaggggcttggtttgaaattcgcagagctggtatatacgggcttctggcatagccctgaatgtgagttcgtacgccactgcatcgcaaagagccaggaaagagtggagggaaaggtgcaagtctccgtgctcaagggtcaggtctacatcctcggtagggagtcgcctctttcactctacaacgaggagttggtatcgatgaacgtgcagggagactatgaacccaccgatgccacagggttcatcaacatcaactccttgcgcctcaaggagtatcaccggcttcagtcgaaagtaacggctaagtgataagctgccttctgcggggcttgccttctggccatgcccttcttctctcccttgcacctgtacctcttggtctttgaataaagcctgagtaggaag

SEQ ID NO: 283809 - DNA, 667 bp, Artificial Sequence
  derived and/or modified sequence
gagcctggaccgttgcagctaatggttgtggctgaggctcaggggggcaagcatggcgtgggccgtattgacatcgtggagaaccgcttcattggaatgaagtcccgaggtatctacgagaccccagcaggcaccatcctttaccatgctcatttagacatcgaggccttcaccatggaccgggaagtgcgcaaaatcaaacaaggcctgggcttgaaatttgctgagctggtgtataccggtttctggcacagccctgagtgtgaatttgtccgccactgcatcgccaagtcccaggagcgagtggaagggaaagtgcaggtgtccgtcctcaagggccaggtgtacatcctcggccgggagtccccactgtctctctacaatgaggagctggtgagcatgaacgtgcagggtgattatgagccaactgatgccaccgggttcatcaacatcaattccctcaggctgaaggaatatcatcgtctccagagcaaggtcactgccaaatagacccgtgtacaatgaggagctggggcctcctcaatttgcagatcccccaagtacaggcgctaattgttgtgataatttgtaattgtgacttgttctccccggctggcagcgtagtggggctgccaggccccagctttgttccctggtccccctgaag

SEQ ID NO: 283810 - DNA, 1239 bp, Artificial Sequence
  derived and/or modified sequence
atgagctctaaagggtcagtagtgctcgcatattctggcggcttagacacttcctgcatccttgtgtggctgaaggagcaggggtatgatgtgattgcatatctggccaacattgggcagaaggaggactttgaagaggcacgtaaaaaggccttgaagctgggagccaagaaggtgtttatcgaagacgtgtcacgggaatttgtggaggaattcatctggcccgctattcaaagtagcgccttgtatgaagacaggtatctgctaggaacatctctggcgaggccctgcatcgcgagaaaacaggttgagatcgctcagagggaaggcgcaaagtacgtgagtcacggagctacaggaaaagggaatgaccaggttcgcttcgagctctcctgctactctctcgctccacaaataaaggttatcgcaccttggcggatgcccgagttttataaccgcttcaagggccgaaacgacctaatggagtacgcaaaacagcacgggatacctatccctgtgacgccaaagaacccatggtctatggacgagaatcttatgcatatctcctatgaggccggcattctagagaatccaaagaaccaggccccacccgggctgtatacaaaaacacaggaccccgctaaagcaccgaacacccccgacatcttagagattgaattcaaaaaaggagtaccggtaaaagtgacaaacgtaaaggacgggactactcaccaaacctcactggaactgtttatgtacctgaatgaggttgctggcaagcacggagtcggacgcatcgatattgtggagaaccgatttatcggcatgaaatctcggggaatttatgagacccctgctggtaccattctttatcacgcccaccttgatattgaggcctttactatggaccgagaagtccgcaagatcaagcaggggctcggtctgaagttcgccgagctggtatatactggcttttggcactctcctgagtgtgagttcgttagacattgcattgccaagagtcaggaaagagtggagggcaaggtacaggtgtccgttcttaagggacaggtatacatcctgggtagggaatctccattgtcactctataatgaagaactcgtgtctatgaacgtccagggggactacgagccaactgatgccacaggttttatcaacatcaactctctgcgactgaaggaatatcaccggctgcaaagcaaagtcacggctaagtag

SEQ ID NO: 283811 - DNA, 1239 bp, Artificial Sequence
  derived and/or modified sequence
atgtcttctaagggttcagtggtgttggcctactccggaggcttggatacatcgtgtatcttagtctggctgaaagaacaggggtatgacgtcattgcttacctggctaatataggtcagaaagaagatttcgaagaggcgcgcaaaaaggccttaaagttaggagcaaaaaaagtttttattgaggatgtgtcacgcgaatttgtcgaggaattcatctggcctgccattcagtcctcagctctgtacgaggaccggtatcttcttggcacgagcctcgcacggccctgcatcgcccgcaagcaggtcgaaattgcccagcgcgagggcgcaaaatacgtgtcacatggcgccactggaaagggaaatgatcaggtccggttcgaactgagttgctacagtctcgcacctcaaataaaggtgattgcaccttggagaatgcccgagttttataaccgattcaagggccgcaacgacctgatggaatatgccaagcaacacggaatccccatcccagtgactcccaagaatccatggtccatggatgagaatctcatgcatattagctacgaagccggcattctggagaacccaaagaaccaggcccccccaggactctacacgaaaactcaggacccagcaaaggcacccaatactcccgacattctcgagatcgagttcaaaaagggggtgccggtcaaggttaccaatgttaaggacggcacgacccatcagacatctctagagctttttatgtatctgaacgaggtggccggcaaacatggcgtggggcggattgacatcgtggagaacagattcatcgggatgaaatctagggggatttacgagacccctgcagggaccatcctttatcacgctcacctcgacatagaagctttcaccatggaccgggaggtgagaaagattaagcagggactgggcctgaaattcgccgaactggtgtatacaggcttttggcactctccggagtgtgaatttgtgagacactgcattgccaagtcccaggagcgcgtggaggggaaggtccaggtgtcagtcctcaagggccaggtatatatactgggccgcgaaagtcccctctccctctacaatgaagaactggtgagcatgaatgtgcaaggagactatgagcctactgacgctacgggatttatcaatattaattcgctgaggctaaaagagtatcaccgcctgcagtctaaagtgaccgcaaagtag

SEQ ID NO: 283812 - DNA, 510 bp, Artificial Sequence
  derived and/or modified sequence
gaacctggaccactccagcttatggtcgtggctgaggcccagggcggcaaacatggtgtcggtcgcattgacatcgtagagaatagattcattggaatgaagagtcggggcatctatgaaacccccgccgggactatcctgtatcacgcccatttggacatcgaggcttttacaatggaccgagaggtgcggaagatcaaacaaggactgggccttaagtttgctgagctagtatacactgggttttggcatagtccagagtgtgagttcgtgagacattgcattgccaagagccaggaaagagttgaaggtaaggtccaggtgagtgtactaaagggccaagtgtatatcctgggcagagaaagtccattgagtttatacaatgaggaattggttagtatgaacgtccagggggattatgagccaaccgacgctaccggattcatcaacatcaactctttgagattgaaagagtatcatagacttcagagcaaggtgaccgccaagtag

SEQ ID NO: 283813 - DNA, 1239 bp, Artificial Sequence
  derived and/or modified sequence
atgagttcaaagggcagcgttgttctggcgtactcgggaggtcttgacacaagctgcattctggtgtggctgaaggagcaggggtatgacgtcatcgcttatctggcaaatatcgggcagaaagaagacttcgaagaggcgcggaaaaaggccctgaagctcggcgctaagaaggtgtttatcgaggacgttagtcgcgagtttgtggaggagtttatatggcccgcgatccagtccagcgcactgtacgaagatcggtacttgttgggaaccagcctggcgcggccttgtatcgcccgtaagcaggtggagattgcgcaacgggagggcgccaagtatgtttctcatggagccactgggaagggtaatgatcaggtccgcttcgaattgtcatgttactcgctggcaccacagatcaaggtgatcgccccttggagaatgccagagttctacaatcgattcaagggcagaaatgacttgatggagtacgccaagcaacatggcatacctattccagtcacgcccaaaaatccctggtccatggatgagaatttgatgcacatttcgtacgaggcaggcatcctcgaaaatcctaaaaatcaggcacctcccggactctataccaaaacgcaggaccctgccaaagctcccaacaccccagacatcctcgagatagagttcaagaaaggggtacctgttaaagtgacaaacgtaaaggacggaacaacccatcaaacctccctcgagcttttcatgtaccttaacgaagtagccggtaagcatggcgtgggtaggatcgatatcgtcgagaaccggtttatagggatgaagtcaaggggcatctacgagacccctgctggcactatcttgtatcacgcgcaccttgatattgaagcttttacaatggacagagaagtccggaagatcaaacaggggctcgggcttaagtttgccgaactcgtttacacggggttctggcactcaccggagtgcgaattcgtgcgtcattgtattgcaaagtctcaagaaagggttgagggtaaggtgcaggtcagtgtgcttaagggtcaagtgtatattctgggtcgggaatctcctctcagcctgtataacgaggagcttgttagcatgaacgttcaaggcgattacgagcctacagacgcaaccggtttcatcaacatcaattcactcagattgaaggagtaccacagactgcaatccaaggtaacggccaagtag

SEQ ID NO: 283814 - DNA, 1239 bp, Artificial Sequence
  derived and/or modified sequence
atgagcagtaaaggcagtgtggtcctagcatactctggtggattggatactagttgtattctcgtttggctgaaagagcagggctacgatgtcatcgcctacctggccaacataggccagaaggaggacttcgaggaggccagaaaaaaggccctcaaattaggagcaaaaaaagtgtttatcgaagacgtgtccagagagttcgtggaggagttcatttggcccgcaatccagtccagcgctctttatgaggatcgttacctactcggaacttcactggcccggccttgcatcgcacgcaagcaagtagagatcgcacagcgagagggcgccaaatatgtatctcacggagccaccggtaagggtaatgaccaggttcgattcgagctatcttgttactccttagcaccccagatcaaggttatagccccatggaggatgcctgaattttacaaccgtttcaagggccgaaacgatctgatggagtacgcaaaacagcatgggattccaatcccagtcacccccaaaaacccctggtccatggacgagaacctgatgcatataagttacgaggcgggaatcttggaaaacccaaaaaaccaagctcctcccgggctttacaccaaaacccaagatcccgctaaagctcccaatactcctgacatactcgagatcgagtttaaaaagggtgtgccagtgaaagttaccaacgtgaaggatggcacgacacaccaaaccagtcttgaactcttcatgtacctcaacgaggtcgcgggaaagcatggcgtgggcagaattgacatagtggaaaaccgtttcattggcatgaaaagccggggaatatacgaaacccccgccggaacgattctgtaccacgcacacctggacatagaggccttcactatggaccgagaggtgaggaagattaagcagggactgggcctgaaattcgcggaacttgtatataccggtttctggcattcccctgaatgcgagtttgtccgtcactgcatcgcgaaaagtcaagagagggtcgaggggaaagttcaagtaagcgtgctgaaaggccaggtgtacattttaggccgcgagtctccgctgtccctgtacaatgaagaacttgtgtctatgaatgtgcagggggattacgaacccacagacgctaccggcttcatcaacatcaattccctcagactaaaggaataccatcgcttgcagtctaaagtcacggctaagtag

SEQ ID NO: 283815 - DNA, 597 bp, Artificial Sequence
  derived and/or modified sequence
atgtcctctaaaggcagcgtcgtgctggcttacagcggaggtctcgacacaagttgtattctcgtatggctgaaggagcagggctatgatgtcattgcctatctggccaacatcggccaaaaagaagattttgaggaagccaggaagaaagctctgaagttgggggcaaagaaggtcttcatcgaagacgtgagtcgagagttcgtggaggagttcatctggccggctattcaatcatcagcgttgtacgaggaccggtacctgctgggtaccagcttggcgcggccttgtatagccaggaagcaggttgagattgcacaacgggaaggcgcaaaatacgtgagccacggcgccaccggaaagggtaacgaccaggtacgcttcgaattgtcttgctactccttggccccacagatcaaagttattgcgccgtggaggatgcctgaattctataaccgttttaaagggagaaacgatctgatggagtatgctaagcagcatggcattcctatccccgtgacgcccaagaacccatggagcatggatgagaacctaatgcacatttcctacgaagccggcatcctggagaacccatag

SEQ ID NO: 283816 - DNA, 540 bp, Artificial Sequence
  derived and/or modified sequence
atgtcctcaaagggctcagtggtgctagcctattcaggcgggttagacacctcatgcatactggtttggctgaaagagcagggctatgatgttatcgcctacttagcaaatatcggccagaaggaagattttgaggaggccagaaaaaaagccctcaagttgggtgctaagaaggtgttcatcgaggacgtcagtcgtgaattcgttgaggagttcatctggcccgccatccagtcttccgccttgtacgaagaccggtacctgttaggcactagcttagcccggccttgcattgcgagaaagcaggtggagattgcccagcgggagggcgcaaagtacgtgagccatggtgcaactggtaaagttattgctccatggcgaatgccagagttctataacaggttcaagggaaggaatgacttaatggagtatgctaaacagcacggcattcccatcccagtaaccccgaagaatccgtggagcatggacgagaatctcatgcatatctcttatgaggccggcatactagaaaacccctag

SEQ ID NO: 283817 - DNA, 1239 bp, Artificial Sequence
  derived and/or modified sequence
atgagcagcaagggctctgtggtgctggcctacagcggcggcctggacaccagctgcatcctggtgtggctgaaggagcagggctatgatgtgattgcctacctggccaacatcggccagaaggaggactttgaggaggccaggaagaaggccctgaagctgggcgccaagaaggtgttcattgaagatgtgtcccgggagtttgtggaggagttcatctggccagccatccagagcagcgccctgtatgaggaccgctacctgctgggcaccagcctggcccggccctgcatcgccaggaagcaggtggagatcgcccagcgggagggcgccaagtatgtgagccacggggccactggaaaaggaaatgaccaggtgcgctttgagctgagctgctacagcctggccccccagatcaaggtgattgccccctggaggatgcctgagttctacaaccgcttcaagggcagaaatgacctgatggagtatgccaagcagcacggcatccccatccctgtgacccccaagaacccctggagcatggatgagaacctgatgcacatctcctatgaggccggcatcctggagaaccccaagaaccaggcccctcctggcctgtacaccaagacccaggaccctgccaaggcccccaacaccccagacatcctggagattgagttcaagaagggcgtgcctgtgaaggtgaccaacgtgaaggatggcaccacccaccagaccagcctggagctgttcatgtacctgaatgaggtggccggcaagcatggagtgggcagaattgacatcgtggagaaccgcttcatcggcatgaagagccggggcatctatgagaccccagctggcaccatcctgtaccacgcccacctggacatcgaggccttcaccatggaccgggaggtgaggaagatcaagcagggcctgggcctgaagtttgctgagctggtgtacacaggcttctggcacagcccagaatgtgaatttgtgcgccactgcatcgccaagagccaggagcgggtggagggcaaggtgcaggtgtctgtgctgaagggccaggtgtacatcctgggccgggagagccccctgagcctgtacaatgaggagctggtgtccatgaatgtgcagggcgactatgagcccacagatgccaccggcttcatcaacatcaacagcctgcggctgaaggagtaccaccggctgcagagcaaggtgacagccaagtag

SEQ ID NO: 283818 - DNA, 510 bp, Artificial Sequence
  derived and/or modified sequence
gagcccggccccctgcagctgatggtggtggccgaggcccagggcggcaagcacggcgtgggcagaattgatattgtggagaaccgcttcatcggcatgaagagccggggcatctatgagaccccagctggcaccatcctgtaccacgcccacctggacatcgaggccttcaccatggaccgggaggtgaggaagatcaagcagggcctgggcctgaagtttgctgagctggtgtacacaggcttctggcacagcccagaatgtgaatttgtgcgccactgcatcgccaagagccaggagcgggtggagggcaaggtgcaggtgtctgtgctgaagggccaggtgtacatcctgggccgggagagccccctgagcctgtacaatgaggagctggtgtccatgaatgtgcagggcgactatgagcccacagatgccaccggcttcatcaacatcaacagcctgcggctgaaggagtaccaccggctgcagagcaaggtgacagccaagtag

SEQ ID NO: 283819 - DNA, 597 bp, Artificial Sequence
  derived and/or modified sequence
atgagcagcaagggctctgtggtgctggcctacagcggcggcctggacaccagctgcatcctggtgtggctgaaggagcagggctatgatgtgattgcctacctggccaacatcggccagaaggaggactttgaggaggccaggaagaaggccctgaagctgggcgccaagaaggtgttcattgaagatgtgtcccgggagtttgtggaggagttcatctggccagccatccagagcagcgccctgtatgaggaccgctacctgctgggcaccagcctggcccggccctgcatcgccaggaagcaggtggagatcgcccagcgggagggcgccaagtatgtgagccacggggccactggaaaaggaaatgaccaggtgcgctttgagctgagctgctacagcctggccccccagatcaaggtgattgccccctggaggatgcctgagttctacaaccgcttcaagggcagaaatgacctgatggagtatgccaagcagcacggcatccccatccctgtgacccccaagaacccctggagcatggatgagaacctgatgcacatctcctatgaggccggcatcctggagaacccctag

SEQ ID NO: 283820 - DNA, 540 bp, Artificial Sequence
  derived and/or modified sequence
atgagcagcaagggctctgtggtgctggcctacagcggcggcctggacaccagctgcatcctggtgtggctgaaggagcagggctatgatgtgattgcctacctggccaacatcggccagaaggaggactttgaggaggccaggaagaaggccctgaagctgggcgccaagaaggtgttcattgaagatgtgtcccgggagtttgtggaggagttcatctggccagccatccagagcagcgccctgtatgaggaccgctacctgctgggcaccagcctggcccggccctgcatcgccaggaagcaggtggagatcgcccagcgggagggcgccaagtatgtgagccacggggccaccgggaaggtgattgccccctggaggatgcctgagttctacaaccgcttcaagggcagaaatgacctgatggagtatgccaagcagcacggcatccccatccctgtgacccccaagaacccctggagcatggatgagaacctgatgcacatctcctatgaagctggcatcctggagaacccctag

SEQ ID NO: 283821 - DNA, 1239 bp, Artificial Sequence
  derived and/or modified sequence
atgagcagcaagggcagcgtggtgctggcctacagcggcggcctggacacatcatgtatactagtgtggctcaaagagcaaggctacgacgtgatagcctacctggcaaacatcgggcagaaggaagattttgaagaagccagaaagaaggcgctcaagctaggtgcaaagaaggtttttatcgaggatgtctccagggaattcgtggaagaattcatctggcccgcaatccagtcaagtgccctgtatgaggatcgttatctcttaggtacaagtctggcgcggccctgtattgctcgcaagcaggtcgaaattgcacagagagagggggcaaaatacgtgagccacggggcaaccggcaaagggaatgaccaggtgcggtttgaactcagctgctactctttggcacctcagatcaaggtcattgcaccttggaggatgcctgaattttacaatcgatttaagggtagaaacgatctgatggaatatgccaagcagcatggaatcccgattccagttacacctaaaaatccctggtctatggacgaaaacctgatgcatatctcttacgaagccgggattttggaaaaccctaagaaccaagcccccccaggtctatacactaagactcaggatccagctaaggcgccaaacacccctgacatcctggagattgagtttaagaaaggagtgccggtaaaagtgaccaacgtgaaggatgggacaactcaccagactagcctagagttatttatgtacctaaacgaagtcgcaggaaaacatggagtcggcagaattgatattgtggaaaatcgcttcattgggatgaagagccggggcatttacgaaacaccggctggcaccatcctgtaccacgcccatttagatatcgaggctttcaccatggatcgcgaagtgcgcaaaattaagcagggactcgggctgaagtttgcagagttggtatacactggcttctggcactcacctgaatgcgagtttgtgcggcactgtatagctaaaagccaggaacgggtggaaggtaaagtacaggtttccgtactgaaggggcaagtttacattctcggcagagaatctccgctctccctgtataacgaggagttggtgtctatgaatgtgcagggtgattacgagcctaccgacgcaacgggtttcataaatatcaattccttacggctaaaagagtaccatcgcctgcagtctaaagtcacagcaaagtag

SEQ ID NO: 283822 - DNA, 1239 bp, Artificial Sequence
  derived and/or modified sequence
atgagcagcaagggcagcgtggtgctggcctacagcggcggcctggatacctcttgtatcctcgtttggctcaaggaacaagggtatgatgtgatagcctacctcgccaatatcggccaaaaggaggactttgaagaggcccgcaaaaaggcattgaaactaggcgcgaaaaaagttttcatcgaggacgtgagccgcgaattcgtagaagagtttatctggcccgccatacagtctagtgcactgtacgaagaccgctatctcttgggtaccagtctggctcgtccatgtatcgcccggaaacaagtggagattgcgcagagagagggcgctaaatatgtatcccacggcgccacagggaaggggaatgatcaggtaagatttgaactgtcatgttacagtctggccccacaaatcaaggtgatcgcaccttggcggatgccagagttctataaccgtttcaaaggcagaaacgacctcatggaatacgcaaagcagcacggtatccccatccctgttacccccaagaacccatggagcatggacgagaatctcatgcacataagctatgaggcgggaatactggagaatccaaaaaaccaagcaccaccggggctgtacaccaagacacaggaccctgccaaggcccccaatacacctgacatactggagatagagttcaagaaaggggttccggtgaaggttacgaatgtgaaggatgggactactcaccagacgtccctcgagctgttcatgtacctgaatgaggtagcagggaagcatggtgtcggccgcatagacatcgttgagaacagatttatcggcatgaaaagcagaggaatatacgagaccccagctggcacaatcctgtaccacgctcatcttgatatcgaggcctttacaatggaccgcgaggtgcggaaaatcaaacaggggttaggtctaaagttcgcagagctggtgtacaccggcttctggcattccccagaatgcgagtttgttagacactgcatcgcaaagagccaggagcgtgttgaaggaaaggttcaggtaagtgtgttaaaaggccaggtgtatatcctagggcgtgaatccccactcagtctgtacaacgaggaactcgttagcatgaatgttcagggtgactatgagcctacagacgctacagggtttatcaatatcaactcgctgcgcttaaaagaataccatcgcctgcaaagtaaggtcacggccaaatag

SEQ ID NO: 283823 - DNA, 510 bp, Artificial Sequence
  derived and/or modified sequence
gagcccggccccctgcagctgatggtggtggccgaggcccagggcggcaagcacggagttgggcgcatcgatatagtggagaacaggtttataggcatgaagtccagaggaatttatgagaccccggccggcactattctgtatcacgctcacctagacatcgaggccttcaccatggacagagaggtgagaaagatcaaacaggggcttggactcaaatttgccgagctggtgtacaccggcttttggcacagtcctgagtgtgaattcgtgagacactgtattgctaaatcccaggaacgagttgaaggaaaagtccaggtcagcgtgctgaagggtcaggtgtatattctggggagagagagtcccctgtccctttacaatgaagagttagtctccatgaacgttcagggcgactatgaacccactgacgcgactgggttcatcaacatcaatagcttgaggttgaaggaatatcataggctacagagcaaagttactgcaaaatag

SEQ ID NO: 283824 - DNA, 1239 bp, Artificial Sequence
  derived and/or modified sequence
atgagcagcaagggcagcgtggtgctggcctacagcggcggcctggacactagctgcatcctggtctggctcaaggagcaaggctacgacgtgatcgcctaccttgctaatatcgggcagaaggaagactttgaggaagctcggaagaaggctctgaagctgggggctaagaaggtctttatcgaggacgttagcagggagtttgtggaagagtttatctggccggctatccagagttcagcgctttacgaagacaggtacctcctggggacctcacttgcaaggccctgcatcgcaaggaaacaggtagaaatcgcccagcgggaaggcgcaaagtatgtatcacacggcgctaccggcaagggcaatgatcaagtcaggtttgagctgagctgctattctctggcccctcagatcaaagtgatagctccatggagaatgcctgagttctataatcgcttcaagggaagaaacgacctaatggagtacgctaaacagcacgggatcccaatccccgttactcctaagaacccatggagtatggatgaaaatctaatgcacatctcctatgaagccggaattctggagaaccctaagaatcaggctcctcccggactgtatactaagacccaagatccagcaaaggcaccaaacacacccgatattctggagattgagttcaaaaagggagtccccgttaaggtgacaaacgtgaaggacggaactacccaccagacatccttagaattgtttatgtatctgaacgaagtagcaggaaagcatggcgtggggagaattgatattgtggaaaataggtttataggcatgaaaagtagaggcatctacgaaacacccgctggaacgatcctgtaccacgcacacctggacattgaggccttcacaatggatagagaggtgaggaaaattaaacaggggctgggtctaaaattcgccgagttggtgtataccggcttttggcatagcccagagtgcgagtttgtgcggcattgtatcgccaaaagccaggagcgagtggagggcaaagtccaggtgagcgtgctgaaagggcaagtctacatcctgggccgcgagtcccccctctcattatataacgaggagctcgtttcaatgaacgtgcagggagactacgaacctacagacgcgaccgggttcattaacatcaattcgctgaggttaaaggaatatcaccggctgcaatctaaggtgaccgctaaatag

SEQ ID NO: 283825 - DNA, 1239 bp, Artificial Sequence
  derived and/or modified sequence
atgagcagcaagggcagcgtggtgctggcctacagcggcggcctggacacctcctgtatactggtgtggcttaaagaacaggggtatgatgtcatagcttatctagcaaatattgggcagaaagaggattttgaggaagccaggaaaaaggctctcaaactgggggctaagaaggtctttatcgaggatgtctcccgcgaattcgtcgaagagttcatttggccagccattcaatccagcgctctctatgaggatcggtacttacttggaactagtttggctcggccttgcatcgccagaaaacaggtcgagattgcccaacgcgaaggcgccaaatacgtcagccacggagcaacgggcaaagggaatgatcaggtgcggtttgagctgtcctgttactctctggctccacaaatcaaagtcatcgcaccctggagaatgcccgagttctacaatcgctttaagggcagaaacgatctgatggaatacgccaagcagcacggaattccaattccggtgactccaaagaatccgtggagtatggacgaaaatctaatgcatatctcctatgaggcggggattctggaaaatccaaagaaccaggcacctcctggtttgtataccaagacacaagaccctgccaaagccccaaataccccagatatcctcgaaattgagttcaagaagggggtgccagtgaaagtcacaaacgtgaaggatggcaccacccatcagacctcactggagttattcatgtatctgaacgaagtcgccggcaaacatggtgtgggccggatagacattgtagagaatagatttatcgggatgaagtctaggggcatttatgaaacgccggctggaaccattctttaccacgcccacctggatatcgaagcgttcaccatggatcgtgaggtacggaaaattaagcaggggctggggctcaagtttgccgagcttgtttacaccggtttctggcacagccctgagtgtgagtttgtccgtcattgcatagctaagagtcaggagagagtggagggaaaggtgcaggtgtctgtactgaaaggacaagtatacattctgggccgcgagagtcctctctcactctacaatgaagagctggtctcgatgaacgttcagggggattacgaaccaaccgatgcgacaggctttattaacataaactccctgaggttgaaggagtaccaccgtctgcagagcaaggtgaccgcaaagtag

SEQ ID NO: 283826 - DNA, 597 bp, Artificial Sequence
  derived and/or modified sequence
atgagcagcaagggcagcgtggtgctggcctacagcggcggcctggacacatcttgcattctcgtttggctgaaagaacagggttacgatgtgatcgcctatttggcgaatattgggcagaaggaagactttgaggaggcccgcaaaaaggcccttaaactgggtgccaagaaggtctttattgaggacgttagtagagagttcgttgaggaattcatctggcctgccatccagtccagcgcgctctatgaggatcggtacttgctcggcaccagtctggctcggccttgtatcgctcggaaacaggtcgagatagcacagagagagggagccaagtatgtctcacacggcgcaacgggaaagggaaatgatcaggtgcgatttgagctctcttgctatagcctggcacctcagattaaggtgatcgccccttggcgcatgccagagttctataacagatttaagggtagaaatgacctgatggaatacgctaagcagcacgggatccctatacctgtaacccccaaaaacccctggagtatggatgaaaatttaatgcacatctcctatgaagccggcatcctggagaacccatag

SEQ ID NO: 283827 - DNA, 540 bp, Artificial Sequence
  derived and/or modified sequence
atgagcagcaagggcagcgtggtgctggcctacagcggcggcctggacacatcttgcattctagtgtggcttaaagaacagggatacgacgttattgcgtacctggcaaatattggccaaaaagaagactttgaggaggcccgcaagaaagcgctgaaactgggcgcgaaaaaagttttcattgaagatgtgagtcgcgaatttgtggaggaattcatctggccagccattcaatcatccgctctctatgaggacaggtatctcctcggcacaagcctggcccgcccctgtatagccaggaaacaggtggaaattgcgcagcgcgaaggggccaagtacgtctctcatggcgccaccggcaaagtgatagcgccctggaggatgccagaattttataatcgcttcaagggaagaaacgatcttatggagtatgccaagcagcacgggattcctataccagtgactccgaaaaatccatggagtatggacgagaacttaatgcatatcagttatgaagcaggcatactggagaacccttag

SEQ ID NO: 283828 - DNA, 1239 bp, Artificial Sequence
  derived and/or modified sequence
atgtcttccaagggaagtgtagtgcttgcctacagtggaggcctggatacatcctgcatcctcgtatggctgaaggagcagggatacgacgtgatcgcttaccttgctaacatcggccagaaggaggacttcgaggaggccaggaagaaagcacttaagctgggagccaagaaggtattcatcgaagacgtttcacgtgagtttgtggaagaatttatttggccagcgattcagagctccgccttgtatgaagataggtatctcctggggacatctttggctcggccatgcattgccaggaaacaagtagaaattgctcagcgcgaaggagctaagtatgtgtcgcatggtgctacgggcaagggcaacgatcaggtgcggtttgaactgtcatgctattctcttgctccacagatcaaggtaatagctccctggagaatgccggaattttataatcgctttaagggacgcaacgacttgatggaatatgctaaacagcatggaattccaataccggtaaccccaaaaaatccctggtctatggatgaaaatctgatgcacatttcttatgaagccggaattctggagaatccgaaaaatcaggcacccccaggcctgtataccaagacccaggaccctgcaaaagctccaaacacacctgatattcttgagatcgaatttaagaaaggcgtgccggtcaaagtgactaatgtgaaggatggaaccacccaccagacatcactggagttgtttatgtacctcaacgaagttgccggtaagcacggagtcggcaggattgacatcgttgaaaacaggtttatcggtatgaagtcccggggtatctatgaaacacctgctgggactattctctaccacgctcacttggatatagaagctttcaccatggaccgggaagttcgcaagatcaagcaggggctgggtttgaaatttgccgagctcgtgtacacggggttttggcactcgcccgagtgcgagtttgtgcgacattgcatcgctaagtcacaggagcgggtggagggaaaggttcaggtctctgtgctcaagggacaagtgtacattctggggcgtgagagccccctgagtctttataacgaggaacttgtgagcatgaacgtgcaaggggactacgagcccacagacgcaactgggtttatcaatatcaattcactgcggcttaaagagtaccatcggcttcagtccaaggtgactgctaagtag

SEQ ID NO: 283829 - DNA, 1239 bp, Artificial Sequence
  derived and/or modified sequence
atgagcagtaaaggatctgtggtgctcgcttactccggagggctggacacgtcgtgtatcttggtatggttgaaggagcagggttacgacgtgatcgcatacctggcaaacatcggccagaaagaggacttcgaggaggcccgaaagaaggccctgaaactgggcgctaaaaaagttttcattgaggacgtatctagagagttcgttgaggagtttatatggccggcaattcaaagtagcgccctttatgaagaccgataccttttgggaacatccctggcccgaccatgtattgctcgcaagcaagtggagatcgcacagcgagagggagcgaagtacgtcagccacggcgctacagggaagggcaacgatcaggtgcgcttcgagttgagttgctactcacttgcgcctcaaatcaaggtaatcgctccgtggcgtatgcctgaattttacaaccggttcaagggcaggaacgaccttatggaatacgcaaagcagcacggtatacccataccagtaacaccgaaaaacccctggagcatggacgagaacttaatgcatatctcttacgaggcgggaatcctggagaacccgaagaaccaggcccctccgggactgtacacgaaaacgcaggacccagctaaggcaccaaacactccggacatccttgaaatagaattcaagaagggcgtgccagtgaaggtcaccaatgtaaaggatgggactacccaccagacttcactggaattatttatgtacttgaatgaggtggctggaaagcatggagtaggcaggattgatatagtggaaaataggtttattgggatgaagtctcgcggaatctatgaaacacccgctgggactattctctatcatgcccacctcgacatagaggcatttaccatggaccgggaggtgcgtaaaattaagcaagggctcggactcaaattcgcggagcttgtgtacaccgggttctggcatagtcccgaatgtgagtttgtgaggcattgtatcgcgaaaagccaagagcgggtggagggcaaggtgcaggtgtcagtcctcaagggccaagtgtacatcctgggcagggaatcgccgctgtcactctacaacgaggaattggtttccatgaacgttcagggagactacgagcccaccgacgcgactgggtttataaacattaacagcttgcgacttaaagagtaccacagactccagagcaaggtgactgctaagtag

SEQ ID NO: 283830 - DNA, 510 bp, Artificial Sequence
  derived and/or modified sequence
gaacccggacctttgcagctaatggtggttgcggaggcccagggagggaagcatggagtcgggagaattgatattgtggaaaacagattcattgggatgaaatcgcgtggcatttacgaaacaccagcaggtacaatcttgtaccacgcacacctggacattgaagccttcacaatggatcgggaagtgcgcaaaataaaacagggcctggggctaaaattcgctgagctggtgtataccggattttggcatagccccgagtgtgaatttgtcagacactgcatcgcaaaatcacaggagagggttgagggcaaggtccaagtgtccgtgctgaagggacaagtctacattctgggaagagaatctcccttgtcattgtacaacgaggagcttgtctcgatgaatgtgcagggtgattatgaaccgactgatgctactgggtttatcaatatcaacagtcttaggctcaaagaataccatcgcttgcaatcaaaagtgactgcaaagtag

SEQ ID NO: 283831 - DNA, 1239 bp, Artificial Sequence
  derived and/or modified sequence
atgtctagcaaggggtcagtggtcttggcctattccgggggattggatacaagttgcattctcgtgtggctgaaagaacagggatacgacgtgatcgcatacctggctaacatcggccagaaggaggattttgaagaggcacgtaagaaggccctgaaacttggcgcaaaaaaggtttttatcgaagacgtttctcgtgagttcgtggaagaatttatctggccagccattcagtcctctgcactgtatgaggacaggtatttactgggcacctctctggcacgcccatgtatcgccaggaagcaggtcgagattgcccagagagagggcgctaaatatgtcagccatggtgcgaccggtaaaggaaacgatcaggtgcgcttcgagctgagctgctactccctagcaccacagatcaaggtcattgccccttggcgaatgcccgagttttataacaggtttaagggcagaaacgatttgatggagtatgcgaaacaacatggtatccctatcccggttacaccaaagaacccttggagcatggacgaaaacctgatgcatattagctatgaggccggaattcttgaaaaccccaaaaatcaagcccctcccggactttatacaaagacacaggacccagctaaagccccaaacaccccagacattctcgagatcgaattcaagaaaggggtgcccgtgaaagtgacaaatgtgaaggacggcacaactcaccagacatcgctcgagttattcatgtatctaaacgaggtggctggcaaacatggggtgggtcgaatcgatatcgtggagaaccgatttattggcatgaagtcccgcggaatctatgagacaccagcagggacaatcctctaccatgcacatcttgatatagaggcttttactatggatcgcgaggtgcgtaagataaagcaaggcctaggcttgaaatttgcggagctggtttacactgggttctggcactctccagagtgtgaattcgtgaggcattgcatagccaagagtcaggagcgggtggaaggaaaagtgcaagtgagtgtcttaaaggggcaagtatatattttaggcagggaaagtccgctgtctctatacaatgaggaactggtgtctatgaacgtgcaaggggattatgagccaactgacgcaaccggcttcatcaacattaatagcctgcggctgaaggaataccatcgtctccagagcaaagtcactgcaaagtag

SEQ ID NO: 283832 - DNA, 1239 bp, Artificial Sequence
  derived and/or modified sequence
atgagcagcaagggaagcgtggttttagcgtattctggagggctggacacttcctgcatattggtctggctgaaagagcagggatatgacgtgatcgcctacttagccaacattggccagaaggaggattttgaggaggccagaaagaaggctcttaagctgggagccaaaaaggtcttcatagaggatgtatcccgtgagtttgtcgaggaattcatttggccagctatccagtcgtctgccctctacgaagacagatacctcctgggcacaagcctggccagaccctgcatagcaagaaaacaggttgaaatcgcccagcgggagggcgcaaaatatgtctcccacggtgctacgggcaagggtaatgatcaggttcgtttcgaactgagctgttattctctggcccctcagataaaggtaatcgccccatggcggatgcctgagttctacaaccggttcaagggccgaaacgacctgatggagtatgccaagcagcacggaatcccaatcccagtgacgcccaagaatccatggtcaatggatgaaaacctaatgcacatcagttacgaggcagggatcttggaaaacccaaaaaaccaggccccaccaggtttgtacactaagacacaggacccagcaaaagctcctaacaccccagacatcctagagattgaattcaagaaaggagttccagtcaaggtgaccaacgtgaaggatgggacaactcaccagaccagtctggagctgtttatgtatttgaacgaagtcgcaggcaaacacggggtgggcagaatcgacattgttgagaatcggtttataggcatgaaaagcaggggcatctacgagactcctgcgggaactatcttataccatgcccacctggacatcgaagcattcacgatggatcgagaggtccgcaagatcaagcagggacttggacttaagttcgcagagctggtgtataccggcttttggcacagtccggagtgtgaattcgtccgtcactgcatagccaagtcccaagaacgcgtggaagggaaagtccaggtgagtgtactgaagggacaagtctacattctgggtcgcgaatcaccactgtctctgtacaatgaggagttggtctcgatgaacgtgcaaggcgactatgagcccaccgacgccacaggatttatcaatatcaactctctgaggctcaaggagtatcatcgcctgcagagcaaagtcaccgcgaaatag

SEQ ID NO: 283833 - DNA, 597 bp, Artificial Sequence
  derived and/or modified sequence
atgagcagtaaagggtctgtggtgctggcatactccggtggactcgacacctcatgcatcctcgtctggttaaaggaacaaggatatgacgtgatcgcctacttggctaacataggccagaaagaagactttgaggaggccagaaagaaagccttaaagcttggggcaaagaaggttttcatcgaggacgtgtcaagagaattcgtcgaggagtttatttggcccgcaattcaatccagcgctctgtacgaggacaggtacctcttgggcaccagcctcgccaggccatgtatcgcaaggaagcaagtcgagatcgcccagagggagggtgccaagtatgtgtctcacggggctaccggtaagggcaatgaccaagtccggtttgaactttcttgctacagcctggcccctcagataaaagttatcgccccttggaggatgcccgaattctacaaccgcttcaaggggagaaacgacttaatggagtatgcaaaacagcatgggattcccatacctgtgactccaaaaaacccgtggagcatggacgagaatcttatgcatatcagctacgaggctggcatcctagaaaacccttag

SEQ ID NO: 283834 - DNA, 540 bp, Artificial Sequence
  derived and/or modified sequence
atgagcagcaagggatccgtggtgctggcttactccgggggacttgacacatcatgcattctcgtgtggttgaaagagcaggggtatgacgtaatagcatatctcgctaacattggccagaaggaggatttcgaagaggctcgcaaaaaagccctgaagttaggggctaagaaggtcttcatagaggatgtgtcgcgggagttcgtggaagagtttatctggcctgccatccaaagttccgcactgtacgaggatcggtacttactcggcacaagcttggctcgaccttgcattgcgaggaagcaagtggagatcgcccagagggagggggctaaatatgtgtcacacggcgcaaccggcaaggtaattgcgccatggcgcatgcctgagttctataacaggtttaagggtaggaatgatctaatggagtatgccaagcagcatggcatcccaatccccgtcactcccaagaacccctggtccatggacgagaacctgatgcacatcagctacgaggctgggattcttgaaaacccgtag

SEQ ID NO: 283835 - DNA, 1236 bp, Artificial Sequence
  derived and/or modified sequence
atgtcctccaagggatccgtcgtcctagcctactcgggagggttggatactagctgtattctggtgtggctcaaggagcagggctatgacgtcattgcttatttggcaaatatcgggcagaaggaggatttcgaagaggcccgtaaaaaagccctaaaacttggggctaagaaagtcttcatcgaagacgtatcacgagaattcgtggaagaattcatatggcccgccattcaatccagtgcgctttatgaggaccgatatctgctagggacgagccttgcccggccttgcatcgcacgcaaacaggtggaaatagcacagagggagggggcaaagtatgtttctcatggcgctacaggtaagggaaacgatcaggtcagatttgaactcagctgctattccctggccccacagattaaggtcatcgccccctggcgcatgcccgagttctataacaggttcaagggacggaatgatctgatggagtacgccaagcagcacggcatacccatccccgtcacacccaaaaatccttggtccatggatgagaatcttatgcatatctcctatgaggccggcattctcgaaaacccaaaaaatcaagcacctcctggactctatacgaagactcaagatcccgctaaggcccccaatacaccggacatacttgagattgagtttaagaaaggagttccagtgaaagtcacgaatgtcaaggacgggaccacccatcagacctccttggagcttttcatgtacctaaacgaggtggcgggtaagcatggagtgggccgcattgacattgtggaaaaccgttttataggaatgaagtccaggggcatttacgaaaccccggctggtacgatcctgtaccatgcccatcttgacattgaggcatttaccatggaccgggaggtgcgaaagatcaaacaagggctgggacttaaatttgcggagctagtttacacgggcttctggcactccccagaatgcgagtttgttcggcattgcatcgcaaagagccaggaaagggttgagggtaaggttcaggtgtctgtgctgaagggacaagtctacatattaggacgtgaaagtcctctgtcactgtacaacgaggaactggtgagtatgaatgtacagggtgactatgagccgactgatgcgaccggattcatcaatatcaacagcctgaggctcaaagaatatcacaggctgcagtcaaaggtgactgccaaa

SEQ ID NO: 283836 - DNA, 1236 bp, Artificial Sequence
  derived and/or modified sequence
atgagtagtaaaggcagcgtggtgcttgcatattccggcggacttgatacctcttgcattctcgtgtggcttaaagagcaaggctacgacgtgatcgcatacctggctaatattgggcagaaggaagactttgaagaggccaggaagaaggctctcaaattgggcgcaaagaaggtcttcatcgaagacgtcagtcgtgagttcgtagaggaatttatctggcccgcaattcagtccagtgctctttacgaggaccgctatttacttggaactagtctggctagaccctgcatcgctagaaaacaagtcgagatagctcagagagaaggggcaaagtacgtctcacacggtgcaaccggaaaggggaatgaccaggtccgtttcgaactcagctgctattccctcgctccccaaatcaaagtgattgcaccgtggcgcatgcccgagttttataacaggttcaaaggaaggaatgaccttatggaatatgccaagcaacatggaatccctatccccgttacacccaaaaatccatggagcatggatgagaacctgatgcatatttcatatgaagccggtatcctggaaaaccctaaaaaccaagccccgcccggcctgtacacaaagactcaggaccctgctaaagcccctaatacccccgacattttggagatcgaatttaagaaaggggtgccagtcaaggtgaccaacgttaaggacgggacaacccaccaaactagtctcgaacttttcatgtacctcaacgaggtggcaggaaaacatggcgtgggaagaatcgatatcgttgaaaacagatttatcggtatgaaaagcagggggatctatgagacaccggcaggcactatcctctatcacgctcacctggatattgaggcctttaccatggacagagaagtgcgtaaaattaagcagggcttgggcctgaaatttgccgagctcgtgtataccggcttttggcattcacctgaatgcgagttcgtgaggcattgtatcgctaagagtcaggagagagtggagggtaaggtacaggtttccgttttgaagggccaagtgtatattctgggaagagaatcgccactctcgctctacaacgaggaactcgttagcatgaacgtgcaaggagattacgaacctaccgacgctaccggtttcatcaacatcaacagcttgagactgaaggaataccacagacttcaatccaaagtcaccgctaag

SEQ ID NO: 283837 - DNA, 1236 bp, Artificial Sequence
  derived and/or modified sequence
atgtcatctaaggggtcagtggtattggcctatagtggagggctggacaccagctgtattctcgtttggctgaaagagcaaggttatgatgtgatcgcttaccttgcgaacataggccagaaggaggattttgaggaggcaaggaagaaagccttgaagctgggcgctaagaaagtttttatagaggatgtaagccgcgaatttgtcgaggagttcatttggccagcaatccagagttcggccctttacgaagatagatatttattgggcacctccctggctcggccctgcattgctcggaagcaagtggagattgcccaacgcgaaggagccaagtatgtgagtcatggagcgaccgggaagggcaatgaccaggttcgttttgaactctcctgttattcgctggcacctcaaataaaggtcatcgcgccgtggcggatgcccgagttctacaatagattcaagggcaggaacgatttgatggagtatgccaagcagcacgggatccccattcctgtcacccccaaaaacccctggtcgatggacgagaatctgatgcatatctcctatgaggctggaattctggagaatcctaagaaccaggctccgcctggcctgtatactaagacccaggatcccgctaaggcgcccaacacacccgacattctcgaaattgaatttaagaaaggggttcctgtcaaggttactaacgttaaagatggcactactcatcagacctccctcgagctttttatgtaccttaatgaggttgctggtaaacacggcgttggccgcattgatattgtggagaaccgcttcatcgggatgaagtcacgaggaatttacgagactccagctggtaccatactctaccacgcccacttagacattgaggcatttaccatggatagggaggtgcggaagattaagcagggcctcggcctgaagttcgcagagttagtgtatacgggcttttggcacagtccagagtgcgaattcgtgcgtcactgcatcgccaagagccaagaaagagtggaggggaaggtccaagttagtgtgctgaagggccaggtgtacatcttaggccgagagtcccctttgtccttgtacaacgaggagctggtgagcatgaatgtccagggcgactatgaaccaacagacgccactggctttatcaacattaactcgcttagactcaaagagtatcatcggctccagtctaaagtcaccgcaaag

SEQ ID NO: 283838 - DNA, 1236 bp, Artificial Sequence
  derived and/or modified sequence
atgagtagcaagggctccgttgtgttggcatacagcggaggcctggacacctcatgtattctcgtgtggctcaaggagcaaggctacgatgtgatagcctacctggccaacattgggcagaaagaagactttgaagaagcaaggaaaaaggctctgaagctgggagccaagaaggtgtttattgaggatgtctccagggaatttgtcgaggagtttatctggccagccattcagtcttccgcgctttacgaagatcgctatttactggggacctcgttagcccggccttgtattgcccgcaaacaggtagaaatcgcccaaagagagggcgccaagtacgtgtcccacggcgccaccggaaagggaaatgaccaggtgagattcgagctcagttgttactccctggcacctcagatcaaggtgatcgctccatggcgtatgcctgagttctataaccgctttaagggacgtaacgatctgatggagtatgccaagcagcatgggatccccatccccgtaacccccaagaatccttggagtatggatgaaaatcttatgcacatttcgtatgaggcggggatactggagaatcctaaaaaccaggcaccacctggcctgtatacaaaaacacaagaccctgccaaagcccctaacacacccgatattctggaaattgagttcaaaaaaggcgtgccagtgaaagtcacaaatgtaaaagacggcaccacacatcagacgtcactggaattgttcatgtatctcaatgaagtggcagggaaacatggggttggtaggatcgatatagtggagaatcgcttcatcggaatgaaatccagaggaatctatgaaacaccagccggtacaatactttatcatgcccacctcgacattgaagcattcaccatggacagggaagttcgcaagattaagcaaggtcttgggttgaaatttgctgaactggtatatacgggattttggcactcacctgaatgcgagttcgttaggcattgtatagcaaagtcccaggaacgcgtggagggcaaagtccaggtctccgtgctgaaaggacaggtttatattttggggagagagtcccctttgagcctttataatgaggagctggttagcatgaacgtgcagggcgattacgaacctacggatgccaccggttttatcaacattaactccctccgcctaaaggagtatcaccgattgcagagcaaagtgactgccaag

SEQ ID NO: 283839 - DNA, 1236 bp, Artificial Sequence
  derived and/or modified sequence
atgtcgtctaaggggagcgtcgttctcgcctatagcggtgggttggataccagttgcattcttgtctggctgaaggagcagggctacgatgttattgcttacctggccaatatcggtcagaaggaggattttgaggaggcacgaaaaaaggcactgaaactgggggccaagaaggttttcattgaagacgtgtcacgcgagttcgtggaggaattcatatggccggccattcagtcgagcgccctctacgaagaccggtatctcctaggtacctcactcgccaggccctgtatcgcccgaaagcaggtggagatagcccaaagggagggagcgaagtacgtgagccacggagccaccgggaaggggaacgatcaagtgcggttcgaattaagctgttacagtctggccccccagattaaagtcatagcgccctggcggatgccagaattctacaatcggtttaaagggaggaatgacctaatggagtacgcgaaacaacacggtattccaattcccgtgactccgaagaacccgtggtctatggatgagaaccttatgcatataagctacgaagcgggtattctggagaatccgaagaatcaggccccaccaggactgtacacaaaaactcaggatccggccaaggcccccaatacaccagacatcctggaaatagagttcaaaaaaggcgtgcccgttaaggtgacaaatgtgaaggatggaacgacccatcagactagcttagaattgtttatgtacctgaatgaagtcgccgggaagcatggggtcggtagaatagacattgttgagaatcgtttcatcgggatgaaaagccgtgggatatatgagacacccgctggtaccattctgtatcacgcccacctcgacatcgaggccttcaccatggaccgcgaggttcgaaaaatcaaacaggggcttggactgaagttcgctgaactggtgtacaccgggttttggcacagccccgagtgcgaattcgtgaggcattgtattgcaaagagccaggaacgggtggaggggaaggtgcaggtaagcgtactcaagggacaggtttatattttgggacgcgagtccccgctatctttgtacaatgaggagctcgtctcaatgaacgttcagggagactacgagcccactgacgcaacgggctttattaatattaattcgctgagactgaaagaataccaccgcctacaatcaaaggtgacggctaag

SEQ ID NO: 283840 - DNA, 1236 bp, Artificial Sequence
  derived and/or modified sequence
atgtcctcgaaggggtcagtggtgttggcatactccggcggcctcgacacctcctgtatcctggtgtggttgaaggagcagggatacgacgtgatcgcctacctcgctaacattgggcaaaaggaagatttcgaagaggcccgcaagaaagccctgaaactgggggcgaaaaaggttttcatcgaggatgtgtcgcgcgaattcgtcgaggaattcatttggccggccatccaatcctcggccctgtacgaagatcggtacctgctgggcacgtctctggcgaggccgtgcatcgcccggaagcaggtggaaatcgcccagcgcgagggagctaagtacgtgtcgcacggtgcgaccggaaaagggaacgaccaggtgcggttcgagctctcctgctactctctggctccgcaaatcaaggtcatagcgccgtggagaatgccagagttctataatcgctttaaaggaaggaacgacctcatggaatacgcaaagcaacatggaatcccaatcccggtaacgccgaaaaatccgtggtccatggatgaaaacctcatgcatatctcctacgaggcgggaattctggagaaccctaagaatcaggcaccgccgggactgtacaccaagactcaggatccagcaaaggcacctaacacccccgacattcttgaaatcgagtttaagaaaggagtgccagtgaaggtgactaatgtgaaggatggaaccactcatcagaccagcctcgaactgttcatgtatctgaacgaagtagcgggtaagcacggtgtcggccgaatcgacatagtggagaatagattcataggcatgaaaagcagaggcatctacgagacgcctgcgggaactatcctctaccatgcacatttggacatcgaggcttttactatggatcgggaagtgcggaagatcaaacaaggacttgggctgaaatttgccgaacttgtctacactgggttctggcactcgcccgaatgcgaattcgtgcgccactgcatcgctaaatcgcaggaacgggtcgaaggtaaggtgcaagtgtccgtgctgaagggccaggtctacatcttgggtcgcgagagcccactgtcgctgtacaatgaggaacttgtctcgatgaacgtccagggtgactatgagccaactgacgccaccggttttatcaacatcaacagtctgagactcaaggaataccaccgtctgcaatcgaaggttactgccaaa

SEQ ID NO: 283841 - DNA, 1236 bp, Artificial Sequence
  derived and/or modified sequence
atgtcgtccaaggggagtgtcgtgttggcctatagtgggggactcgatacttcctgtatccttgtatggctgaaagaacaagggtatgatgttatcgcttatctcgcaaacattggacaaaaagaggatttcgaggaggcacggaaaaaagcactaaaactcggagcgaaaaaagtgtttatagaagatgtgtcccgagaattcgtagaagagtttatctggcctgctatacagtcatcagctttgtatgaggatcggtatttactgggaacatctctagcaagaccttgtatcgctcgaaaacaggtggaaatagcacaaagggagggggccaaatacgtgtcacacggagcgacaggaaaaggaaatgaccaggtccggttcgaattgtcctgttattcgctggcccctcagataaaagtaatcgctccctggaggatgcctgaattctacaatcgcttcaaggggcgcaatgatcttatggaatatgctaaacagcacggaattcctatccctgtgactcccaaaaatccatggtctatggacgagaatcttatgcacatcagttatgaagcagggatcctagagaacccaaaaaatcaggcacctcccgggctttatactaaaacacaggatcccgctaaggcacccaatacaccagatatcctcgaaatcgaatttaaaaaaggagtacccgtcaaagtcactaacgtgaaagatgggacaactcaccagacatctttggagcttttcatgtatctgaacgaagtcgcagggaaacatggagtaggaagaatagacatcgtggagaatcggtttattggaatgaaatcacgggggatatacgaaacacccgctggaactatcttgtatcatgcccatctcgatatagaagcttttacaatggatcgggaagtgcggaaaattaaacagggattagggctaaaattcgctgagctggtttatacaggattctggcattcccctgagtgcgaatttgtacgccactgtatagccaaatctcaggaacgggtagagggaaaagtccaagtcagtgtgctgaaagggcaggtgtatatactcggacgtgaatcacccttatctctgtataacgaagaactcgtcagtatgaatgtacagggggattatgaacctacagatgcaactgggtttataaatattaattctctgcggctgaaggaataccacaggctgcagagtaaagtgacagctaaa

SEQ ID NO: 283842 - DNA, 1236 bp, Artificial Sequence
  derived and/or modified sequence
atgtcgtcgaaggggtcggtggtgctggcatactcaggtgggctcgatacttcctgcatcctggtgtggcttaaagagcagggttacgatgtgatagcgtacctggcaaatatcggtcaaaaggaagattttgaggaggctagaaagaaagccctgaaactgggtgcgaagaaagtgtttattgaggacgtgtcgagagaatttgtggaagaattcatttggcctgccatacagtcatccgctctttacgaggacagatacctgcttgggacgagccttgccagaccttgtatagccaggaaacaagtcgaaattgcccagagagaaggcgcaaaatacgtgtcccatggtgcaactgggaagggaaacgatcaggtccgctttgaactctcctgctactccctcgcaccccagatcaaggtgatcgccccttggagaatgccagagttttacaatagattcaaggggaggaacgacctgatggagtacgcaaagcaacacggaattcccatcccagtgactccaaagaacccgtggtcgatggacgagaacctgatgcatataagctacgaggcgggaattctcgaaaacccaaagaaccaggctccacctggattgtacaccaagactcaagatccggcgaaggcacctaacactcccgatattctcgaaattgagttcaaaaagggagtgcctgtgaaggtcactaacgtcaaggatgggactacccaccaaaccagtctcgaactgttcatgtatctgaatgaagtcgcgggaaagcatggggtcgggagaatagacatagtggaaaaccggtttattggtatgaaaagccgaggcatttacgagactcccgccggaaccattctttaccatgcgcacttggatatcgaagcatttactatggatcgagaagttcgcaagattaagcaaggacttggcctgaagttcgcggaacttgtctacaccggattttggcattcccctgaatgtgagtttgtgaggcactgtattgcaaagtcccaggaaagggtcgaaggtaaagtacaagtgtcggtacttaaggggcaggtgtatattcttggacgggaatcgcccctttctctgtacaatgaagagctcgtgagcatgaatgtccaaggagattacgaacccaccgacgcgactgggtttatcaacataaacagcctgcgtctcaaagaatatcatcgccttcaatctaaagtgaccgccaag

SEQ ID NO: 283843 - DNA, 1236 bp, Artificial Sequence
  derived and/or modified sequence
atgtcttctaaggggtccgtcgtactggcctattcagggggtcttgacacttcttgtatcctggtctggctcaaggaacagggatacgatgtgatcgcctacctcgccaacatcgggcagaaagaagacttcgaagaagcccggaagaaggctctcaagctaggcgccaagaaggtattcattgaggatgtctctagggagttcgtcgaagagttcatttggccagccattcagagctctgcgctgtacgaagatcgctacctccttggcacttctttggcccgcccatgcatcgcacggaagcaagtcgagatcgcacaaagggaaggcgccaaatatgtgtctcacggcgccaccggaaaggggaacgatcaagttcgtttcgagctttcttgctattcactggccccgcagatcaaggttatcgctccttggcgcatgccagaattttataaccgctttaagggaagaaacgatctcatggagtatgccaaacagcacggaattcccatccccgtgacgccaaagaacccatggagcatggacgagaaccttatgcacatttcttatgaggccgggatcctggagaatcccaagaaccaggcaccgcccggtctgtatacaaaaacccaggacccggccaaggcccctaacacaccagacatcttggaaatcgaatttaagaaaggtgttcctgtgaaagttactaatgtaaaggatggcaccacacatcagacatccttggagctcttcatgtacttaaacgaagtcgcgggcaagcatggtgtgggacgcatcgacatagtggagaataggttcattgggatgaagagcagggggatttacgagactccagctggcacgattttataccacgcgcacctcgatattgaggcgtttacaatggacagagaggtccgcaaaatcaaacaagggctcggcctgaaatttgcagaactggtttataccgggttttggcactcacccgagtgcgagtttgtgcggcattgcattgctaaatcccaggagcgcgtggaagggaaggtgcaggtgagcgtgctgaagggtcaggtttacattttaggaagggaaagcccgctcagcttatacaatgaggaacttgtgagtatgaacgtgcagggcgactacgagcctactgacgcaaccggctttatcaacatcaacagccttaggctgaaggaataccatcggttgcagtccaaagtcactgcaaag

SEQ ID NO: 283844 - DNA, 1236 bp, Artificial Sequence
  derived and/or modified sequence
atgtctagcaaaggctccgtcgtgctggcctactcaggaggacttgacacttcgtgcatcttggtgtggctcaaggaacagggctacgatgtcatagcatacctggcaaacatcggacagaaagaggattttgaagaagcccgcaagaaagccctgaaactcggagccaagaaagtctttatcgaagatgttagccgggagttcgtggaagaattcatttggccggcgatccagtcgagcgcgctctacgaggaccgatacctgctgggtacttcactggcgcggccatgtatcgcgagaaagcaagtggaaatcgcacagcgcgaaggcgcaaaatacgtgagccatggagcgaccggaaagggaaacgaccaggtgaggttcgagctgagctgttactccctggcacctcagatcaaggtgatcgccccgtggaggatgccggagttctacaatagattcaagggacggaatgatttgatggagtacgcaaaacagcacggaatcccgatccctgtgaccccaaagaacccctggtccatggacgaaaacctcatgcatatttcgtacgaggctggtatcctggaaaacccaaagaaccaggccccgccagggctgtacactaagacccaagatccggcgaaggcgccgaatacgccggatattctcgagatcgaattcaagaaaggagtccctgtgaaggtcaccaatgtgaaggacggaacgacccatcagacctcattggagctctttatgtacctgaatgaggtcgctgggaagcacggtgtgggacgcatcgatatcgtggagaatcggtttatcggtatgaagagccgggggatctacgaaaccccagccggtaccatcctgtaccatgcccaccttgatattgaagccttcactatggaccgggaagtgcgaaagatcaagcagggactgggactgaagtttgctgaactggtctacactgggttctggcactccccggaatgcgaattcgtgcgccactgcatcgcgaagtcgcaagaacgggtcgagggaaaagtgcaggtgagcgtgctgaagggacaggtgtacatcctcggaagagaatcgccactgagcctgtacaacgaagagttggtgtctatgaacgtgcaaggagactacgaacccactgatgcaactggattcatcaatatcaattcgctgaggctgaaagagtaccaccgcctgcaatcgaaagtcacggccaag

SEQ ID NO: 283845 - DNA, 1236 bp, Artificial Sequence
  derived and/or modified sequence
atgtcgagcaagggttccgtggtgttggcctacagcggcggtcttgacacctcctgcatcctggtctggctgaaggaacaggggtacgacgtgatcgcatacctggctaacatcggacagaaggaggacttcgaagaagcacgcaagaaggccctgaaactgggcgccaagaaggtgttcattgaagatgtgtccagggaattcgtggaagaattcatctggccggccatccaatcgtcggcactctacgaagatcgctacctgctcggaactagcctggcacgaccttgtatcgctcgcaagcaagtggaaatcgcgcagcgggagggcgctaagtatgtgtcccacggtgcgactgggaaaggcaatgatcaagtgagatttgaactctcgtgctactcactggcaccacaaatcaaggtgatcgcgccttggagaatgcctgaattctacaaccggttcaagggccgaaacgatctgatggaatacgccaagcagcacggcatcccgatccctgtcaccccgaagaacccgtggagcatggatgaaaatctgatgcatatctcctacgaagccggtatcctggagaatcccaaaaaccaggcgccgccgggactgtacactaagacccaagacccggctaaggccccaaatacccctgacatccttgagatcgaattcaagaagggagtgccagtcaaagtcactaacgtcaaagacgggaccacccaccagacttcactggaactcttcatgtaccttaatgaggtggcaggaaagcatggcgtggggcggattgacattgtggaaaaccgattcatcggaatgaagtcgcggggaatctacgagactccagctgggaccatcctctaccacgcgcacctggatatcgaagccttcaccatggaccgcgaagtgaggaaaatcaagcagggactcggactgaaatttgctgaactcgtgtacactggattctggcattcgccggagtgcgaatttgtgcggcactgtatcgccaagtcacaagaacgcgttgaaggtaaagtgcaggtgtcggtgctgaagggacaggtgtacatcctgggccgcgaaagcccactgtcgctgtataacgaggagcttgtgtccatgaacgtccagggcgattacgagccgactgatgctaccggtttcatcaacatcaactccttgagactcaaggaatatcatcgactccaaagcaaggtgaccgccaag

SEQ ID NO: 283846 - DNA, 1236 bp, Artificial Sequence
  derived and/or modified sequence
atgagtagcaaaggctcagtggtcctcgcttattccggtgggctggacactagttgcatcttggtgtggctaaaagaacaggggtatgacgtaatagcttacctcgccaacatcggtcaaaaggaagattttgaagaggccaggaaaaaggctctgaaactaggggcaaaaaaggtgttcatcgaggatgttagccgagaatttgtggaggagttcatctggccagccattcagagcagtgcgctctatgaggatcggtacctgctgggcacaagcttggcgcgtccctgtatcgctcgcaagcaggttgagattgcccagcgcgagggcgctaagtatgttagccacggggctactggcaaggggaacgatcaagtgcggtttgagttgtcgtgttatagcctggctccccagatcaaagtgatcgctccttggcgtatgcctgaattctacaaccgtttcaagggccgcaatgacctcatggagtacgctaagcagcacggcattcctatccctgtgaccccgaaaaatccttggagcatggatgaaaacctgatgcacatttcttacgaggccgggattctcgagaatcccaagaaccaggcacctccaggactctacacaaagacacaggatccagccaaggccccaaacacacctgacatactcgagatcgagtttaaaaaaggggtccccgtgaaggtgacaaatgtgaaggacgggacaacacaccagacctctctcgagctgtttatgtacttgaatgaagtcgccgggaagcacggtgtcggcagaatagatatcgttgagaatcgcttcatcggcatgaaatcacgaggaatttatgaaactcccgccggcactatcttgtatcacgcccacttggacatcgaagctttcactatggacagggaggtgcgcaagatcaaacaggggctcggtctgaaatttgcagagctcgtctacactggcttctggcatagccccgagtgcgaattcgtccgacactgtatcgcaaagagccaggaaagggttgagggcaaagtgcaggtcagtgtacttaagggtcaagtctatatcctcgggcgcgaatccccattgagtttgtataacgaggagctggtgtctatgaacgtgcagggcgactatgagccgactgatgccacaggatttattaacatcaactcgttgcgactgaaggaataccaccggttgcagtccaaggtgacagctaag

SEQ ID NO: 283847 - DNA, 1236 bp, Artificial Sequence
  derived and/or modified sequence
atgagcagcaagggctcggtcgtactggcatatagcggagggctcgatacaagctgtatcttggtctggctgaaggaacaaggatacgatgtgatcgcctatcttgctaatatcggccagaaggaggacttcgaggaggcccggaaaaaggcactcaagcttggagccaagaaggttttcatagaggacgtatcccgcgagtttgtggaggagtttatttggccggccatacagagttctgcactctatgaggaccgttacttgctggggacctctttagctaggccttgtatcgcgcgaaaacaggtggagatagctcaacgggagggcgctaaatacgtcagccacggcgccacaggcaagggcaatgatcaagtccggttcgagctgtcatgctattcgctcgcgccacagataaaagttatagccccatggcgcatgcctgaattttataaccgcttcaagggcagaaatgatcttatggaatatgcaaagcagcatggaattccaattcccgtaaccccaaaaaatccctggtctatggatgaaaatctgatgcacatctcatacgaggcaggcattcttgaaaatcccaagaaccaggcaccccccggcttgtacacgaaaacacaagatccagccaaggcaccgaacacccccgacattttggagatcgaatttaagaagggagtgccggtgaaggtcacaaatgtaaaggatggcaccacccatcagacctctcttgagctctttatgtatttgaacgaggtggctggcaagcatggagtgggacggatcgacatcgtggagaatcgcttcattggaatgaaatctcggggcatctatgaaacccccgccggcacgatcctctaccatgctcaccttgatatcgaagccttcacgatggaccgggaagtgcgaaagattaaacaaggattggggctcaaatttgccgagctggtgtatactgggttctggcatagcccagagtgtgagtttgtgcgccactgcatcgccaagtcccaggagcgggtggaagggaaggtccaggtcagtgttctcaagggtcaggtttacatcctaggccgcgagagcccgctgagcctgtacaacgaggaactggtgtctatgaatgtgcagggggattacgagccgactgacgcaaccggcttcatcaatattaacagcctgcgactaaaagagtaccaccgcctccagtccaaggtaaccgcaaag

SEQ ID NO: 283848 - DNA, 1236 bp, Artificial Sequence
  derived and/or modified sequence
atgtcatcaaaggggtccgtagtcctggcctattcaggcgggctcgatacttcttgcatcctcgtctggttgaaggagcaaggttatgatgtcatcgcttacctggccaatattgggcagaaagaggattttgaggaagcccgcaagaaagctcttaaacttggagctaagaaggtattcatagaagacgtttcacgagaattcgtcgaagagttcatctggcccgccatccagagttcagccctctatgaggaccggtacttgctcggcacatcacttgcccgcccatgcattgcacggaagcaggtggagatcgctcagagagagggggctaaatacgtgtcacacggggccacaggcaagggaaacgatcaagtacgatttgagctgagctgctattctcttgcccctcagattaaggtcatcgctccatggaggatgcctgagttttacaatcgatttaagggacgaaacgacctgatggaatacgcgaagcagcatggtattcctatccccgtaacccccaaaaatccttggagcatggacgagaacctgatgcacatctcatatgaagcaggcatacttgaaaaccctaaaaatcaggcgcctcctggtctctatacaaaaacacaagatcccgctaaagctcccaatacccccgatattctggaaatcgaattcaaaaaaggcgtccctgtgaaagtgaccaatgtgaaggatggtacaacccatcaaacaagcttggagctgttcatgtacctgaacgaagtggccgggaagcacggcgtgggacgcatcgatatcgtggagaatcgatttatcggcatgaagtctagaggaatctacgaaacaccggcaggaactattctctatcacgctcacctggacattgaagcttttaccatggaccgggaggtccggaaaattaaacaaggactgggcctcaaatttgcagagctggtgtatactggcttctggcattcccccgagtgcgagttcgtaagacactgtatagcgaaatctcaggagagggtcgaaggcaaggtgcaggtgagcgtgctgaaaggacaggtttatatcctcgggagggagagccctctctctttgtacaatgaggagcttgtgagcatgaacgtccagggagattatgagccaacggatgccaccggatttataaatatcaacagcctccgattgaaggagtaccaccgattgcagagtaaagtgacagccaag

SEQ ID NO: 283849 - DNA, 1236 bp, Artificial Sequence
  derived and/or modified sequence
atgtcctcgaagggttcggtggtgctcgcatattcaggcggccttgacacctcttgcattctggtctggctcaaagaacaaggatacgacgtgatcgcgtacctcgccaacatcgggcaaaaggaagatttcgaggaggctcgcaaaaaggccttgaaactcggcgcgaagaaagtgtttatcgaggacgtctccagagagttcgtcgaagaattcatttggccagctatccaatcttccgcgctctacgaggataggtatctgctcggcacgagcttggcccggccgtgtatcgcccggaagcaggtcgaaattgcgcagcgcgagggagcaaagtacgtgtcacacggagctaccgggaaggggaacgaccaggtgcggttcgagcttagctgttactcgctcgccccgcagataaaagttatcgctccttggcggatgcctgagttctacaatcgattcaagggacgaaacgacctgatggagtatgctaagcaacacggaatcccgattccggtcacccctaagaatccttggtcaatggacgaaaatctgatgcatatttcctacgaagccggaatcctggagaatccaaagaaccaggctccgcctggattgtacaccaagacgcaagacccagccaaggcgcccaacacgcccgatattctggagatcgaattcaaaaagggagtgcctgtgaaggtcaccaacgtgaaggatggtaccactcaccagactagcctggagctgtttatgtacctgaacgaggtggctggcaaacacggggtgggacggatagacatcgtggaaaatcggtttatcggcatgaaatcgcgaggaatctacgaaaccccagctggcactatcctgtaccatgcacatctggacatcgaagcatttaccatggatcgcgaagtgcgcaaaatcaaacagggactggggctcaagttcgccgaactggtctacactggtttctggcattcccccgaatgcgaatttgttcggcactgcattgcaaagagtcaggaaagggtggagggaaaggtgcaggtgtcggtcctgaagggtcaggtgtacatccttggacgcgaatcgccactgtcgttgtacaatgaggaactcgttagcatgaacgtgcaaggagactacgaaccaactgatgcaactggcttcataaacatcaacagtttgaggctgaaggagtatcacagactgcaatccaaggtgactgcaaag

SEQ ID NO: 283850 - DNA, 1236 bp, Artificial Sequence
  derived and/or modified sequence
atgagttccaaaggatcagttgtcttagcttactctggaggtcttgatacaagttgtattttagtttggcttaaagaacaaggatatgatgttattgcttatctagcaaatattggtcaaaaggaagattttgaagaagctagaaaaaaagctctaaaattaggagctaaaaaagttttcattgaagatgtaagtagggaatttgttgaggaatttatttggccagctattcagtcatcagctttatatgaagaccgatatcttttaggaacttcacttgctagaccttgtattgctagaaaacaagttgaaatagcccaaagagaaggtgctaaatatgtttcacatggagctactggtaagggaaatgatcaagtaagatttgaattaagttgttatagtttagctccacaaattaaggttattgcaccatggagaatgccagaattttataatagatttaagggtagaaatgacttaatggagtatgctaaacaacacggtattcctattccagtaacgccaaaaaatccatggtcaatggatgaaaatttaatgcatatttcatatgaagctggtattttagaaaatccaaagaatcaagcaccaccaggattatatacaaaaactcaagatccagctaaagcaccaaatactccagatattcttgaaattgaatttaaaaaaggagttccagttaaagttacgaatgttaaagatggaactacacatcaaacatcattagaattattcatgtatttaaatgaagttgctggtaaacatggtgtaggacgaattgatattgttgaaaatagattcattggaatgaagtcaagaggaatttatgaaactccagcaggaaccattttatatcatgctcatttagatatagaagcattcactatggatagagaagtaagaaaaattaaacaagggttaggtttaaagttcgctgaacttgtatatacaggattctggcatagtccagagtgtgaattcgttagacattgtattgcaaaatcacaagaacgtgtagaaggtaaggttcaagtttctgtattaaaaggacaagtttatattttaggacgtgaatctccattatcactttataatgaggaattagtttcaatgaatgtacaaggagattacgaaccaactgatgctactgggttcattaatattaatagtttaagattgaaagaatatcatagattacaatccaaagtgactgctaaa

SEQ ID NO: 283851 - DNA, 1236 bp, Artificial Sequence
  derived and/or modified sequence
atgagctcaaaggggtcggtggtgctggcatactccggcggactggatacgtcgtgcatccttgtgtggctgaaagagcagggatacgatgtcatcgcctacctggcaaatatcgggcaaaaggaggatttcgaggaagcccgaaaaaaggcgctcaaacttggggcgaagaaggtgttcatagaagatgtctcgcgcgagttcgtggaagagttcatctggccggctatccagagctcggccctgtacgaagatcgatacctgctgggcacttcgctcgcacggccttgcatcgcgcgcaagcaggtggaaatcgcccagcgggaaggggcaaaatacgtctcccatggagcgaccggaaagggcaatgaccaagtgcgcttcgaactgtcctgctactcactggcaccacaaatcaaggtcatcgccccatggcgcatgcctgaattctacaaccggttcaagggacgaaacgaccttatggagtacgccaaacagcatggaattccgatcccggtgaccccgaagaacccctggtccatggatgaaaacctgatgcacatcagctacgaagccggaatcctggaaaatcccaagaatcaggctcctcctggcctgtacactaagactcaagatccggccaaggcgccaaacactccggacatccttgaaatcgagttcaaaaaaggagtcccggtcaaggtgaccaacgtgaaggacggaactacccatcagacttcactggagctgttcatgtacctcaatgaagtggcgggaaagcacggcgtgggaagaatcgacatcgtggagaatcggttcattggaatgaagtcgcgcggaatatacgaaactccagcgggaactatcctgtaccacgcacatttggacatcgaggctttcactatggaccgggaagtgaggaagattaagcagggactcggactcaagtttgccgaactcgtgtacactggcttctggcactcacccgaatgcgagtttgttagacactgcattgctaaatcccaggagcgcgtggaggggaaggtgcaagtctcagtgcttaagggacaggtttacattctgggccgagagtccccgctctccctctacaacgaagaactggtcagtatgaacgtacagggtgattatgagccgaccgacgctaccggattcattaacatcaactcgctcaggctgaaagaataccaccgcctgcagagcaaagtgaccgcaaaa

SEQ ID NO: 283852 - DNA, 1236 bp, Artificial Sequence
  derived and/or modified sequence
atgagttccaagggctccgtggtccttgcgtactccggcgggttggatacgtcatgcatactggtgtggctaaaggaacaggggtatgatgtgattgcctacctagccaatattggccagaaggaggacttcgaagaagcacgtaaaaaagcactgaaactgggtgccaagaaggtgtttatagaagatgtgtcacgggagtttgtagaggaatttatctggccagcaatccagtcatccgcactctacgaagatcgatacttgctcggcacaagtcttgcccgcccctgtatcgcccgcaagcaagtcgagatcgcacagagggagggggcaaaatacgtgtcacacggtgcaactggaaaagggaacgatcaggtgcgctttgaattgtcgtgctactccctggctccacagatcaaggttatcgcaccgtggagaatgcccgagttctacaaccgctttaaagggagaaacgatctgatggaatatgcaaaacaacatggtataccaataccagtgacaccgaagaacccgtggagcatggacgaaaatctgatgcacatctcctacgaagcaggtatcctggagaatcccaaaaaccaagcccctccaggtctgtacacaaagacccaggaccccgccaaagcccccaacacaccagatatcctggaaattgagtttaagaagggagtacccgtgaaagtgacaaacgtgaaggacggaaccacacatcagacctctctggaactgtttatgtacttaaacgaagtggcagggaagcatggagttggtcgcattgatatagtggaaaacaggttcatcggaatgaagtcaagaggaatatacgagacgccggcaggaactatcttgtaccacgcccatctggacatcgaagcgtttacaatggaccgagaggtgcgcaagattaaacaaggattgggtttgaaattcgccgaactcgtgtacactggattttggcatagccctgagtgtgagttcgtccggcattgcattgctaagtctcaggaacgtgtggaggggaaagtacaggtttctgtcttgaaaggacaggtgtacatcttgggaagggagagcccactcagcctgtacaatgaagaactagttagtatgaacgttcagggggactatgagcctacggacgcaaccggtttcattaacattaactcgctgcgactgaaggaataccaccgcctccagagcaaggtgaccgctaag

SEQ ID NO: 283853 - DNA, 1236 bp, Artificial Sequence
  derived and/or modified sequence
atgtcttccaagggtagcgtggttcttgcctactccggtgggcttgacacttcctgtattcttgtctggttgaaggaacagggctacgatgtcatcgcctatttggctaatatcggccagaaagaggattttgaagaggcgcggaagaaagcactgaagctgggcgccaaaaaggtgttcatagaggacgtctccagagaattcgtggaagaattcatctggccagcgatccagagcagtgccctgtacgaggacaggtatctgttgggcacaagcctcgctcgcccatgtatcgccaggaagcaggtggaaattgcacagcgggagggggccaaatacgtctctcacggcgccactgggaaggggaacgaccaggtgcgcttcgaactctcttgttattcccttgcccctcaaattaaggtgatcgcaccttggaggatgcccgagttctacaataggtttaaagggcgcaacgatctgatggaatatgctaaacagcatggaatcccaatccctgttacacctaagaatccttggtccatggacgagaacctgatgcatatctcctatgaggcaggaattctggaaaatcccaaaaaccaggcaccaccgggcctttacaccaagacccaagatccagcaaaggcccctaatactcctgacattctcgaaattgaattcaaaaaaggagtgccagttaaggtgaccaacgtaaaggatggaacaacgcaccagaccagtctcgaactgtttatgtatctgaacgaggtcgcaggcaagcacggggttggaagaatcgacatagtagagaaccggttcatcggcatgaaaagccggggtatatatgagactcccgcaggaaccattctgtaccatgcccatctggatattgaggctttcactatggaccgggaagtgagaaaaatcaagcaggggctcggattgaagttcgccgagttggtatacacaggcttctggcacagtccagagtgtgagtttgtgaggcattgcatcgctaaatcccaggagcgggtggagggaaaggtgcaggtgagcgtgctgaaaggtcaggtgtatatcttgggccgcgagtctccgctgagtctctacaatgaagaactggtcagcatgaacgtgcagggtgactatgaaccaaccgatgcaaccggttttattaacattaattctctgagattgaaggagtatcaccgactccaaagcaaggttacagctaaa

SEQ ID NO: 283854 - DNA, 1236 bp, Artificial Sequence
  derived and/or modified sequence
atgtcgtcgaaaggttcggttgtactagcgtattcgggtggtctagatacgtcgtgtatactagtttggctaaaagaacaaggttatgatgtaatagcgtatctagcgaatataggtcaaaaagaagattttgaagaagcgcgtaaaaaagcgttaaaattaggtgcgaaaaaagtatttatagaagatgtttcgcgagaatttgttgaagaatttatatggccggcgatacaatcgtcggcgttatatgaagatcgttatctattaggtacgtcgttagcgcgaccgtgtatagcgcgtaaacaagtagaaatagcgcaacgagaaggtgcgaaatatgtatcgcatggtgcgacgggtaaaggtaatgatcaagttcgttttgaattatcgtgttattcgctagcgccgcaaataaaagtaatagcgccgtggcgtatgccggaattttataatcgttttaaaggtcgaaatgatttaatggaatatgcgaaacaacatggtataccgataccggtaacgccgaaaaatccgtggtcgatggatgaaaatttaatgcatatatcgtatgaagcgggtatattagaaaatccgaaaaatcaagcgccgccgggtttatatacgaaaacgcaagatccggcgaaagcgccgaatacgccggatatactagaaatagaatttaaaaaaggtgtaccggtaaaagtaacgaatgtaaaagatggtacgacgcatcaaacgtcgctagaattatttatgtatctaaatgaagtagcgggtaaacatggtgttggtcgaatagatatagttgaaaatcgatttataggtatgaaatcgcgaggtatatatgaaacgccggcgggtacgatattatatcatgcgcatctagatatagaagcgtttacgatggatcgagaagtacgtaaaataaaacaaggtttaggtctaaaatttgcggaattagtttatacgggtttttggcattcgccggaatgtgaatttgttcgacattgtatagcgaaatcgcaagaacgagtagaaggtaaagttcaagtttcggttttaaaaggtcaagtatatatactaggtcgtgaatcgccgttatcgctatataatgaagaactagtatcgatgaatgttcaaggtgattatgaaccgacggatgcgacgggttttataaatataaattcgttacgtttaaaagaatatcatcgactacaatcgaaagttacggcgaaa

SEQ ID NO: 283855 - DNA, 1236 bp, Artificial Sequence
  derived and/or modified sequence
atgtcttctaagggaagcgtggtcctggcttatagcggtggcttagatacgtcctgtattctggtctggctaaaggaacagggctatgacgtcattgcctatttagccaacattggccagaaggaggatttcgaagaggccaggaaaaaggccctgaagctcggagcaaaaaaagtttttatcgaagacgtatcacgagaattcgtggaggaatttatatggccagccatccagtctagtgctctgtacgaagaccgatacctgttgggaacctcactagctagaccttgtatcgcccggaagcaggtggaaatcgctcagagggagggcgccaaatacgtgagccacggcgcaacagggaaaggcaacgatcaggtacggtttgagctatcctgctattccctggctccgcagatcaaagtaatcgcaccatggagaatgcctgaattctacaatcgtttcaaagggagaaatgacttgatggagtatgctaaacagcacggtatcccgatcccagttactccaaagaacccgtggtcaatggacgaaaacctcatgcacatctcttacgaggcagggattctggagaatcccaagaatcaggcccctcctggactgtacaccaaaactcaggatcccgccaaggcgccaaatacaccggatatcctagagatagagtttaaaaaaggagtccccgttaaggtgacaaatgttaaagatgggaccacacaccagacctctcttgagctatttatgtaccttaacgaggtagcgggtaagcatggagtcggaagaattgacattgtggagaacaggttcatcgggatgaagtcacggggtatttatgagacacctgctggaacaatattgtatcacgcccacctggatattgaggcatttacaatggacagagaagtgcggaaaatcaaacaaggtctggggctcaagtttgcagagctggtctatacagggttctggcatagtccggaatgcgaattcgtgcgacattgcatagccaaatcccaggagcgtgtggagggtaaagtgcaggtgtccgttttaaagggccaagtgtacattctggggcgggaatcccccctgagtctctataatgaagaattagtctccatgaacgttcagggcgactacgagcccacagatgccacaggattcatcaatattaacagtctgcgcctaaaagagtatcacaggctgcagtccaaggtgacagcaaag

SEQ ID NO: 283856 - DNA, 1236 bp, Artificial Sequence
  derived and/or modified sequence
atgtcgtcaaagggttcagtggtgctcgcatactccggcggactggatacgtcctgtatcctggtgtggctgaaagaacagggctacgatgtgatcgcataccttgcaaacattggtcagaaggaggattttgaggaagcaagaaagaaagcacttaaacttggcgctaagaaggtgtttatcgaagatgtctcgcgggaatttgtggaagagttcatatggcccgcaattcagagctccgcactctacgaggaccgctacctgctcggcaccagcctggcgaggccatgtattgcccgaaagcaagtggaaatcgcacaacgcgaaggtgcaaaatacgtctcgcacggagcaaccggaaagggaaatgatcaagtgagatttgagctgagctgttactcgcttgcgcctcagattaaggtcattgcaccttggcggatgcccgaattctacaacagattcaaaggaagaaatgatttgatggagtacgccaagcaacatggaattccaattcccgtgactccaaagaacccttggtccatggatgaaaaccttatgcacatctcctacgaagccggtattctcgaaaatcctaagaatcaagctccccctggactgtacactaagactcaggacccagctaaggcacctaacacgcctgatattctcgaaattgaattcaagaaaggagtccctgtcaaggtgaccaacgtgaaggacggcactactcatcagacgtcactggaacttttcatgtaccttaatgaagtggcaggtaagcacggtgtgggtagaattgatattgtggaaaacagatttatcggcatgaagtcccgggggatttacgaaacccctgccggtactatcctttaccacgcacacctcgatattgaggcatttaccatggaccgggaggtccgaaagatcaagcaagggctcggccttaagtttgcggaactggtctacactggattttggcatagcccagagtgcgaatttgtgaggcattgtatagcaaagtcgcaggaacgtgtggaggggaaggtccaagtgtcggtccttaagggacaggtgtacatcctgggaagagaatcgcctctttccctgtacaatgaagagctggtgtcaatgaacgtgcaaggagattacgaacccaccgacgccaccggctttatcaacatcaacagccttcggcttaaagagtatcatagactgcagtcaaaggtcactgcaaag

SEQ ID NO: 283857 - DNA, 1236 bp, Artificial Sequence
  derived and/or modified sequence
atgagctccaagggctcagtggtgttggcttactcaggtgggcttgatacctcgtgcatcctggtctggctgaaagagcaaggatacgatgtcattgcttaccttgcaaatatcggacaaaaagaggacttcgaagaagcccggaagaaggccctgaaactcggcgctaagaaagtctttatcgaagatgtctctagggaattcgttgaagaattcatctggcctgcaatccagtcctcagcgctgtatgaagatcggtacctgctcggcacttcgctcgccaggccgtgcatcgctagaaagcaggtggaaattgcccagcgagagggagccaaatatgtctcccacggtgcgactggcaagggcaatgatcaggtgcggttcgagctgtcatgctactctctggcaccgcaaatcaaagtcatcgccccgtggcgcatgccggaattctacaaccgcttcaaaggacggaatgacctcatggagtatgcgaagcagcacggcatccctatcccggtgaccccgaagaatccgtggagcatggacgaaaacctcatgcatatctcatacgaagccgggatactggagaatccaaagaaccaggcaccccccggcctttacaccaaaacccaggacccagcgaaggccccgaacacccccgacattttggagatcgagttcaaaaaaggtgtgcctgtcaaagtgacgaacgtcaaggatgggacgacgcatcaaacctccctcgaactcttcatgtatctcaacgaagtcgcgggaaagcacggagtgggcaggatcgacatcgtggaaaaccgcttcatcggtatgaagtccagagggatctatgagactcctgccggaacgatcctctaccatgcccaccttgacatcgaagcctttactatggaccgggaggtgcggaagatcaaacagggactgggtcttaagttcgccgaactggtgtacaccggattttggcactcgcctgagtgtgagttcgtgcggcactgcatcgccaaaagccaagaaagagtggagggaaaggtccaggtgtcggtgctgaagggacaagtctacattctcggacgcgaatccccgctgtcactctacaatgaggaactggtgagcatgaacgtgcagggcgactacgagccaaccgatgcaactggatttatcaacatcaattccctgcgccttaaggagtaccataggctgcagagcaaggttactgcaaag

SEQ ID NO: 283858 - DNA, 1236 bp, Artificial Sequence
  derived and/or modified sequence
atgtcctccaaaggctccgtggtgctcgcctactcgggagggttggatactagctgcatcctggtctggctgaaggagcagggttacgacgtgatcgcgtacctcgcaaacatcggccagaaagaggacttcgaggaagcacgcaaaaaggctttgaaactgggcgcgaaaaaggtgttcatcgaggatgtgtcgcgcgagttcgtggaagagttcatctggccagcaatccaatcgagcgcactgtatgaggatcgctacttgcttggcaccagcctggcccgcccgtgcattgcccgaaagcaagttgaaattgcccagcgggagggagcgaagtacgtctcccatggcgcaaccggtaagggtaatgatcaggtgcgcttcgaactgagctgttactcgctcgcgccgcaaatcaaagtgatcgccccatggagaatgcctgagttctacaatagattcaaggggcgcaatgatctgatggagtacgctaagcagcatggcatcccaatccctgtcacgcccaagaatccgtggtccatggacgagaaccttatgcacatttcatatgaagccggcatactcgaaaacccaaagaatcaggcgccgccaggactctacaccaaaactcaggatcccgctaaggctccgaacaccccggacatcctggaaatcgagttcaaaaagggagtccctgtgaaggtgactaatgtgaaagatggcaccactcaccaaacctccctcgaactgttcatgtacctgaacgaggtcgccgggaagcatggggtgggacggatcgacatcgtggagaaccgattcatcggcatgaaatccagaggaatctacgaaaccccggcaggaactattctctaccacgcccacctggacatagaagcgttcaccatggacagggaagtgcggaagattaagcaaggacttggactgaagttcgccgagctggtgtacaccggattctggcactcgccggagtgtgagtttgtgcggcactgcattgccaagtcacaggaaagggtggaagggaaggtccaggtgtccgtgctgaagggacaagtgtacatcctcggacgcgagtcccccctctcactctacaacgaggagctggtgtcaatgaacgtgcagggcgactacgaaccgaccgatgccactggattcatcaatatcaactcgctccggcttaaggaataccaccgccttcaatcaaaagtcaccgcaaag

SEQ ID NO: 283859 - DNA, 1236 bp, Artificial Sequence
  derived and/or modified sequence
atgtccagcaaaggcagcgtagtgttagcctattcaggcggcctggacacctcatgcattctcgtctggctgaaggaacaaggatacgacgtcatagcttatcttgcaaacattggtcagaaggaggatttcgaggaagcaaggaagaaagcccttaagctgggagccaaaaaggtttttattgaagatgttagtcgtgagtttgtggaagagttcatttggcccgctattcaatcaagtgctttgtacgaagacaggtatctgttgggcacctccctggcccgtccatgcattgcacgaaagcaggtcgagatagcccagcgcgaaggggcaaagtatgtgagtcatggagcgaccgggaaggggaatgatcaggtgaggttcgaactgtcctgctattctctcgccccgcaaatcaaggtcatcgctccatggcggatgcctgagttttataacaggttcaaagggaggaacgacctcatggagtatgcgaagcagcacgggattcctatccctgtgacacccaagaacccctggtccatggacgagaatctgatgcacatcagctacgaggccggaatactggagaacccaaaaaatcaagctccacccggactgtacaccaaaacccaggaccctgctaaagcacctaatactcctgatattttggaaatagaattcaagaagggcgtccccgtcaaagtcacaaatgtgaaggacggaacaacacatcagacgtctctggaactctttatgtatctgaatgaagtcgccggaaagcatggagtaggacgaatcgatatcgtagagaataggttcattgggatgaagagccgaggcatctacgaaacgcccgcgggcacgattctttatcatgcgcacctggacatcgaagcattcacaatggaccgggaggtgcgaaagatcaaacaggggctcggcttaaagttcgctgagctggtctacaccgggttctggcattccccggaatgcgagttcgtcagacattgcatcgcaaaaagtcaggagagagtggagggaaaggtccaggtatccgtacttaaagggcaagtttacatcttgggacgagagagtcctctgtctctgtacaacgaagaattggtatccatgaacgtgcagggcgactacgagccaacagatgctacgggtttcataaatattaactccttgcgcctaaaggaatatcatagattgcagtcaaaggtgacagccaag

SEQ ID NO: 283860 - DNA, 1236 bp, Artificial Sequence
  derived and/or modified sequence
atgagcagcaagggcagtgtagtattggcgtatagcggtggtctagacaccagttgtatcctcgtgtggctgaaagagcagggctatgatgtcattgcttatctggctaatatcggtcaaaaggaggacttcgaggaagcccgtaaaaaagccctaaagctgggcgccaagaaagtattcatcgaggacgtcagtagggaattcgtcgaagaattcatctggccagcgatacaaagttcggctctgtacgaagaccggtacctccttggcacctccctggcaaggccttgcattgcgaggaagcaggtcgagatagcccagcgggaaggtgccaaatatgtaagtcacggagccactggcaaaggtaacgaccaagtcaggtttgaactgtcttgctattccctggcaccacagataaaagtcatagctccctggaggatgcccgaattctataaccgtttcaagggtaggaatgaccttatggagtatgccaagcaacacggcattcctatacccgtaactccaaagaatccctggagcatggatgagaacctcatgcacatctcttacgaggctggaattctggaaaatccaaagaaccaagctccgcccggattatacactaagactcaggaccccgccaaagcccccaatactcccgacatcctagaaatagagttcaagaagggggtccctgtgaaggtaaccaacgtaaaagacggcactacacaccaaaccagtttagaactgttcatgtatttgaatgaagtggctgggaagcatggtgtgggaagaatcgatatagttgaaaatcgcttcataggcatgaagtcacgtggtatttacgagacccctgccggcaccattttgtatcacgcccacttagatatagaggcattcacgatggatagggaggtgagaaagatcaagcagggattaggattgaagttcgctgaacttgtttatacggggttctggcattcccccgagtgtgaattcgttcgacactgtatagctaagtcccaggaaagggtggaaggtaaagttcaagtgtccgttcttaaaggccaggtgtatatactgggtagggaatcacccctatccctgtacaacgaagaactggtgagcatgaacgtgcagggggactatgaacctacagacgccaccgggtttatcaatatcaattctctcaggcttaaggagtaccaccgcttacagtcaaaggtcacagcaaaa

SEQ ID NO: 283861 - DNA, 1236 bp, Artificial Sequence
  derived and/or modified sequence
atgtcctccaaggggtcagtggtgcttgcctacagtggagggctggacacttcttgcatcctcgtttggctgaaggagcagggttatgacgtcatagcctatctggccaacatcggacaaaaagaagactttgaggaggcccgcaagaaagctctgaagctcggagccaaaaaagtcttcattgaggacgtgtcccgggaattcgttgaggagtttatctggccggcaattcagagctccgcattgtacgaggatcggtacctactcggcacctctttagctcgtccttgtatcgctaggaaacaggtggagattgcgcagagggaaggcgccaagtacgtgtcgcatggggccactggcaagggaaatgaccaggtacgcttcgagttatcttgttatagcttggcgccccaaatcaaggtgattgcgccttggagaatgcccgaattctacaatcgcttcaagggacgaaacgatttgatggagtatgcaaagcagcacggcataccaattcctgtgacccctaaaaacccctggagtatggacgaaaacctcatgcatatatcatacgaagccggtatcttggaaaacccaaagaatcaggcgccaccaggattgtacaccaagacacaggatcctgccaaggctcctaacactccagatattctggagatcgagtttaaaaaaggggtacccgttaaggtgacgaatgtaaaggacggaactacccaccagacttccttggagcttttcatgtatcttaacgaagttgccggcaaacacggggttgggcgaattgacattgtggagaataggttcatcggcatgaagtccagaggaatatacgaaactccagctggcactatcctctatcacgctcatctggatatcgaggcattcaccatggaccgggaagtgaggaagatcaaacaaggtctaggactgaagtttgctgagctggtttacactggattctggcacagcccagagtgcgaattcgtgaggcactgcatagctaagtcccaggagcgagtcgagggaaaggtgcaggtcagcgtgcttaagggacaagtgtatatcttgggacgggagagccccctgtctttgtataatgaagagctggtttccatgaatgtgcagggcgattacgaaccaacagatgcaactggctttatcaacatcaattctctgcggttgaaggagtatcaccggctacagtccaaagtaaccgccaag

SEQ ID NO: 283862 - DNA, 1236 bp, Artificial Sequence
  derived and/or modified sequence
atgtcaagcaagggttccgtcgtgcttgcttactcgggcggacttgacacttcctgtatcctggtgtggctgaaggaacagggttacgatgtgattgcctacctcgcgaacattggacagaaggaagatttcgaagaagcccgcaagaaggcgctcaaactcggggccaagaaggtctttattgaagatgtgtcgcgagagtttgtggaagagtttatctggcctgcaatccaatccagcgcgctttacgaagatcgttaccttctcgggacttcgttggcaagaccctgcattgcaagaaagcaagtggaaatcgcacaacgcgagggggcaaagtacgtctcccatggtgcgaccggcaagggaaacgatcaagtgagatttgaactgtcatgctactccctggctccccagattaaagtcatagccccgtggcgtatgccagaattctacaaccggttcaagggtaggaatgacttgatggaatacgccaagcagcatggaatccctattcctgtgaccccaaagaacccgtggtcaatggacgagaatctgatgcacatatcgtatgaagcaggcatccttgaaaaccctaagaatcaggctcctcctggtctgtacacgaaaacccaagacccagcaaaggcacctaataccccagatatactggaaatcgaattcaaaaagggggtgcccgtcaaagttaccaatgtcaaagatggaaccacccatcaaacctcgcttgagttgtttatgtaccttaatgaggtggcaggaaagcatggagtgggaagaattgacattgtcgagaacaggttcattggcatgaagtccaggggaatatacgaaactccggctggtactattctgtaccacgcccacctggatattgaagcattcaccatggatagagaagtgaggaaaatcaagcaaggccttggtctgaagttcgccgagctggtctacactggattttggcactcccctgaatgtgaatttgtgcgtcattgcattgccaagagccaagaaagagtggaaggcaaggtccaggtgtcggtgcttaagggtcaagtctacattctggggagagaaagtcccctctcgctgtacaacgaagagctcgtctcgatgaatgtgcagggtgactacgagccaactgatgcaaccgggtttatcaatatcaactcattgagattgaaggagtaccaccgtctccagtcaaaagtgaccgcaaag

SEQ ID NO: 283863 - DNA, 1236 bp, Artificial Sequence
  derived and/or modified sequence
atgtcctcaaaaggcagcgttgtccttgcttactccgggggccttgacaccagttgtatcctggtctggctcaaggagcaggggtatgatgtcatcgcatacttggcaaatatcggtcaaaaggaggatttcgaagaggctcgaaaaaaggctctaaagctgggggctaagaaagtttttatagaagacgtcagccgtgaattcgtggaagagttcatatggccagctatccaatcctccgcgctgtacgaggatcgctacttgctaggaacatccctggcccgaccctgtattgctcgtaagcaagtggaaatcgctcagcgggaaggggctaagtacgtttctcatggcgcaactggaaagggaaacgatcaggttcgctttgaactctcgtgctacagtctggcaccccagataaaggttatcgctccatggcgcatgcctgagttctacaatcgcttcaaaggtcgcaatgacctgatggagtatgcgaagcagcatggaatcccgattcccgtgacgccaaagaacccttggtctatggatgagaatctcatgcacatctcatatgaggctggaattctagagaaccctaaaaaccaagcccccccaggtctctacaccaaaacccaggatccagcgaaagccccaaatacccccgatatactggagattgagtttaagaagggcgtcccggtcaaagtgacgaatgttaaagacggcactacgcaccaaacatctttagagttgttcatgtacctcaatgaggtggccggcaagcatggtgtgggtcgtatcgatatcgtggaaaatcgttttataggaatgaagtcacgggggatttatgagaccccagcagggactatcctctaccacgcgcacctcgacattgaggcgttcacgatggatcgtgaagttaggaagataaaacaaggtctgggccttaagtttgcggagcttgtgtacaccggattctggcactcgccagaatgcgagtttgttcgccattgcattgccaagtctcaagaacgggtcgaaggtaaggtccaggtttctgtcctaaagggacaagtatatatcctcgggcgtgaatctcctctatcgttatacaacgaagaactagtctcaatgaatgtgcaaggcgattacgagcctactgacgctacgggttttattaatatcaactccctccggcttaaggaataccatcgccttcagtccaaagtcactgcgaaa

SEQ ID NO: 283864 - DNA, 1236 bp, Artificial Sequence
  derived and/or modified sequence
atgtcctctaagggttcggtcgtcctggcgtactccggcgggctggataccagctgcattctcgtctggcttaaggagcagggctacgatgttattgcctatctcgccaacatcggacagaaggaagatttcgaggaggcccgcaagaaggccctcaagctgggcgcgaagaaggtgttcatcgaagacgtgagtcgcgagttcgttgaagaatttatctggcccgccatccagtcgtccgccctctacgaggatcgttacttgctgggtactagcctggcgaggccatgcattgcccgcaagcaggtcgagatcgcccagcgtgagggtgctaagtacgtctcgcacggtgctaccggaaagggcaacgatcaggtgcgtttcgagctaagctgctattcgctggccccccagatcaaggttatcgcgccctggcgtatgcctgaattttacaaccgattcaagggccgcaacgatctgatggagtatgccaagcagcacggaatcccgatccccgtcacgcccaagaacccttggagtatggatgagaacttgatgcatatctcctacgaagccggtatccttgagaatcctaagaaccaggcacctccgggcctgtacaccaagacccaagaccccgctaaggcccctaataccccggatattctggagatcgagttcaaaaagggagtccctgtgaaggtaactaacgttaaggacggcaccacccaccagactagccttgagctgttcatgtacttaaacgaggtcgccggtaagcacggcgtcggccgcatcgatattgtagagaatcgctttatcggtatgaagtctcgtggaatttacgaaactcctgcgggcacaattttgtaccatgcccacctggatatcgaagccttcacgatggatcgcgaggtccgtaagattaagcaaggcctggggctaaagttcgcggaactggtgtacaccggtttctggcactctcccgaatgcgagttcgtccgacactgcatcgcgaagtcgcaggagcgtgtcgaggggaaggttcaggtcagtgtgctcaagggtcaggtgtacatcctgggccgtgagtcgcctctctccctctacaacgaggagttggtcagtatgaacgtccagggtgactacgagcccacggatgctaccggcttcatcaacatcaactccctgcgtcttaaggaataccaccgcttgcagagcaaggttacggcaaag

SEQ ID NO: 283865 - DNA, 1236 bp, Artificial Sequence
  derived and/or modified sequence
atgtcaagtaagggcagcgtggtgttggcgtacagcggtggtctggacacctcttgtatcctcgtctggctgaaggaacaggggtacgatgtcatcgcctacttggctaatatcgggcagaaggaagattttgaggaggctaggaagaaggctctgaaattgggagcaaagaaggtgttcatcgaagatgtgtccagagaatttgtggaagaattcatttggccggctatccagtcctcggctctgtacgaggaccgctacctgctggggacgtccctggccagaccgtgcatcgcccggaaacaggtggagattgctcaaagagagggcgccaaatacgtgtcgcatggagccaccggaaagggaaacgatcaagtgaggttcgaactcagctgctactcactggcgccgcagatcaaggtgatcgcgccatggcggatgcctgagttctataaccgcttcaaggggagaaacgacctgatggaatacgccaaacagcatggaatcccaattccggtgactccgaaaaatccctggtcgatggacgaaaacctcatgcacattagctacgaagccgggatcctcgagaaccccaagaaccaagcacccccaggattgtacaccaagacccaggaccctgccaaggcgccgaatacgccggacatcttggaaatcgaattcaagaagggagtgcctgtcaaggtcactaatgtgaaagatggaaccactcaccaaacgagcctggagctgttcatgtacctcaacgaggtcgccggtaaacacggagtggggcggattgatatcgtggaaaaccgcttcataggcatgaagagccggggcatctacgagacgccagccggaacgatcctctatcacgcccatctggatatcgaggcttttaccatggaccgggaggtccgcaagatcaagcagggactcggactcaagttcgccgagcttgtgtacaccggattttggcattcacctgagtgtgaattcgtgcgtcactgcatcgccaagtcgcaagagagagtcgagggcaaggtgcaggtgtccgtgctcaaaggacaagtgtacatccttggccgagagagcccgctttcactgtacaacgaggaactggtgtccatgaacgtgcagggggattacgaaccaacggacgccactggattcatcaacatcaactcattgcgcttgaaggagtaccacagactgcagtccaaggttacggcgaag

SEQ ID NO: 283866 - DNA, 1236 bp, Artificial Sequence
  derived and/or modified sequence
atgtcaagcaaagggagcgtggttctcgcctatagtggcgggttggacacatcatgcatactcgtctggcttaaggagcaaggctatgatgtgatcgcctatctggccaatattggccagaaggaggattttgaggaagctcgaaagaaggcactcaagctgggcgctaaaaaggtcttcatcgaagacgttagccgcgagttcgtggaagagtttatttggcctgccatacaatcctctgctctctatgaggataggtatttacttggtaccagccttgccagaccatgcattgctcggaagcaggtcgagatagctcaaagggagggggccaaatatgtgtcacatggagccaccggcaaaggcaatgaccaggtacgcttcgaactgtcatgttacagtctcgctcctcagataaaagtgatagctccatggcgcatgccagagttttataatcgatttaagggacgcaatgatcttatggaatacgccaaacaacatggtatccccatccccgtcacgcctaagaatccctggtctatggatgaaaacttgatgcacatatcttatgaggccggtatcctggaaaatcccaaaaatcaggctccacccgggctgtacacgaaaacccaggatcccgctaaggcccccaacactccagacatactcgaaatcgagttcaagaaaggcgtgcccgtcaaggtgactaacgttaaggacggtaccactcaccaaactagtctggaactattcatgtatctaaacgaagttgccgggaaacacggcgtgggacggatagatatagtggagaaccgatttataggaatgaaatcacgaggtatctacgagactcctgccggcaccatcctttaccatgctcaccttgacatcgaggctttcacaatggatcgagaagttcggaagatcaagcagggacttggcctgaaattcgcagaacttgtgtataccggattctggcacagcccagagtgcgaattcgtccggcactgcatcgccaaaagtcaggaacgcgtggagggcaaagtccaggtgagcgtcctcaaaggccaggtctatattctgggcagagagtcccctctgtctctttacaacgaggaattggtttctatgaacgtccagggagactatgagccaacagatgccaccggctttatcaacatcaattcacttcgattgaaggaataccaccggctgcagagcaaagtgaccgccaag

SEQ ID NO: 283867 - DNA, 1236 bp, Artificial Sequence
  derived and/or modified sequence
atgtcgtccaagggtagcgtggtccttgcatactcgggtgggctggatacttcgtgtattcttgtgtggctgaaggaacagggctatgatgtgatcgcatatcttgcgaatattggtcaaaaggaagatttcgaagaggctcgtaagaaggcccttaaactgggagctaaaaaggtgtttattgaggacgtgtcgagggagtttgtggaagaattcatttggccagccattcaatcgtcagcactgtacgaagatagatacctgctcggaacctcgctcgctcggccttgtatcgcgagaaagcaggttgaaatagcacaaagagagggagccaagtatgtctcacacggtgcaactggtaaagggaatgatcaagttcgtttcgaactttcgtgctactctcttgcaccacaaatcaaggtgattgcaccctggcgaatgcctgaattctacaaccggttcaagggtagaaatgatctcatggaatacgcaaagcaacacggtatacctatccccgtgacccctaagaacccatggtccatggacgagaaccttatgcatatttcgtacgaagctggtatcctcgagaacccaaagaatcaagcaccacctggactctacactaagacgcaggatcccgcaaaggcaccaaatacgccggatattctcgagattgaattcaagaagggcgttcccgtgaaagtgaccaacgtgaaggacggcaccactcatcagaccagtttggaactgttcatgtaccttaatgaagtggcaggaaagcacggcgtgggccggatcgacattgtcgaaaatcggtttattggcatgaagtctcgaggaatatacgaaactcctgcaggaaccattctctaccatgcacacctggatatcgaggcattcacgatggatcgggaggtgcgtaagattaaacaggggctgggcctcaaatttgcggaactggtctacaccggattctggcattcccctgagtgtgagttcgtccgccattgcatcgcaaagagccaggaacgggtggagggaaaagtgcaagtgtctgttctgaaaggtcaggtttacatcctcgggagggaaagcccactttccctgtacaacgaagaactggtttcaatgaacgtgcaaggggactacgaacccactgacgccactggcttcattaacattaactcgcttagacttaaggaataccatcgcctgcagtcaaaagtgaccgccaaa

SEQ ID NO: 283868 - DNA, 1236 bp, Artificial Sequence
  derived and/or modified sequence
atgtcaagcaagggctctgttgtgctggcatatagcgggggtctggacacaagttgcatcctagtctggctgaaggaacagggctacgacgtgatcgcgtatctggccaatatcggtcaaaaagaggacttcgaagaggcacggaagaaagcactgaaacttggagcgaagaaggttttcatcgaggatgtctctagggagtttgtcgaggagttcatctggcctgcaatccagagttccgcgctgtacgaagacaggtacctccttggaactagcctggcccgtccttgcatcgctcgaaagcaggtggaaatcgcgcagcgcgaaggcgcgaaatatgtttctcacggggctaccggtaaaggtaacgaccaagttcgtttcgagttatcctgttactcactggccccccagatcaaggtaattgctccatggagaatgccagaattttacaacagattcaaaggacggaacgaccttatggagtatgccaaacaacacggcattcctatcccagtgactccgaaaaacccttggtcgatggatgagaacctcatgcacatttcctatgaggccggcattcttgaaaacccaaagaatcaagccccgcccggtctctacactaagactcaggatccggccaaggcacctaacacccctgacattctggaaatcgaattcaagaaaggggtacccgtcaaggtgaccaatgtgaaggacggaaccacacaccagacatccttggagctctttatgtatctcaacgaagtggccggaaagcatggcgttgggaggatcgacatcgtggagaataggtttattgggatgaaaagccgggggatctatgaaaccccagccgggacaatcttatatcacgctcatctggacattgaagcgtttaccatggatagggaggttcgcaaaatcaagcaggggctgggcctcaagtttgcagaactggtatatactggattctggcactcgcctgagtgcgagttcgtacgccactgcatagcaaagagtcaagaacgggtcgagggcaaagttcaagtaagtgtcctcaaggggcaggtctacatcttggggagggagagccctctgtccctgtataacgaagaattggtgagcatgaatgtgcagggggactatgaaccaaccgacgccaccggctttatcaacattaactccttgagacttaaagaataccacagacttcaatccaaggtgaccgccaag

SEQ ID NO: 283869 - DNA, 1236 bp, Artificial Sequence
  derived and/or modified sequence
atgtcatctaagggaagcgttgtgttggcttacagcgggggccttgacactagctgcatcctggtgtggttaaaagagcaggggtacgacgtaattgcataccttgctaacatcgggcagaaggaagattttgaagaagcaagaaaaaaggccctcaagctgggggccaaaaaggtgttcattgaggatgtttcccgcgagttcgttgaggaattcatttggcctgcaattcagagttctgcactatatgaagatcggtacctgctggggacttccctagcgcgcccgtgcatcgcacgcaagcaggtggagattgctcagagggaaggcgcaaagtacgtgtctcatggtgctactgggaaaggcaacgatcaagtgagattcgaactgtcctgttacagtctcgctccccaaattaaagtcattgcaccctggcggatgcctgagttctacaaccgatttaaagggagaaatgacttgatggagtacgccaagcagcacggtatccctatcccggtaactcccaaaaatccttggtcaatggacgagaacttgatgcatatctcctatgaggccggtatcctggagaaccctaagaatcaggcaccaccaggcctgtacacaaagactcaggatcctgcaaaggcgccaaatactcctgatattctggagatagaattcaaaaagggggtgcctgtgaaggtgacaaacgtgaaagatgggactacccaccagacctcactggaactcttcatgtatctgaacgaggtcgcaggaaaacacggcgtgggacgcatcgacattgtagagaatcgcttcattgggatgaaaagcaggggtatttatgaaacccccgcaggcaccatcctgtatcacgcacacctcgacatcgaagccttcaccatggacagggaagtccgaaaaataaagcagggactgggattaaaatttgcggagctggtttataccgggttctggcacagcccagagtgtgaatttgtcaggcactgtatagctaaatctcaggagcgggtcgaagggaaagttcaggtgtccgtgctaaaaggacaggtgtatatcctggggcgggaaagcccactgagcctatataatgaggagttggtatcgatgaatgtgcagggcgattacgaaccaaccgatgccacaggatttatcaatattaatagtctccgacttaaagagtaccatagattgcagtctaaggtcaccgccaaa

SEQ ID NO: 283870 - DNA, 1236 bp, Artificial Sequence
  derived and/or modified sequence
atgagctctaagggaagcgtggtcctcgcctatagcggcggactggacaccagctgtatattggtttggctcaaggagcagggctacgacgtgattgcctacttagccaacataggccagaaagaagacttcgaagaggcacgtaaaaaggctctaaaactaggggctaagaaggtcttcatcgaggacgtgtctcgagaatttgtggaggaattcatttggcctgctatacagtctagcgccctgtatgaggacaggtacctgctcggcacttcactggctaggccttgtatagcaagaaagcaagttgagattgctcagcgcgagggcgccaagtatgtctcccacggcgctaccggaaaaggaaatgaccaggtccggttcgagttgtcttgctattcactggcccctcagatcaaggttatcgctccctggaggatgcctgagttctacaaccgcttcaagggccgtaacgatctgatggaatatgctaagcagcacggcattcctattccagtgactccaaagaacccatggtccatggacgaaaacctgatgcatattagttatgaagctgggatcctggaaaatcccaaaaaccaagccccacctgggctttacactaagacacaagatcccgccaaggctcctaatacaccagacatactggagattgagtttaaaaagggggtgcccgttaaggttaccaacgtcaaagacgggactacacaccagacttccttagaactgtttatgtacctgaacgaagtcgccggcaagcacggcgtagggaggatagatatcgtggaaaatcgattcattggcatgaaatcccgggggatatatgaaacccccgccggaacaatcttgtatcacgcccatctggatatagaggcctttacaatggatcgggaggtccggaaaattaagcagggtttgggtctaaagttcgctgaactggtgtatactggattctggcacagccctgagtgcgaatttgtgaggcactgcatagccaagagccaagagcgagttgaagggaaggtacaagtgagcgtgctgaaaggtcaggtgtacatactcggcagggaaagccctctgagcctttacaatgaggaactggtttcaatgaatgtccaaggggactacgaacccacagatgcaaccggctttatcaacattaattccctgcggctcaaagaatatcaccggctgcagagcaaagtgacagcaaaa

SEQ ID NO: 283871 - DNA, 1236 bp, Artificial Sequence
  derived and/or modified sequence
atgagcagcaagggtagcgtcgtgttggcctactcaggcggacttgacacttcgtgcatcctggtgtggctcaaagagcaaggatacgacgtcatcgcctaccttgccaacatcggccagaaggaggacttcgaggaagcccgcaagaaggcccttaagctgggagccaagaaggtgttcatcgaggacgtgtcacgcgaattcgtcgaggaattcatctggccagcgattcaatcaagcgccctctacgaagatcgctacctgctcgggacctctctggcgcggccgtgcattgctagaaagcaagtcgaaatcgcacagcgcgaaggcgcgaagtacgtctcccatggggcgaccggaaagggaaacgatcaggtcaggtttgaactttcgtgctactcgctggctccgcagatcaaggtcatcgcgccgtggaggatgcctgagttctacaaccggttcaaaggacgcaatgacctcatggaatacgccaagcagcacggtatcccgattccagtcactccgaagaacccgtggagcatggatgaaaatctgatgcacatttcgtacgaagccggtatcctcgaaaacccaaagaaccaagccccaccgggcctgtacaccaagacccaggaccctgcaaaagcgcctaataccccggacatcctggagatcgagttcaagaagggtgtgcctgtgaaagtcacgaacgtcaaggacggcactacccatcagacctcgctggagcttttcatgtacctgaacgaagtggcagggaagcacggagtggggagaatcgacattgtggagaatcgcttcatcggaatgaagtcccgcggcatttatgaaactccggctggtacgatcctgtaccacgcgcacttggacatcgaggccttcaccatggacagagaggtgcggaagattaagcaaggcctgggtcttaagtttgctgagctggtgtacacgggcttttggcattcgcctgagtgcgaatttgtcaggcattgcattgcaaagtctcaagaaagagtcgagggaaaggtgcaagtgtccgtgctgaagggacaagtgtacatcctgggtagggaaagccccctgagcttgtacaacgaggagctggtgtcgatgaatgtgcagggagattacgagccgaccgatgcgactggatttatcaatatcaattcgctccggctgaaagaataccacagactgcaaagcaaggtcaccgccaag

SEQ ID NO: 283872 - DNA, 1236 bp, Artificial Sequence
  derived and/or modified sequence
atgtcctcaaaaggatcagtggtccttgcgtactctggtggacttgacacgagttgcatcctcgtctggcttaaagagcaaggatatgatgtcatcgcttatttagccaacatcggtcaaaaagaagactttgaagaggcccgcaaaaaagcgttaaaattaggcgcgaaaaaagtgtttatcgaagacgtgagccgtgaatttgtagaagaattcatttggccggctattcagtcttcagccttgtacgaggataggtacctgttaggaacgtcactagcaagaccgtgcattgcaagaaagcaggtggagatcgcccagcgggaaggcgcaaagtacgtcagccacggcgctacgggaaaaggcaatgatcaggtgcgctttgagttgtcctgctattcactggctcctcagattaaagttatcgcaccgtggagaatgccggaattttataatcgtttcaaaggtcgcaacgatttaatggaatatgctaaacaacatggaattcctattccggtcaccccaaagaatccgtggtccatggatgaaaatcttatgcatatttcatatgaagcgggaatacttgagaacccaaagaatcaggccccgcctggcctttacacaaaaacacaggacccggcgaaagcacccaacactccagatatattagagatcgaattcaaaaaaggtgtccctgtaaaagtaacgaatgttaaggatggaacaacacatcaaacttcattagaattatttatgtatttgaatgaagtcgcgggaaaacatggcgtgggaagaattgatatcgtagaaaatcgctttataggaatgaaatctcgggggatttatgaaaccccagctggaaccatcttataccatgcacatctcgatattgaagcttttacaatggatcgcgaagtacgtaagattaaacaaggattgggtttaaaatttgctgaactcgtttatacgggtttttggcattcacccgaatgtgagtttgttcgtcattgtattgcaaaatctcaagaacgagttgaagggaaagtccaggtttcagtccttaaaggacaggtttacattttgggacgtgaatcaccactgtcgctctataatgaagaattggtttcaatgaatgttcagggcgattatgaacccacggatgctacgggattcattaacatcaactctctccgtttaaaagaatatcacaggctccaatccaaagtcactgccaaa

SEQ ID NO: 283873 - DNA, 1236 bp, Artificial Sequence
  derived and/or modified sequence
atgtcctctaaagggtcagtagttttagcctactcaggaggcttggatacctcctgtattctcgtgtggcttaaggagcaaggctatgatgtcatagcctatcttgctaatatcggacaaaaggaagatttcgaagaagcccgtaagaaagcactgaaattgggggctaaaaaagtattcattgaggatgtgtcacgcgaatttgtggaagaattcatctggcctgccattcagagttccgcattgtacgaagaccgatatctgttgggaacatcgctggctcgtccatgtattgctcgaaaacaagtggaaatcgcacagcgagagggagctaagtacgtttcacatggagctacgggaaagggaaatgatcaggtaagatttgagttgtcttgttattcattagcgcctcaaattaaagtgattgcaccatggagaatgccagaattttataatcgattcaaaggacgaaatgacttgatggagtatgcgaaacaacatggaattcccattccagttaccccaaaaaatccatggtccatggacgaaaatctcatgcatatatcatacgaagcaggaattctcgagaatccaaagaatcaagccccgccaggtctctatactaaaacccaggatccagctaaagctccgaacacccctgacatattggaaattgaatttaaaaagggagtaccagttaaggttacaaatgttaaggacggaactacacatcaaacgtccttggaactttttatgtatttaaacgaagttgcaggaaaacatggagttggccggatcgatatcgttgaaaaccgttttattggtatgaagtctcgtggaatctatgaaaccccggcaggtactatcctgtaccacgctcatcttgacattgaagcgtttactatggatcgagaggttagaaaaatcaaacagggactcgggctcaagttcgcagaattggtgtatacgggtttttggcacagtcctgaatgtgagtttgtccgacactgcattgcaaaatctcaagagcgcgttgaaggaaaagtccaagtgtcagtgttgaagggccaagtttatatattgggacgcgagtcgccactatcattgtacaatgaagagttagtttccatgaacgtccaaggagattacgagccaacagacgcaacaggatttataaatattaattctctacgactcaaggaatatcatcgcctccaatcaaaggtcactgctaaa

SEQ ID NO: 283874 - DNA, 1236 bp, Artificial Sequence
  derived and/or modified sequence
atgtcatcgaaaggctccgtggtcctcgcatacagcggtggtctggataccagctgtattctcgtgtggctcaaagagcaaggatacgacgtgatagcttacctggcaaacataggtcagaaggaagattttgaggaggcgcgaaagaaagccctgaagttgggtgcaaagaaggtgtttattgaggacgtgtcccgtgagttcgttgaggagttcatctggcctgcaatacaatcctcagcactttacgaagatcggtacctcctcgggacttcgcttgccagaccgtgtatcgcacgaaaacaggtcgaaatcgcacagagagaaggagcaaagtacgttagccacggggcaaccggaaagggaaacgatcaggtgcgatttgaactttcgtgttactcccttgctccacagattaaagtcatcgcaccttggcggatgcctgaattctacaacagattcaagggccgtaacgatctgatggaatacgcaaagcagcacgggattccaattcccgtgactccgaagaatccctggtcgatggatgagaacctgatgcatatttcgtacgaggctggaatccttgaaaatcccaagaatcaagcacctcccgggctgtataccaaaactcaagaccctgccaaggcgcctaacacccccgatattcttgagattgaattcaagaagggcgtgcccgtgaaggtgaccaacgtgaaggatggaaccacccatcagacgtctctggaacttttcatgtacctgaatgaggtggcaggtaaacatggtgtgggaaggattgatatcgtggagaacaggtttatcggtatgaaatcgaggggtatctacgagactcctgcagggaccatcctttaccacgcacatttggatatcgaggctttcactatggatcgggaagtgagaaagatcaaacaaggacttggactgaagttcgccgagctggtctacactggtttctggcactcacccgagtgtgagtttgtcagacactgtattgccaagagccaagaacgtgtggagggaaaggtgcaagtgtccgtgttgaaagggcaggtctacattctcggacgcgaatcacctctgtcgctgtacaacgaagagctggtcagcatgaacgtgcagggagactacgaacctaccgatgctactgggtttatcaacattaactccctccgcttgaaggaatatcatcgacttcaaagcaaggtgactgcgaag

SEQ ID NO: 283875 - DNA, 1236 bp, Artificial Sequence
  derived and/or modified sequence
atgtcctccaaaggcagcgtggtgctggcatacagcggaggactggacacttcgtgtatcctggtctggcttaaggaacaaggttacgacgtgatcgcctacctggctaacatcggccagaaggaagatttcgaggaagcgcggaagaaagcactgaagctgggtgccaagaaggtgttcatcgaggatgtctcacgggagtttgtggaggagttcatctggcccgccattcagtcgagcgctctgtacgaagataggtaccttctgggaaccagtctcgcgaggccttgcatcgcgagaaagcaagtggagatcgcccagcgcgaaggggccaagtacgtctcccacggagctactggcaaggggaatgaccaggtgcgcttcgagctgagctgctacagcctggccccgcagatcaaggtgattgccccatggcgcatgccggagttttacaatcggttcaagggacgcaacgaccttatggagtacgcgaagcagcacggaatcccgatcccggtgactcctaaaaacccgtggtccatggatgagaatctgatgcatatctcctacgaggccgggatcctcgaaaaccccaaaaaccaagcacccccgggactctacactaaaacccaggacccagctaaggccccgaacactccggatatccttgaaatcgaattcaaaaagggggttccggtgaaggtgactaacgtgaaggacggaaccacccatcagacctccctggaattgtttatgtacctgaacgaagtcgctggaaaacacggagtcggacggatcgacattgtagagaacagattcatcgggatgaagtcgaggggaatctacgaaaccccagcaggtactattctgtaccatgcccaccttgatatcgaagcattcaccatggatcgggaagtgaggaagatcaaacaaggactgggcctcaagttcgccgagttggtgtatactggcttctggcactccccagaatgcgaattcgtgagacactgcatcgccaagtcgcaggagagggtggagggaaaagtgcaggtgtccgtgcttaagggccaggtgtacattctggggcgggagtcgcccctcagcctgtataacgaggaactggtttcgatgaacgtgcagggagattacgaaccaaccgacgcgactggcttcattaacatcaatagcctgcgccttaaggagtatcataggctccaaagcaaggtcacggccaaa

SEQ ID NO: 283876 - DNA, 1236 bp, Artificial Sequence
  derived and/or modified sequence
atgtcttctaaaggatcagtggtgctcgcctattccgggggcctggacacatcctgtatactggtgtggctgaaagagcaggggtacgatgtgatcgcttacctggctaatattggtcaaaaggaagactttgaagaggctcgcaaaaaggctttaaaactgggcgcaaaaaaggttttcatcgaggacgtctcacgggaatttgtggaggagttcatctggcctgccatccagagctccgcattgtacgaggaccggtacctgctgggcacgagccttgcccggccctgcattgcccgcaaacaagtggagattgcccagcgagaaggcgccaagtatgtgagtcacggtgctaccggaaaaggcaatgaccaagtgaggttcgagctgtcatgttactctctcgctcctcagattaaagtgattgctccctggcggatgcccgagttctataatcgatttaaagggaggaatgatttgatggagtatgccaagcagcacggcatacccatcccagtgaccccgaagaatccttggtcaatggatgagaacctgatgcacatttcttacgaagccggcattctggagaatcccaagaaccaagcacccccgggcctttatactaagacccaggaccctgccaaggctcccaacaccccagacatattggagatcgaatttaaaaaaggcgtgcccgtgaaagtgaccaacgtgaaagacggcactactcaccaaaccagtctggaattgttcatgtacctcaacgaagtggccgggaagcacggcgttggtaggatagatatagtggagaacaggttcatcggtatgaagagtcggggaatttacgagaccccagccggaactatactttaccacgctcatcttgacatagaggcctttactatggacagggaggtccgaaaaataaagcaagggttgggattaaagttcgccgagctggtgtacaccgggttctggcactcaccagagtgcgagttcgtacgtcattgcatcgccaagtctcaagagagagtggaagggaaagttcaggtcagtgttctgaaagggcaggtgtacatcttgggcagagaaagcccactcagcctctacaatgaggaattggtatctatgaatgtgcagggcgactacgaacccactgacgctacagggttcataaatattaacagtcttaggctcaaggaatatcataggctgcaaagtaaggtgaccgctaaa

SEQ ID NO: 283877 - DNA, 1236 bp, Artificial Sequence
  derived and/or modified sequence
atgtctagtaagggatctgtcgttttggcttatagtggaggtctggatacctcatgcatcctggtctggctcaaagaacagggatacgatgtgatcgcatacctggccaacatcggccaaaaggaagattttgaagaggccaggaagaaggcgctgaagttgggagcaaagaaggtattcatcgaggatgtgtcaagagagttcgtagaggaatttatctggccggctattcagagctccgctctctacgaagacagatacctgctcggaaccagcctcgcaaggccatgcatcgctcgcaaacaggttgagattgcccagcgcgagggtgctaaatacgtgagccacggcgccactggcaaaggtaacgaccaggtcaggtttgaattgtcatgctacagcctggctccccaaattaaagttatcgcgccgtggaggatgcctgaattctacaacaggttcaagggcaggaatgacttgatggaatacgccaaacaacatggaatcccaattccagtaacacccaaaaacccatggtcaatggacgagaacctcatgcacatatcctacgaggcaggtatccttgagaaccctaagaaccaggccccacccggcctgtacaccaaaactcaggatcctgctaaggcccccaacactccggacatcctcgagatagaattcaagaagggagtgccggtgaaggtgaccaacgtgaaggatggcaccacacaccagacttccttggagctgttcatgtatctcaacgaggtcgcaggtaagcacggtgtcggacgcatcgacatagtggagaacaggttcataggcatgaagagtagaggtatctacgaaactcctgccggaacaattctttaccatgcccaccttgatatcgaggccttcactatggatagggaagtaaggaagatcaaacagggtctgggcctgaagtttgccgagctcgtctacaccggcttttggcattctcctgaatgcgaattcgttcgccactgcatagccaagagtcaggaaagagtagagggaaaggtgcaagtgtccgtgctgaagggccaagtgtatatcctgggcagggagagcccactgagcctgtacaacgaagagctggtgtcaatgaacgtacagggtgattacgaaccgacagatgccacgggattcatcaacataaatagcctgcgcttgaaggaatatcacagactccagtcaaaggtgaccgctaag

SEQ ID NO: 283878 - DNA, 1236 bp, Artificial Sequence
  derived and/or modified sequence
atgtccagtaaaggaagtgttgtgttagcgtactcaggggggttggatacatcttgcatattagtttggctaaaggaacagggatatgatgtcatagcctacttggcaaacatagggcagaaagaagatttcgaagaagctcgaaaaaaggccctcaaactaggggccaaaaaagtttttattgaagatgtttcccgcgaatttgtagaagaattcatatggcccgccatccagagttcggctctctacgaagatcggtatctgctgggaacttctttagcccgcccatgtatcgcccggaagcaggtggagatcgcacagagagagggggccaaatatgtgtctcatggggctacaggaaaagggaatgaccaggtccggtttgaactttcctgttattctctcgctcctcaaatcaaggtgattgcaccatggagaatgcctgagttctacaaccggtttaaaggaaggaatgacctcatggaatacgctaaacagcatgggatacccattcccgtcactcccaagaatccatggtcgatggatgaaaatctcatgcacatatcttatgaagccgggatactagaaaatcccaaaaaccaggctcctcctggactttacactaaaactcaggatcccgccaaagcacccaatacacctgatattcttgaaattgaattcaaaaaaggagtacctgtaaaagtgacaaatgtgaaagatggaactacacatcagacttcattagaactgtttatgtaccttaatgaagttgcgggaaaacacggagtggggaggatcgatatagtagaaaaccggtttattggaatgaaatctagggggatctatgaaacacctgctgggactatcctgtatcacgcacacttggacattgaagcctttactatggatcgagaggtgcggaaaatcaaacaggggctggggctgaagttcgccgagctggtatatactggattctggcattcacccgagtgtgagttcgtcagacactgtatagccaaatcccaggaacgcgttgaaggaaaagtccaggtgagtgtcctcaaagggcaagtgtatattttagggagagaatcccccctatcactgtacaatgaggaactagtgtctatgaatgttcagggagattatgaacctactgatgctactggattcataaacattaactctctaaggctcaaagaataccataggttacagagtaaggtcactgccaag

SEQ ID NO: 283879 - DNA, 1236 bp, Artificial Sequence
  derived and/or modified sequence
atgagttccaaggggtctgtggtgctggcctactctgggggcttggatacaagctgcatcctggtttggctcaaggagcaaggctacgatgttatagcgtatctcgcaaacatcggtcagaaggaagatttcgaggaggctagaaaaaaagcgctgaaactgggcgctaaaaaagtgtttatcgaggatgtcagtcgagagttcgtagaagaattcatctggccagctatccagagcagcgcgctctacgaggatcgatatctgttgggtacttccttggcccgcccctgcatcgctagaaaacaggtggaaatagcacagagggagggagcaaagtacgtgtcccacggagccacaggaaagggcaacgaccaggtgcggtttgaactttcttgctactccttggcgccccagattaaggtcatcgcgccttggagaatgcctgagttctacaaccgattcaagggaagaaatgatcttatggagtacgcgaagcagcacgggatcccaattccagtaacccccaagaacccatggtcaatggacgagaaccttatgcacatctcatacgaagccggcatactggagaatcccaagaatcaggcgccacctggtctgtatacgaaaacccaggatccggctaaggctcctaatacccccgacatcttggaaattgagttcaaaaagggagtacccgtgaaagtgacgaatgttaaagatggaaccactcaccaaacttcactggagctgttcatgtacctcaacgaggtggctgggaaacatggggtgggaaggattgacatagtcgaaaaccgcttcatcggaatgaagagccgcgggatttatgagaccccggctggcaccatcctgtaccatgcacacctcgatattgaagcttttactatggacagggaggtcagaaaaatcaaacagggactcgggttgaagtttgccgaactcgtgtatacaggtttttggcacagccccgaatgcgagttcgtgaggcactgcatcgcgaagtctcaggagcgcgtcgaggggaaggtccaagtgtccgttttgaaggggcaggtttacatactggggcgcgagtcccccctctcactgtacaacgaagagctcgtctctatgaatgtgcagggcgactacgagcctacagacgccacaggcttcatcaatatcaactctctccgcctgaaagaatatcatcggctgcagagcaaggtgactgccaaa

SEQ ID NO: 283880 - DNA, 1236 bp, Artificial Sequence
  derived and/or modified sequence
atgtcgtccaagggctcagtcgtcctcgcttatagcggcggcctagacacaagttgcattcttgtttggctgaaggaacaggggtacgacgtcatcgcataccttgccaacatcggacagaaggaggacttcgaggaggcacggaagaaagccttaaaactcggcgcaaaaaaggtctttatcgaggacgtgagtagggaattcgtcgaggaatttatctggcctgccatccagagctccgcactatacgaggacagatatctgcttggaacttctttggctagaccctgtattgccagaaaacaagtggaaattgctcaacgggaaggtgcaaaatacgtctcccatggcgcgaccgggaaaggcaatgaccaggtgaggttcgaactgtcgtgctactctctggcaccccagataaaggtgatcgcaccctggcgaatgcccgagttttataaccgttttaagggccgtaatgacctcatggagtacgccaagcagcatggtatacccattccagtgacccccaaaaacccctggtcaatggatgaaaaccttatgcacattagctatgaagcagggatcctggagaacccgaagaaccaggcccctcctggcctgtacaccaaaacccaggatccagctaaggcacctaatactccagatatcctcgagattgagttcaagaagggggttccggtgaaggttactaatgtgaaagacggtaccacacaccagacttccttggagcttttcatgtacttgaatgaggtggccgggaaacacggtgtgggacgcatcgatattgtggagaacagatttataggtatgaagtctcgcggcatctacgagactcctgctggcactattctgtatcacgcacacttagatattgaggcttttacaatggacagggaggtgagaaaaataaagcaggggctggggctcaagttcgccgagctggtttatacgggattctggcacagtccagagtgtgaatttgtgcgccattgtatcgccaagagtcaagagcgtgttgagggtaaggtgcaggtctccgtgctgaaggggcaggtttatatccttggaagagagagtcccctttccttgtataacgaagagctggtctccatgaatgtgcagggggattacgagccaacagatgcaactggctttatcaatattaactcattacgactgaaagagtaccatcggctgcaatccaaagtcacggccaaa

SEQ ID NO: 283881 - DNA, 1236 bp, Artificial Sequence
  derived and/or modified sequence
atgtcaagcaagggttcggtggtgcttgcatattccggaggacttgatactagctgtattctcgtgtggctgaaggaacaagggtacgacgtcatagcatacctcgccaatattggtcagaaggaagattttgaagaagccaggaagaaggcactcaaacttggagcaaaaaaggtgtttatcgaagatgtgtcccgcgaatttgtcgaggagttcatctggccggcgattcaatcgtctgcactgtacgaagatcgatacttgctcggtacttccctggctcgcccctgtattgccagaaagcaagtggaaattgctcaaagagaaggagcaaagtacgtgagccacggggcaacggggaagggtaatgatcaggtccggtttgagcttagctgctattcactggcccctcagattaaggtgattgcaccctggcgtatgcctgagttttacaatcgattcaagggcaggaatgacttgatggaatacgcaaaacagcatggcatcccgattccggtgactcccaagaacccttggtcgatggatgaaaatctgatgcacatttcatacgaagcaggtattcttgagaaccctaagaaccaagcaccacctgggctctacactaagactcaagatccagcaaaggcacccaatacccccgatattctggagatcgaattcaaaaaaggcgtccctgttaaggtgactaacgtgaaagacggaaccacccaccagacctcgctggaacttttcatgtacctgaacgaggtggcaggaaagcatggagtgggacggatcgacattgtggaaaacaggttcatcggtatgaagagccgagggatttacgagactccagcaggcactatcctgtaccacgcacacctggatattgaggcatttactatggatcgcgaagtcaggaagattaaacaagggctgggactgaaattcgcggaactcgtctataccggattctggcattcaccagaatgtgagtttgtgagacattgtattgctaagtcgcaggaaagagtggaaggaaaggtgcaagtgtcggtgcttaagggacaagtgtacattcttggacgggagtccccactttcactgtataacgaggaactggtgagcatgaacgttcagggagactacgagcctaccgacgctactggattcataaacattaacagcctcaggctgaaagagtaccataggctgcaatcgaaggtgaccgccaag

SEQ ID NO: 283882 - DNA, 1236 bp, Artificial Sequence
  derived and/or modified sequence
atgtcgtccaagggaagcgtggtgcttgcatactcaggtggcctggacacttcttgtattctggtgtggttgaaagaacaaggctacgacgtgatcgcttacctcgcgaacattggtcagaaggaggacttcgaagaggccaggaagaaggcactgaagttgggggcaaagaaagtgttcatcgaggatgtctcccgggagttcgtggaggaattcatttggcctgccattcagagctccgccctgtatgaggatcgctacctgctgggcacttcgcttgcgcggccgtgcatcgcccgcaagcaggtcgaaattgcacaaagggaaggagcaaaatacgtctcacatggagccactggaaaaggaaatgatcaggtccggttcgagctgtcatgttacagcctggcgccacagatcaaggtgatcgccccgtggcgaatgccggagttctacaatagatttaagggacggaacgacctcatggaatacgccaagcaacacggaatcccgatcccggtgaccccgaaaaacccgtggtctatggacgaaaatctcatgcatatcagttacgaagccgggatcctggaaaatcccaagaatcaagcacctccgggactgtatactaagacccaggatccggcgaaggcgccaaacaccccggacatcctggaaattgaattcaaaaagggtgttccggtgaaggtgactaacgttaaggacggaactactcaccagacctccctcgagctgttcatgtacttgaacgaagtcgccggaaagcatggagtgggacggatcgacatcgtcgagaaccggttcatcggtatgaagagcaggggcatttacgagactccggcgggtaccatcctgtaccatgcacacctggatatcgaagcctttaccatggaccgcgaagtgcggaagatcaagcaggggctgggcctcaagttcgcagagctggtctacactggcttttggcacagccccgagtgcgaatttgtccgtcactgcattgctaaatctcaggaacgggtggagggtaaggtccaagtctcggtcctgaaagggcaggtgtacatcctgggtcgggaatcaccactctccctgtacaacgaagagctggtgagcatgaacgttcaaggagattacgagccaactgacgccactggattcatcaacataaactccctgcggttgaaggaataccaccgactccagtcgaaagtgaccgccaaa

SEQ ID NO: 283883 - DNA, 1236 bp, Artificial Sequence
  derived and/or modified sequence
atgtcgtccaaggggagcgtggtgttggcctactcaggtggtcttgatacctcgtgcattcttgtctggctgaaggaacagggatacgatgtgattgcatacctggcaaacataggtcagaaggaagattttgaagaagcacgcaaaaaagcactcaagctcggagcaaaaaaggtgtttatagaagatgtgtcgcgggaatttgttgaagagtttatctggccagcaatccaatcatcagccctttatgaggaccggtatctgcttggaacttcgcttgcgaggccttgcatcgctcggaaacaggtcgaaattgcccaaagagaaggtgctaagtacgtgagccacggagccaccggaaagggcaacgatcaagtccgatttgagctttcgtgttacagcctggcaccgcagataaaagtgattgccccttggcgaatgcctgagttttacaacagattcaaaggacggaatgatctcatggagtacgcaaagcaacatggaattcccattccagtgacccctaagaatccctggtcaatggatgagaacctgatgcatatatcatacgaagctgggattttggaaaatcctaagaatcaggcgccaccgggactgtacactaagactcaggatccagcaaaggcaccgaatacccccgatattcttgaaattgagtttaagaagggcgtcccagtgaaggtcactaacgtcaaggatggcactacccatcaaacctcccttgagctgttcatgtaccttaacgaggtggcagggaagcatggtgtgggtcgtatcgacatcgtggagaaccggttcatcggaatgaagtcgagaggcatctacgaaacccccgctggaaccattctgtaccacgcccacctggacatcgaagcatttaccatggaccgggaagttcggaagataaaacaaggcctgggacttaagtttgccgaactggtgtacactggattttggcactcgcctgaatgtgaattcgtgcgccattgtattgccaaatcgcaggaaagggtggagggaaaggtgcaggttagcgtgcttaagggccaagtgtacattcttggacgtgaatccccgttgagcctctacaatgaagaactcgtgagcatgaatgttcaaggagactacgagcccacggatgcaactgggttcataaacattaactcgctgcggctgaaggagtatcaccgcctgcagagcaaagtcaccgccaag

SEQ ID NO: 283884 - DNA, 1236 bp, Artificial Sequence
  derived and/or modified sequence
atgagcagcaagggctcagtggtgctcgcgtacagcggcggactcgacactagctgtattctggtctggcttaaggaacagggctacgacgtgatcgcatatttagccaatattggccagaaggaagacttcgaggaagcacgcaagaaggcactgaaactgggagccaaaaaggtcttcatcgaagatgtttcccgtgagtttgttgaagaatttatctggccagcaattcagtcttccgctctctatgaggaccgctatctcctgggaaccagcctcgccaggccctgcattgctagaaagcaagttgaaattgcccaaagggagggcgctaagtacgtctctcacggagccactgggaaggggaacgaccaggtccgattcgaactatcgtgttacagcttggccccacagatcaaagtgattgctccatggagaatgcctgagttctacaacagatttaagggccgtaacgatctgatggaatacgcaaagcagcatggcatccctatccccgtgacccccaagaacccatggtccatggacgaaaacttgatgcacatcagttatgaggcaggcatcctagagaacccaaaaaaccaggcacccccgggcctatacaccaagacccaggatccggccaaagcccccaatacccccgacattttggagatcgagttcaagaagggcgtgcctgttaaggttacgaatgtgaaggatggcacgacacaccaaacttcacttgagttgttcatgtacttgaatgaggtggccggcaaacacggggttggtcggattgatatcgtcgagaaccgtttcattggaatgaagtcccggggcatatatgaaactcctgcagggaccatactttaccacgcacacctcgacattgaggctttcaccatggacagagaagtgagaaaaattaaacagggactgggcctaaaattcgctgagctcgtgtatacagggttttggcattcccccgagtgtgagtttgtgcggcactgcattgctaagtcccaggagagggtggaaggaaaggtgcaggtctctgtactgaagggccaggtctatatcttggggcgagagtctcccctgtccctgtataatgaagaacttgttagcatgaacgtccagggcgactacgaaccgactgacgccacaggctttatcaacattaattccttgcgcctgaaagaataccatagattgcagtccaaggttacggctaag

SEQ ID NO: 283885 - DNA, 1236 bp, Artificial Sequence
  derived and/or modified sequence
atgagctctaaagggtcagttgtattagcatattccggcggactagatacatcttgcattctggtttggctgaaggagcagggctatgacgttatcgcttatctagcaaacattggccagaaggaggatttcgaagaagctaggaaaaaggcactaaagttgggtgcaaaaaaagtatttatcgaggatgtatctcgggaattcgtggaggaatttatctggcccgcaatacagagtagtgctctgtacgaggataggtacctgttggggacttcgctcgccaggccctgcattgcacgcaaacaagtcgaaatcgcccagagggaaggagcaaaatatgtgtcgcacggcgctaccggcaagggcaacgaccaagttcggtttgaactctcttgctattctcttgccccccagattaaagtgatcgcaccttggcgaatgcccgagttctataatcggttcaagggtaggaacgatcttatggagtacgccaaacaacatgggatcccgattcccgtcacccccaagaatccatggagcatggacgagaaccttatgcatattagttatgaagctggtatcttggagaaccctaaaaatcaagcccccccaggactttacacaaagacccaggatcccgcaaaggcacctaatacacctgatatcttggaaatagagttcaagaagggagtgcctgtgaaagttaccaacgtgaaggacgggaccacacatcagacatcccttgaactgtttatgtatttgaacgaggtcgcaggcaagcatggagtgggtcgcattgatatcgtggaaaatcggtttatcggaatgaagtctcgcggaatctatgagacacccgcaggtactattctctaccacgcgcatctcgacattgaggcttttactatggaccgggaagttcgcaaaataaagcaaggactaggcctaaagtttgcggagcttgtctataccggattctggcattctcccgaatgcgagttcgtgagacattgcatcgccaagagtcaggagcgcgtcgagggcaaggtgcaggtaagtgtgcttaaaggccaggtctacatcttgggcagagaaagtcctctgagtctgtataatgaagagttggtttccatgaatgtgcagggtgactacgaacctaccgatgctactggattcatcaatatcaattccctgagattaaaggagtaccaccgactccagtccaaagtgacagccaag

SEQ ID NO: 283886 - DNA, 1236 bp, Artificial Sequence
  derived and/or modified sequence
atgtcctcgaagggatcggttgtgctcgcatattctggggggctggacacctcatgcatactcgtatggcttaaggagcagggctacgatgtcattgcatatttagctaatatcggtcagaaagaggacttcgaggaggccaggaaaaaggccctgaagctgggggcaaagaaagtattcatcgaggacgtgagtagggagtttgtggaggaatttatatggcctgcaattcaatctagcgctctttatgaggatcggtacctgctgggcaccagcctggcacgcccttgcattgctcgcaagcaggtggagatcgcccaacgggagggggcaaagtacgtcagtcacggcgcaactggcaaaggcaacgatcaggtccggtttgaactctcctgttatagccttgccccccaaattaaagttatcgcaccatggcgcatgccagaattttacaaccggttcaagggaagaaacgacctgatggaatatgccaagcagcacggaataccaatccccgtgacacctaaaaatccatggagtatggacgaaaacctgatgcacatttcctacgaggctggtattctcgagaatccaaaaaaccaggctccccccgggctgtacaccaagactcaggacccggctaaggcaccgaacactcccgatatcctcgagatagaatttaaaaaaggggtacccgtgaaggtcaccaacgttaaggatggaacaacccatcagacctcattggagcttttcatgtacctgaatgaggtggctggaaaacacggtgtagggagaattgatattgttgagaataggttcatcggcatgaaaagtaggggtatttacgaaacgcccgcagggactattctgtatcacgcgcatctagacattgaagcttttactatggaccgggaagtccgtaagatcaagcagggcttgggtctgaagttcgccgaactcgtttacactggcttttggcacagcccggagtgtgaattcgttagacattgcatcgccaagtcccaggagagggttgagggcaaggtgcaggtttctgtcctgaaggggcaggtatatatcctggggcgcgaatcgcccctgagtttgtacaatgaagagctcgtgagtatgaatgtgcagggcgactatgagccaaccgacgctaccggcttcatcaatatcaatagtctccggctgaaagagtaccatagactgcagtctaaagtcactgccaaa

SEQ ID NO: 283887 - DNA, 1236 bp, Artificial Sequence
  derived and/or modified sequence
atgtccagtaagggttcggtggtgctggcctactcgggaggacttgatacttcttgtatacttgtgtggctcaaagagcaaggttacgacgtcatcgcatacctggcaaacatcgggcagaaggaagatttcgaagaagcaaggaagaaagcactgaagctcggtgcaaagaaagtgttcatagaggacgtctcgcgcgaatttgtggaggagttcatttggccagcaattcaaagctctgcgctctacgaggaccgatacctgctgggaacctcacttgctagaccgtgtatcgcacgcaagcaagtcgaaatcgcgcaaagagagggggcaaagtacgtgtcccatggagccactggtaagggtaacgaccaggtccgtttcgaactgtcgtgttatagcttggctccccagatcaaggtgattgcaccctggcgcatgcccgaattctacaataggtttaagggcaggaacgatttgatggaatacgcaaaacaacatggcattccaatcccagtgaccccaaagaacccatggtcaatggacgaaaaccttatgcatatctcatacgaagcaggaatactcgaaaaccctaagaaccaggcaccgcccggcctttacaccaagacccaagatccagcgaaggcccctaatactcccgacattcttgagatagagtttaagaaaggcgtgccagtgaaggtgactaacgtgaaggatggcactactcatcaaacgtccctggaactgttcatgtatctcaatgaagtcgcaggaaagcatggagtgggtcgtatcgacatcgtggagaataggtttatcggaatgaagtccaggggaatctacgaaacccctgcaggaaccatactctaccacgcacacctggatatagaggcatttactatggatcgggaagtgcgtaagataaagcaaggtttgggtctgaagtttgcggaactcgtgtacactggcttttggcactcgcctgaatgcgaatttgtgcggcattgcattgctaagagccaggaacgcgtcgaaggtaaggtgcaggtgtccgtcttgaagggacaagtgtacattctcggaagagaatcacctctttcactgtacaacgaagaactggtgtccatgaatgtgcagggagattacgaaccgactgatgccaccggatttatcaatatcaattcccttagacttaaggaataccaccggttgcagtcaaaggtcactgcaaag

SEQ ID NO: 283888 - DNA, 1236 bp, Artificial Sequence
  derived and/or modified sequence
atgtcgtccaaggggtcagtggtcctggcatattcgggtggtctggacacctcttgcattctggtgtggttgaaagagcaggggtacgatgtgattgcttacctcgccaatataggacaaaaggaagattttgaagaggcaagaaagaaggcgctcaagctgggagcaaagaaagtgtttatcgaggatgtgagccgtgagtttgtcgaagaattcatttggcctgctatccagtcgagcgcactttacgaagatcggtacctgctgggtacttcgctggcacggccatgtattgcacggaagcaagtggaaattgcgcaaagagaaggagcaaagtacgtctcgcatggtgcaaccggaaaaggtaacgatcaggtgcggtttgaactgtcctgctactcgcttgccccgcagattaaagtgatcgcaccatggcggatgccagaattctataacaggtttaaaggaagaaacgacctcatggaatacgcaaaacagcatggaataccaatacccgttacccctaagaacccgtggagcatggatgagaacttgatgcacatctcgtatgaggcgggaattcttgaaaatcctaaaaaccaggcaccacctggcctttacactaaaacccaagatcctgctaaggcacctaatactccagatattctggagatcgagttcaagaaaggtgtgccggtgaaagttaccaacgtgaaggatggaacgactcaccaaacctcgctggaactgttcatgtacctgaacgaggtcgcaggtaagcatggagtcggacgcattgatatagtcgaaaatcgctttattggaatgaagtcgagaggaatctacgaaaccccagccggtactattctgtaccatgcgcaccttgatatagaggcatttaccatggaccgggaagtcagaaagattaagcagggtcttggtcttaagttcgcagaactggtctacactggattctggcattctccagaatgtgaatttgtgagacactgtattgcgaagtcacaggagagagtggaaggaaaggtgcaggtgtcggtcctgaagggacaagtctacatcttgggccgagaatcccccctttcactctacaatgaagaactggtgtcaatgaacgtgcaaggtgattacgaacctactgatgctactggattcataaacataaactcccttcgtctgaaggagtaccaccgtctgcagtccaaggtgaccgccaag

SEQ ID NO: 283889 - DNA, 1236 bp, Artificial Sequence
  derived and/or modified sequence
atgagcagcaaaggttccgtggtgctcgcttactccgggggactcgatactagctgtatcttggtttggctcaaagagcaagggtacgacgtcatcgcatacttggccaatatcggccagaaggaggacttcgaagaggcacggaaaaaagcattgaagctgggtgcgaagaaagtgtttattgaggacgtgtcaagggagttcgtggaagagttcatctggccggccatccagtctagtgccctttacgaggacagatacctgctcgggacctcgctggctagaccgtgcattgcgcgcaaacaagtcgaaatcgcgcagagagaaggagcgaagtacgtctcgcatggagcaactggaaaggggaacgaccaggtgcggtttgaactgagctgctactcacttgccccacagattaaagtgatcgcaccatggcggatgcctgaattctacaatcgtttcaaaggacgcaacgacctcatggagtacgcaaagcagcacggtatcccgatcccggtcaccccgaagaatccttggagcatggatgaaaacctcatgcacatcagctacgaagccggaatcctcgagaacccgaaaaaccaggccccgcccggtctgtacactaagacccaagacccagctaaggcacctaatactccagacattttggaaatcgaattcaagaagggagttcctgtcaaggttacgaacgtcaaagatggcaccactcaccagacctcgttggagctgttcatgtatctgaacgaagtggcgggtaaacatggggtgggtagaatcgatatcgtggagaatcgcttcataggaatgaagtctcggggcatttacgaaaccccggccggaactatcttgtaccacgctcatctggacatcgaagccttcaccatggatcgcgaagtgagaaagatcaagcagggactgggacttaagttcgcggagcttgtgtacaccggcttctggcactcaccggaatgcgaatttgtgcggcactgcatcgcaaagtctcaggagagagtcgaaggcaaggtccaggtgtcggtgctgaagggccaagtgtacatcttgggtcgagagtcgcccctcagcctgtacaatgaggaactggtgtccatgaatgttcagggagactatgagcctaccgacgccaccggctttatcaacattaactccttgagactgaaggaataccatcgacttcagtccaaggtcaccgccaag

SEQ ID NO: 283890 - DNA, 1236 bp, Artificial Sequence
  derived and/or modified sequence
atgagcagcaaagggtcagtcgttctggcttacagcggtgggctcgacacttcttgcattttagtgtggctgaaggaacagggttatgatgtgatcgcctacttggcaaatatcgggcagaaagaagatttcgaggaggcgagaaaaaaggcactgaagctgggagccaagaaagtatttatagaagacgtctcacgtgagtttgtagaggaattcatctggccggccattcaatcttcagccttgtacgaggacaggtatctgctggggacctccctggcacgcccatgcattgcaagaaaacaggttgaaatcgcgcagcgagagggcgccaaatatgtgtctcacggggctacaggaaagggcaacgatcaggtacgctttgagctatcgtgctacagcctcgctcctcagattaaggtgatcgcaccctggaggatgcctgagttctataaccgcttcaagggtcgcaatgacctgatggaatacgctaagcagcatgggatccccatccccgtcactcccaagaacccctggagcatggacgagaacctgatgcacatctcatacgaggccggtattctagagaatcctaagaaccaggcacccccggggttatacaccaaaacgcaggaccctgctaaggcccccaacacacctgatattttggagattgagttcaagaagggcgtgccagttaaggtgacgaacgtgaaggacggaaccactcaccaaactagcctggaactgttcatgtacctaaatgaagttgcgggcaagcacggggtcgggaggatcgatatagtcgaaaataggtttatcggcatgaagagcaggggcatttatgagacccctgctgggacaatcctgtatcacgcgcacctggacattgaggcctttactatggatagagaggttcgtaagatcaaacagggcctggggctgaagtttgccgagttggtttacacgggcttctggcattcccctgaatgtgagtttgtgaggcattgcatcgctaagtcccaggagcgggtggaaggcaaggtgcaggttagtgtgcttaagggtcaggtgtacatcctgggaagagagagccccctctcgctgtacaacgaggagctggtttccatgaacgttcagggtgactatgaacccactgatgccacaggctttatcaacatcaacagccttcgcctaaaggagtatcaccgcctgcagagcaaggtgactgctaag

SEQ ID NO: 283891 - DNA, 1236 bp, Artificial Sequence
  derived and/or modified sequence
atgtcgtccaagggatcggtggtcctggcatactcgggagggctggacacctcgtgtattctcgtctggcttaaggagcaaggttacgacgtgattgcatacctcgcaaacatcgggcaaaaggaagatttcgaggaagctagaaaaaaggcgcttaagctgggagctaagaaggtgtttattgaggacgtgtcgagagaattcgtggaagagtttatctggccagcaattcagtcatccgcactttacgaagatcggtacctcctcggtacctcgctcgcacggccctgtattgcaagaaagcaagtggagatcgcacagcgcgaaggcgccaagtacgtctcgcatggtgcgacgggcaagggtaacgatcaagtgcgctttgagctgtcctgttactcccttgccccccagattaaagtgattgcaccatggaggatgcctgagttttacaaccgctttaagggacgaaatgaccttatggaatatgccaaacagcatggtatcccaattcccgtcactcccaaaaacccttggtcgatggatgaaaatctgatgcatatctcatacgaggccggaattcttgaaaaccctaagaaccaggcgcctccaggcctgtacaccaagacccaagacccggcgaaggcacctaacactcctgatatacttgagatcgagtttaagaaaggagtccccgtgaaagtgaccaacgtgaaagatgggaccactcaccagactagcctggagctctttatgtacctgaatgaagtggcaggtaagcatggcgtgggacggattgatatagtggagaatcggttcattggtatgaaatcgagaggcatttacgaaacccctgcagggaccatcctttatcatgcacatctggatatcgaagcgtttactatggatcgtgaagtgcgcaagatcaagcaggggctcggactgaagtttgcggaactcgtgtacactggattttggcattcgccggaatgcgagttcgtccgacattgtatcgcaaagagccaggaacgtgtggagggtaaggtccaggtgtccgtgctcaagggtcaggtctacatcttgggtcgcgaatcccccctttcgctttacaatgaggagcttgtctcgatgaacgtccagggagattacgaaccgaccgatgcaaccggattcattaacatcaattcactgaggcttaaggagtaccaccgactccagtcgaaggtgactgcaaag

SEQ ID NO: 283892 - DNA, 1236 bp, Artificial Sequence
  derived and/or modified sequence
atgtcttcgaaggggagtgtagttttggcgtactcaggaggacttgatacttcgtgtattttggtttggttgaaagaacaaggatatgacgttatagcatacttggcaaacattggtcagaaggaagacttcgaggaagcacggaagaaggctctcaagcttggagcaaagaaggtttttatagaggatgtgtctagggagttcgtcgaagagtttatatggccggccattcaatctagtgcattgtacgaagatcgttatcttcttggaacttcgcttgctagaccttgtatcgcaaggaaacaagttgaaattgcgcaaagggaaggtgctaagtacgtctcacacggcgctactggtaagggaaacgatcaggtgcgatttgaactaagctgttactcattggccccccagattaaggtcatagccccttggagaatgcccgagttttacaatagatttaaagggagaaacgatttaatggaatatgccaaacaacacgggatacctattccagtgactcctaaaaacccttggtcaatggatgaaaatctgatgcacatttcgtacgaggctggtattctagagaaccccaagaaccaagctccaccgggcctatatacaaaaactcaagaccccgcgaaggcccctaatactcctgatatccttgagattgaattcaaaaagggcgttccagttaaagtgactaacgtcaaggatgggacaacccaccaaacttcccttgaacttttcatgtatctcaatgaggttgctggtaagcatggtgtgggaaggatcgacattgttgagaacaggttcatcgggatgaaaagccgaggaatatatgagactcctgctggtaccatattatatcacgcacatttggatatcgaggcattcactatggatagagaggttcgtaagattaagcaaggcttaggactgaagtttgctgaactcgtttatacaggtttctggcactctcctgaatgcgagtttgtccgtcactgtattgccaaatcccaagaaagggtcgaaggaaaagtgcaggtttctgttttgaagggacaagtttatattctgggccgtgaaagtcctcttagcctatataatgaggaactcgtatccatgaacgttcaaggcgactacgaaccaaccgacgctactggattcattaacatcaattctttgcgacttaaagaatatcaccgcctgcagtcaaaggttactgctaaa

SEQ ID NO: 283893 - DNA, 1236 bp, Artificial Sequence
  derived and/or modified sequence
atgtcaagcaaaggatcggtggtgctcgcctactcgggaggactcgacactagctgcatccttgtatggttgaaggagcaaggatatgacgtgattgcctacctcgctaacatcggtcagaaggaagatttcgaggaggcccggaagaaagccctgaaacttggtgccaaaaaggtgttcatcgaagatgtgtcccgggaattcgttgaggagttcatctggcccgcgatccagtcctcggccctgtacgaggaccggtacctcttgggaacttccttggcccgaccgtgcatcgcgaggaagcaagtggaaatcgctcagagagaaggagccaagtacgtgtcgcacggcgcgaccggaaaaggcaacgaccaggtgaggtttgagctcagctgctactcgctggcaccgcagatcaaggtcatcgccccctggcgcatgcctgaattctacaaccgctttaagggcagaaatgacctgatggaatacgctaaacagcacggaatcccgattccggtcacgcctaagaatccttggtcaatggatgagaacctgatgcacatttcatacgaggctggaattctggaaaacccgaagaatcaagcaccgccaggactttacactaaaacgcaggacccggccaaggcaccaaacactcctgacatcctggaaatagaattcaagaagggcgtgcccgtgaaggtcaccaacgtgaaagacggtaccacccaccagacctctctggaattgttcatgtacctgaatgaagtcgcggggaagcatggagtcgggcgcatcgacatcgtcgagaacagattcatcggcatgaaatcccgtggcatctacgagactccagcgggaaccatcctctaccacgcacatctggatattgaagcattcactatggaccgcgaagtccgcaaaatcaagcaaggtctgggactcaagttcgccgaactggtttacaccgggttttggcattcaccggagtgcgaatttgtccgccattgtattgcgaagtcgcaggaaagagtggagggaaaggtgcaagtctcggtgctgaagggccaagtgtacatcctcgggcgggagtcaccactcagcctctataatgaagagctggtgtccatgaacgtgcagggagattacgagccaactgatgcgaccggcttcatcaacatcaattccctgcggctgaaggaataccaccggctgcagagcaaggtgaccgctaag

SEQ ID NO: 283894 - DNA, 1236 bp, Artificial Sequence
  derived and/or modified sequence
atgtcgtcgaagggctccgttgtgctcgcctactccggaggactggacacctcttgcatcctcgtgtggctgaaagagcaaggctacgatgtgatcgcttacctcgcaaacattggtcagaaagaggatttcgaagaagcacggaagaaggcccttaagctgggtgccaagaaggtgttcattgaagatgtctccagagaattcgtggaagagttcatctggccagcgatccagtcatccgctctctacgaagatcgctacctcctcggtacctcgctcgcgcgcccatgcattgctcggaagcaagtggaaatcgcacaacgcgagggagctaagtacgtgtcgcacggtgctaccgggaagggtaatgaccaggtgcgcttcgaactctcgtgctactccctggcgccacagatcaaagttatcgcgccttggcgcatgccggagttctataaccgcttcaagggacgcaacgacttgatggagtacgcaaagcagcacggaatcccgatccctgtgacccccaagaacccgtggagcatggatgagaatttgatgcatatctcgtacgaagcgggaatcttggagaacccgaaaaatcaagcgccgccgggactgtataccaagacccaggacccggccaaggccccgaataccccagacatcctcgagatcgagtttaagaagggagtcccagtgaaggtgaccaacgtcaaggatggaaccacccaccaaacctcgctcgagcttttcatgtacctgaacgaggtcgcaggaaagcacggcgtgggaagaattgacatcgtggaaaaccgcttcatcggaatgaagtcccgcggaatctacgaaactcccgcaggcactattctgtaccatgcacacctcgacatcgaagcgttcaccatggaccgggaagtccgcaagatcaagcaggggttgggactgaagttcgccgaactcgtctatactggattctggcactcaccggaatgcgagtttgtcagacattgtattgcaaaatcacaagagagggtggagggtaaggtccaagtgtccgtgctgaagggacaagtgtacatcctgggacgggaaagcccactgagcctgtacaacgaagagctggtgtcaatgaacgttcaaggagattacgagcctactgacgcaactggcttcatcaatatcaatagcctgcggttgaaggaataccaccgcctccaatcgaaagtgaccgctaag

SEQ ID NO: 283895 - DNA, 1236 bp, Artificial Sequence
  derived and/or modified sequence
atgtcttctaagggcagtgtggtcctcgcttattctggtggactcgacacaagttgcatcctggtgtggttgaaggaacagggttacgacgtgatcgcataccttgccaacattggacagaaggaagattttgaggaggcacgcaagaaggctcttaagctgggagcaaagaaggtattcattgaggacgtgtctcgtgagttcgtggaagagttcatctggcctgctattcagtctagcgctctgtacgaggatcgctacctgctgggaactagcctggctcgtccttgcattgctcgtaaacaagtggagattgcacagcgtgagggagcaaaatacgtgtcacacggcgctacaggcaaaggaaacgatcaagtgcgttttgagttgagctgctatagcctggctcctcaaatcaaggtgatagccccctggagaatgcccgaattctataacaggttcaagggtcgtaacgatttgatggagtatgcaaagcaacacggtataccaattcctgtcacacccaagaatccctggagtatggacgaaaatctcatgcacatatcatatgaagctggcattttggagaaccccaaaaaccaggctccccccggtctgtacactaaaactcaggatcccgccaaggcccctaatactcctgacatactcgaaatagaatttaagaagggagtgcctgttaaggtcactaacgtcaaagatggaacaacacaccagaccagcttggagctctttatgtatttgaatgaggtggcaggaaaacatggcgttggcaggatcgacattgtcgagaatcgcttcatcggaatgaagtccaggggcatctacgaaactcctgcaggaacaatcctgtaccatgctcatttggatatcgaggctttcaccatggaccgtgaggtacgcaagatcaaacagggcttgggtctgaaattcgctgagctggtgtacacaggcttttggcacagccctgaatgcgaatttgtacgccattgtattgcaaagagccaggagcgcgtggagggaaaggttcaagtgtctgtgctcaagggtcaggtatacatcctcggtagagagtcacctttgtctctttacaatgaggagctggtatccatgaacgttcaaggagattacgagccaaccgatgccactggatttataaacatcaacagcctgcgccttaaggagtatcacaggctccaatccaaagtgaccgccaaa

SEQ ID NO: 283896 - DNA, 1236 bp, Artificial Sequence
  derived and/or modified sequence
atgagctcgaagggatctgtggttctggcgtactctggaggactggatacttcgtgtatccttgtgtggttgaaggaacagggatacgacgtgattgcgtacctggctaacataggacagaaggaggacttcgaagaagcccgtaaaaaggctctgaagctcggagccaagaaagtgttcatcgaggacgtctcacgcgagttcgtggaggagtttatctggcccgctatccagtcatcagcgctgtacgaggatcgctacctgctgggcacttccctcgcaaggccatgcatcgcacggaagcaagtggaaatcgcgcagagagagggagctaaatacgtctcgcacggggcgactggaaaagggaacgatcaggtcagatttgaactttcgtgctactcacttgctccccagattaaggtcatcgccccttggagaatgccagagttttacaatcggttcaagggaaggaatgacctcatggagtacgccaaacaacatgggatcccaatcccggtgacgccaaaaaacccttggtcgatggacgaaaatcttatgcatatttcctatgaagccgggatactggaaaaccctaaaaaccaggcgcctcctggactgtacactaagactcaagatccggccaaggcaccgaacaccccggatatcttggaaatcgaattcaaaaaaggagtcccagtgaaggttaccaacgtgaaagacggcaccacccaccaaactagcctcgaactgttcatgtacctgaatgaggtcgccggaaagcacggcgtgggaagaatcgacatcgttgagaaccggttcatcggcatgaaatcccggggtatctacgagactccggccggaaccatcctttaccatgcacacctcgacattgaagccttcactatggacagagaagtccgaaagatcaagcagggtctggggcttaagtttgcggagctggtgtacacgggcttttggcacagccctgagtgtgaattcgtgcgccattgcatcgcgaagtcgcaggaacgggtggaaggaaaggtgcaggtgtcagtcctcaagggccaagtgtacattctcggcagggaaagcccgctgtcgctgtacaacgaagagttggtttccatgaatgtgcagggtgattatgaacctaccgacgcaactggtttcatcaacatcaattcactgcgtctgaaggagtaccaccgactgcaaagcaaggtgaccgcaaag

SEQ ID NO: 283897 - DNA, 1236 bp, Artificial Sequence
  derived and/or modified sequence
atgtcctccaaaggtagcgttgttctagcatattctggcggcctggacactagctgtatattggtttggctgaaagaacagggttacgacgtaatcgcgtatctggcgaatatcggtcagaaggaagacttcgaggaggcccgcaagaaagcactcaaactcggagctaaaaaggtctttatagaagacgtgtctagagagttcgtggaggagttcatctggccagcaattcaatctagcgccctttacgaggatcgataccttctcggtaccagtctggcccgcccttgtatagcacgtaaacaggtggagattgctcaacgagagggcgccaagtacgtgagccacggcgcgaccggcaagggtaacgaccaggtgcggttcgagctcagctgttattctctggcacctcagattaaggttatcgcgccttggagaatgccagagttttacaatcgctttaaaggccgcaacgacctgatggagtacgcgaagcagcacggaattcccatacctgtgactcccaaaaacccatggtcaatggacgaaaatttgatgcacatcagctacgaagctggaattctggagaaccctaaaaaccaggcgccaccaggtctgtatactaaaacccaggacccggcgaaagcaccgaacacaccagacattctggagatcgaatttaagaagggggtgcctgtcaaagtgacgaatgtgaaggatggcaccacacaccaaacctccctcgaactgttcatgtacctgaatgaagttgcaggaaagcacggtgtaggacggattgatatcgtagagaaccgatttatcggcatgaagtctcgtgggatctacgaaactccagcgggcacaatcctgtaccacgcccacctggacatcgaggcgtttaccatggaccgcgaagtgcgcaagattaagcagggcctgggtctgaagtttgcagagttggtctacacgggcttttggcacagcccagaatgcgagttcgtgcgccattgtattgcgaagagccaggagagagttgaaggtaaagttcaagtgtctgtgctgaagggccaggtgtacattctgggtagagagagccctctcagcctgtataatgaggaactcgtgagcatgaacgtgcagggcgactacgaacctaccgacgcaactggcttcattaatatcaattccttgcgcttaaaggagtatcacagactccagagcaaggtcaccgcaaag

SEQ ID NO: 283898 - DNA, 1236 bp, Artificial Sequence
  derived and/or modified sequence
atgtctagcaaagggtcagtcgtgctcgcctatagtggcggcctggatactagctgcattcttgtatggctgaaagagcaggggtacgacgtgatagcttatctggcaaacattggccaaaaggaggacttcgaggaggctcggaaaaaggcactgaaacttggtgcaaaaaaagttttcattgaggacgtttcacgagagttcgttgaggaatttatctggcctgccattcagagttcagcactctatgaagatcgctacctgctggggactagcctggcccgaccttgtatcgctcgaaagcaggtggagattgcgcaacgggaaggcgccaagtacgtctctcacggggctaccggcaagggcaatgatcaggtcagatttgaactaagttgttattccctcgcaccacagattaaggtgattgcaccttggcgtatgcctgagttctacaaccggtttaaaggccggaacgacttgatggagtacgccaaacagcatggcatacctatcccggtgacccccaagaacccatggtccatggacgagaaccttatgcacatcagctacgaggctggcattctggaaaatccaaagaaccaagctccccctggcctatataccaagactcaggatcctgccaaagcacctaatacacccgacatccttgagattgagtttaagaagggcgtgcccgtgaaagtgacgaacgtaaaagacggaactacacaccagacgtccctcgagcttttcatgtacctcaatgaggttgcaggaaaacacggtgtgggcaggatcgatatcgtggagaaccggtttatcggaatgaagtccagaggaatctatgaaacgcccgctggaacaattttgtaccacgcccacttagacattgaagcttttacgatggatagagaggttcgcaaaataaagcaggggctcggactcaaatttgcagagctcgtttacacaggcttttggcacagccccgagtgcgaattcgtacgccactgtattgcaaagtctcaggagcgtgtcgaggggaaggtccaggtgagcgtactgaagggtcaggtttacatactgggaagagagtccccactgagtttgtacaacgaggagctggtgtctatgaacgtacagggagactatgaacctaccgacgcaactggcttcatcaacattaattctttgcggttgaaagaataccaccggctccagtccaaagtgactgctaaa

SEQ ID NO: 283899 - DNA, 1236 bp, Artificial Sequence
  derived and/or modified sequence
atgtcaagcaaaggctctgtggtgcttgcatacagcggagggcttgataccagctgcattctggtgtggctgaaagaacagggatacgatgtcattgcctacctggccaatatcggacaaaaagaggactttgaggaagctagaaagaaggcacttaagctgggcgcaaagaaggtgttcattgaagatgtgagcagggaatttgtggaagaattcatttggccagcaatacaaagctcggccctgtacgaagatcgataccttcttggtacctccctcgcaagaccttgtatcgccagaaagcaagtcgagattgcacagagggaaggggcaaagtatgtgtcccatggagcaactggtaaggggaacgatcaggtgaggtttgagctgtcatgctactcgctggcccctcagattaaagtgatcgctccctggagaatgccagaattctacaacaggtttaagggtcgcaatgaccttatggaatacgccaagcaacatggaatacctattcccgtgacgccgaagaatccttggtctatggacgaaaatcttatgcacatttcatacgaagcaggtatcttggagaacccgaagaatcaggctccaccaggattgtacacgaaaacccaagatcccgccaaggcgccaaacaccccagatatcctcgaaatcgaattcaagaaaggcgtgcccgtcaaagtgaccaatgtgaaagacggtaccacccaccagacgagcctggaactgtttatgtaccttaacgaagtggcagggaagcatggagtcggaagaattgatattgtggaaaataggtttattgggatgaagagcagaggcatttatgagactcccgcgggaactatcctttaccatgcacatctggacattgaggcctttaccatggatcgggaagtgcgaaagattaaacagggcctcggtcttaagtttgcagagctcgtctatactggattttggcactcgccagagtgtgaatttgtgcgacactgcattgcaaagagccaagagcgtgtggaagggaaggttcaggtgtctgtgctgaagggacaagtctatatactgggcagagaatcccccctgtcgctttacaacgaagaactcgtgagtatgaatgtgcagggtgattacgaacctaccgatgccactggatttatcaacattaacagccttcgactcaaggaataccatcggcttcagtccaaagtcaccgccaaa

SEQ ID NO: 283900 - DNA, 1236 bp, Artificial Sequence
  derived and/or modified sequence
atgagctccaagggctcggtggtactggcatacagcggcggccttgatacgtcctgcatccttgtctggcttaaggaacaaggatacgatgtcatcgcatacctggccaacattggacagaaggaggacttcgaagaagctagaaagaaggcactgaagctgggcgccaagaaggtgtttatcgaggacgtctcccgtgagtttgtcgaggagtttatctggcctgcaatccaatcgtcagcgctttacgaagataggtaccttcttggtacgagtctcgcacgcccatgtattgcaaggaagcaagtggaaattgcacagcgcgagggtgccaagtacgtctcacacggggccactggtaagggcaatgaccaagtgcgttttgagctgtcgtgttacagccttgctccgcagataaaagtgattgcaccatggcgcatgcccgagttttacaaccgcttcaaaggaagaaacgatctgatggaatacgcgaagcaacatggaattcccatcccagtgaccccaaagaatccctggtcgatggatgaaaacctgatgcatatatcatacgaggcaggaattctggagaaccccaagaatcaagctcctcctggtctgtacactaagacccaggacccagccaaggctcctaacactcctgatatcctcgagattgaattcaagaaaggcgtgccagtgaaggtgaccaacgtgaaggatgggaccacccatcaaactagccttgaactgtttatgtacttgaatgaagtggcaggaaagcacggagtgggaagaatcgacattgtggagaacagattcatcggtatgaaatcacgcgggatttatgaaaccccggccggtaccattttgtaccatgcacatctcgacattgaagccttcaccatggacagagaggtgaggaaaatcaagcaaggactcggtcttaagtttgccgaactggtgtacaccggcttttggcattccccggaatgcgaatttgtcagacactgtatcgcgaagagccaggagcgagtggaagggaaggtgcaagtgtcagtcctgaagggtcaagtttacattctgggtcgggaatcacccctttcgctgtacaacgaagaacttgtctccatgaacgtgcaaggagactacgaacctactgatgcaactgggttcattaacatcaactcgcttcgcctcaaggaataccatcgcctccagtccaaggtgacggccaaa

SEQ ID NO: 283901 - DNA, 1236 bp, Artificial Sequence
  derived and/or modified sequence
atgtcaagcaagggctccgttgttctggcttattctggaggtctggatacttcctgtattctggtctggctgaaggagcagggctacgatgtcattgcatatttggctaatatcggtcaaaaggaagacttcgaggaggcccgtaagaaggccttgaagctcggagctaaaaaagtgttcatagaggacgtgagcagggagttcgtggaagagttcatctggcccgcgatccagagcagtgccctttatgaggatagatatctgctgggcacctcactagcgcgcccttgcattgcccgaaagcaggtggagattgctcagagagagggggcgaaatatgtcagccacggtgccacaggcaaggggaacgatcaggtccgctttgagctgagttgttactcccttgcgcctcagataaaagtcatcgcgccatggcgaatgcccgaattctataataggtttaagggcagaaatgacctgatggagtacgcaaagcaacatggcattcccatccctgtcaccccgaagaacccttggtcaatggacgagaacttgatgcatatctcttatgaagctgggatcctcgaaaatcctaaaaaccaagctcccccgggcctctacaccaagacccaggaccctgcaaaggcaccaaatacccccgacatcctggaaatcgagtttaaaaaaggtgtgcctgtgaaggtgacgaatgtaaaggatggcacaacacatcaaacctcattggaattgtttatgtatttgaatgaggtcgccggaaagcatggcgtaggacggattgacattgtagagaatcgattcatcggtatgaaatcccgagggatctatgaaaccccagcagggacaatcttatatcatgctcacttagacattgaagctttcactatggaccgggaagttagaaagattaagcaagggttgggcttgaagttcgctgagctggtttacaccgggttttggcatagcccagagtgcgaattcgtgagacattgcattgctaaatcacaggaacgtgttgaagggaaggtgcaggtttctgtactgaaggggcaagtgtatatcctcggccgcgaatcccccctctccctatataatgaggagctggtctccatgaacgttcaaggagactatgagccaaccgacgccacaggctttataaacatcaatagcctccgactgaaggaataccaccggttgcagtcaaaagttacagccaag

SEQ ID NO: 283902 - DNA, 1236 bp, Artificial Sequence
  derived and/or modified sequence
atgtcctccaagggttccgtcgtcttagcctacagcggaggtctggatacctcctgtattttggtgtggttgaaggagcagggctacgatgttattgcctacctggctaacatcggccagaaggaggatttcgaggaggcccgcaagaaggccttgaagctgggcgccaagaaggtgtttattgaggacgtgtcccgggaattcgtggaagagttcatctggccagccattcagagctccgcgctgtacgaggatcgttatctactgggtacgtccctcgcgcgcccctgcatagcccgcaagcaggtggaaatcgcccagagggagggggccaaatacgtatcgcacggagccactggcaaaggtaacgatcaggtgcggtttgagctgagttgctactccttagccccgcagattaaagttattgccccctggcgcatgccagaattttataataggttcaagggccgcaatgacctgatggagtatgccaagcagcatggcattccgattcccgtgaccccgaaaaacccgtggtcgatggatgagaatctaatgcacatctcctacgaggcaggcatcctagagaacccgaagaatcaggctcccccgggtctgtacactaagactcaagatccagcgaaagcccccaatactcccgatatactggagatagagttcaagaagggcgtgccagtgaaggttactaacgttaaagacggtaccacccatcaaacttccctggagttatttatgtacctgaatgaggtggctggaaagcatggcgtaggcaggatcgatatcgtggagaatcggttcatcggaatgaagtcccgaggaatctacgaaacccccgctggcactatactgtaccatgcccatctggacattgaggcttttaccatggatcgcgaagtcagaaagatcaaacagggcctgggtctcaagttcgccgaactggtttacacaggattctggcactcgccagagtgcgagtttgtccgacactgcatcgcgaaatcccaagaacgagtggaaggtaaggtgcaggtgtcagtcttgaagggtcaggtttatatccttggccgcgaaagccctttgtccctgtataatgaagaactggtaagtatgaacgttcagggcgactacgagccgacggatgctacgggattcatcaacataaattccctaaggctgaaggagtaccaccgactacagtcaaaagttaccgccaag

SEQ ID NO: 283903 - DNA, 1236 bp, Artificial Sequence
  derived and/or modified sequence
atgagcagcaaaggctccgtcgtgctggcctattctggtggtctggatacaagttgcatcctcgtgtggcttaaggagcagggctacgacgtgatcgcctatctggctaacattggccagaaagaggatttcgaggaggctaggaagaaggcactgaaactcggtgccaaaaaagtcttcatagaagatgtctccagggaattcgttgaagaatttatttggcctgcaatccagtcgtctgccctttatgaggacaggtatctactaggaacttcgcttgcaagaccatgcatcgccagaaagcaagtggagatcgcccagagagagggagccaaatacgtgtcccacggagccaccggtaaagggaatgaccaggttagatttgaactctcatgttatagtttggcccctcagattaaagttatcgcaccctggcgaatgccggagttttataacagatttaaagggaggaatgacctaatggagtatgccaaacagcacggcattcccatccccgttacacccaagaacccatggtcgatggatgaaaatttaatgcacatttcgtacgaggcagggatcctggaaaacccgaagaatcaggcccctcccgggctatacaccaagacacaggacccagccaaggctcccaacacaccagacattcttgagatcgaattcaaaaagggagtgcctgtgaaagtgacaaatgtcaaggacggaactacccaccagacatctttggagctcttcatgtatcttaacgaagtggcaggaaagcatggggtggggcgaatcgatattgtagagaacaggttcatagggatgaaatccagggggatttacgaaactcctgctggaaccatcctgtaccacgctcatttggacatcgaagcctttaccatggatcgagaggtgaggaagatcaagcagggcctgggtctgaagtttgctgagctcgtctacactggcttctggcactccccagaatgcgaatttgtcagacactgcatcgcaaagtctcaagagagagtcgagggaaaagtacaggtcagcgtgttgaagggtcaggtctacatcctgggccgagaatcaccactgtcactgtacaacgaggaactcgtgagcatgaacgtacaaggagactatgaacccacagacgctaccgggttcatcaacataaactcccttcggcttaaggagtatcatagactgcaatcaaaggtgacggcgaag

SEQ ID NO: 283904 - DNA, 1236 bp, Artificial Sequence
  derived and/or modified sequence
atgtcatccaaaggcagcgtggttctcgcatactcaggcggccttgatacttcgtgcatccttgtgtggctgaaagaacagggatacgatgtcatcgcatacctcgctaacatagggcaaaaagaggacttcgaagaggctagaaaaaaggccttgaagctgggtgcaaagaaggtgtttatagaagatgtcagccgcgaatttgtggaggagtttatctggccagcgattcagtcctcggcgctgtacgaagatagatacctgctggggacctcccttgcacggccatgcattgcacgaaagcaagtcgaaattgcacagcgagaaggtgcaaaatacgtgtcacatggtgcaactggcaagggtaatgaccaagtgcggtttgaactttcgtgttactcgctggcgccacagattaaggttatcgcaccgtggagaatgcctgaattctacaatcgctttaaaggtagaaacgatcttatggaatacgcaaagcaacatggaatccccattcctgttacgcctaaaaacccctggtcaatggacgaaaacctcatgcatatttcatatgaagcaggaattctcgaaaatcccaagaaccaggccccgcctgggctttacaccaagactcaagacccggctaaggcccctaatactccggatatcctggaaatcgaattcaagaagggtgtgccagtcaaggtcaccaatgtgaaggacggtactactcaccaaacctcgctggaactctttatgtacctgaatgaagtggccggcaagcatggagtgggcagaatagacattgtggaaaatcgctttatagggatgaagagcagaggaatttacgaaactccagcgggtaccattctgtaccacgctcatcttgatattgaagcatttactatggatagagaggtgagaaagattaaacaggggctgggactgaaattcgccgaactcgtgtatactggattctggcactcgcctgaatgtgaatttgttcgacattgtattgctaagtcgcaggaaagagtcgaagggaaagtgcaagtctcggttctgaagggtcaggtgtacattcttggaagggagtccccacttagcctgtacaacgaggaacttgtgtcgatgaatgtgcaaggagattacgaacctactgatgccactggtttcattaacattaacagtctccgtttgaaagaatatcataggcttcagtcgaaagtgaccgccaaa

SEQ ID NO: 283905 - DNA, 1236 bp, Artificial Sequence
  derived and/or modified sequence
atgtcctccaaaggatctgtggtgctcgcatacagtggcggactggataccagctgtatcctcgtgtggctgaaagagcaggggtacgatgtgatcgcctacttagcaaacatcgggcaaaaggaggactttgaggaagcccggaagaaggccctgaagttgggcgccaaaaaagtctttatcgaggatgtgagcagagaatttgttgaggagtttatttggccagccatccaaagcagcgcgctttatgaagacagatacttactcggaactagcctcgccaggccctgcatcgcccgcaagcaagttgaaatagctcaaagggaaggggccaagtatgtgtcccatggggctactggtaaaggcaatgaccaggtgagattcgaactgagctgttattctcttgctccccagatcaaagtcatagccccatggaggatgcctgaattttacaataggtttaaaggtaggaatgatctgatggagtatgctaagcaacatggaattcctatccccgtgactcctaaaaatccatggtctatggatgagaacctgatgcacatttcttacgaggccggaatcctcgagaaccctaaaaaccaggcacctccaggtctctataccaaaacgcaggacccggcgaaagcgcctaatacaccggacatcctcgagattgagtttaaaaagggggtcccagtgaaggtgactaatgtaaaggatggcacaacccaccagaccagcttggagctgttcatgtatctcaacgaggtggccggcaagcacggcgtcggcaggatcgacatcgttgaaaaccgcttcatcgggatgaaatctagagggatctacgaaacacccgccgggacaatcttgtaccatgcacatctcgatatcgaagcattcaccatggacagagaagtgagaaagatcaagcaaggccttggacttaaattcgctgagctggtgtacaccggcttctggcattctcccgagtgcgaatttgtgaggcattgcattgccaaaagccaggagcgcgttgaaggaaaagtccaagtctccgttctcaaaggacaagtttatattctcggtcgggagtcaccgcttagcttgtataacgaggaactggtgagcatgaacgtccaaggtgactacgagccaactgatgccaccgggtttattaatataaacagcttgcgtttgaaagagtatcacagactgcagtcgaaggtgactgcaaaa

SEQ ID NO: 283906 - DNA, 1236 bp, Artificial Sequence
  derived and/or modified sequence
atgtcctcaaagggctccgtcgtgcttgcctactccggtggacttgatacctcctgtatcctggtgtggctgaaggaacagggctacgacgtgattgcctacctcgcaaacattggacaaaaggaagattttgaagaagcaaggaagaaagcactcaagctgggggctaagaaggtgttcatagaggatgtgagccgggaattcgtggaagagtttatctggcctgcaatccaatcgtccgcactctatgaggatagatacctccttggtacctcgcttgcacgcccgtgtattgcaagaaaacaggtggaaatcgctcaacgtgaaggggccaagtacgtgtcgcatggagccaccggaaagggtaacgaccaggtccgattcgaactgagctgttacagccttgcaccccagatcaaggtgattgcaccctggaggatgccggaattctataaccggttcaaaggtaggaacgacctgatggaatacgcaaaacaacatggaattccaatcccggtgactccaaagaatccctggagcatggatgaaaatcttatgcacatttcatacgaggcgggaattcttgaaaacccgaagaaccaagcgccaccaggcctttacaccaagactcaagatcccgcaaaggcaccgaacacgccagatattctggagatcgagtttaagaagggcgtccccgtcaaggtgactaacgtcaaggatggtacgacccaccaaacctcgctggagttgttcatgtaccttaacgaggtagctggaaaacatggtgtgggaagaatagacattgtggaaaatcgctttatcggaatgaaaagccgcggcatctacgaaaccccggcagggactatactttatcatgcacatcttgacattgaagcgtttaccatggatagagaagtccggaaaatcaaacagggattgggtcttaagtttgctgaactggtgtacaccggtttctggcatagtccggaatgcgaatttgtgagacattgcatcgcaaaatcccaggagcgcgtcgaaggaaaagtgcaagtgtcagtgctgaagggacaggtgtacatactcgggagagaatcccccctctcactttacaacgaagaacttgtttccatgaacgttcaaggcgactacgagcctactgatgccactgggtttatcaacattaactccctgcgtcttaaggaataccatcgtctgcagtcaaaggtcaccgccaag

SEQ ID NO: 283907 - DNA, 1236 bp, Artificial Sequence
  derived and/or modified sequence
atgtcatccaaaggttcggtggtgcttgcctactcaggtggacttgatacttcctgtattttggtgtggcttaaagaacaaggttacgatgtgatcgcgtaccttgcgaacattggacaaaaagaagattttgaggaggcaaggaaaaaagctctgaaacttggggcaaagaaagtctttatcgaagatgtgagccgtgaattcgtggaagaattcatttggccagcaatccaaagttccgcactttacgaagatcggtacctgctggggacctcactggcacgcccctgtattgcacggaagcaggtggagatagcacaaagagagggtgcgaagtacgttagccatggagcaacgggaaagggcaacgatcaagtgagatttgagctctcatgttactcccttgccccccagatcaaagtgatagcgccctggagaatgcctgaattctacaatcgattcaagggcagaaacgatctgatggaatatgcgaaacaacacgggattcctatccccgttactcctaagaatccttggagcatggatgaaaacctgatgcacatttcatacgaggcagggattctggagaaccccaagaatcaggctccaccaggtctttacactaagacgcaagacccagcaaaggcaccaaacactccagatattcttgaaattgagttcaagaagggtgtgcctgtcaaggtgaccaacgtgaaggacgggactacccatcaaacctcacttgaattgtttatgtaccttaacgaggtggccggaaagcatggtgtgggccgcattgatattgtggagaacagattcatcggaatgaagtcccgaggaatctacgagactccggcaggaactattctttaccatgcgcatctggacatagaagccttcactatggatcgtgaagtgcgcaagattaagcaaggcctcgggctcaaatttgcggaactcgtctacaccgggttttggcattcgcctgagtgtgagtttgtgaggcattgtatcgctaaatcccaggaacgggtggagggtaaggtgcaggtcagcgtcctgaagggtcaggtgtacatcctgggtagggaatcgccactcagtttgtataatgaggaactcgtgtcgatgaacgtccagggcgattacgaacctaccgacgcaacggggttcatcaatatcaatagcctgcgcctcaaagaatatcatcgcctgcaaagcaaggtgacggctaag

SEQ ID NO: 283908 - DNA, 1236 bp, Artificial Sequence
  derived and/or modified sequence
atgtcctcaaaagggagcgtggttctggcatatagcgggggtctggatacttcctgtattcttgtctggctgaaggagcaggggtacgacgtgatcgcatacctcgcaaacattgggcaaaaggaagatttcgaagaagcaaggaagaaggcacttaagctgggtgcaaagaaagtctttatagaggacgtgtcgagggagttcgtggaagaattcatctggccagctattcaatcttctgcgctctatgaggatcgatacctcctcggtacctcccttgccaggccatgtatcgcaaggaaacaggtggaaatcgcacaaagagaaggcgctaagtacgtgtcgcatggcgcgaccgggaagggaaacgatcaggtgagattcgaattgtcctgctacagcctggcgcctcagattaaggtcatcgcaccctggcggatgccagaattctacaaccggtttaaaggaagaaacgatcttatggaatacgcaaagcaacacggaattcctattcccgtcacgccgaagaatccttggtctatggacgaaaatctcatgcatattagctacgaggcaggaatacttgagaatcctaagaatcaagcgcctcccggattgtacactaaaacccaagatcctgccaaggcacctaataccccagatattctggaaattgagtttaagaagggagtgccagtgaaggtcaccaatgtcaaagacggcaccactcatcaaacctcactggaattgtttatgtacttgaatgaggtggccgggaaacatggagtgggacgcattgacatcgtggaaaacaggttcatcgggatgaaatcgcgtgggatctacgaaacccccgccggaactatcctgtaccatgcccatcttgacattgaggcatttacgatggatagagaagtcagaaagattaaacagggattgggccttaagtttgctgaacttgtgtatactggcttctggcactcgccagaatgcgagtttgttcggcactgtattgcaaagtcacaagaaagggtggagggaaaggtccaagtttccgtgttgaagggacaggtgtacatactggggcgcgaatcccctctctccctgtacaacgaggaactggtcagcatgaacgtgcagggtgattacgagccaactgatgcaactgggtttatcaacatcaactcacttcgtcttaaggagtaccatcgccttcaatcgaaggtcactgcgaag

SEQ ID NO: 283909 - DNA, 1236 bp, Artificial Sequence
  derived and/or modified sequence
atgtcctccaaagggagcgttgtgttggcatactctggaggcctggacaccagctgcatcctggtttggttaaaggagcagggttacgatgtgatcgcatatttggctaatatcggacagaaggaggactttgaggaggcgaggaaaaaagcgctgaaattgggggcaaagaaagtttttattgaagacgttagcagagaattcgtggaagagtttatttggccggctattcaaagcagtgcattgtacgaagatagataccttttaggaacgtcactggccaggccatgtatcgcccgtaaacaggtggaaattgctcaacgcgagggggccaagtacgtgagccatggtgcgaccggtaagggcaatgatcaggtgcgatttgaactgtcgtgctatagtctggccccacagataaaagttatcgccccttggcggatgccagaattctacaaccggttcaaaggacggaatgatcttatggagtatgcgaagcagcacggcattcctatcccggtgaccccgaaaaatccctggtccatggatgaaaacctcatgcatattagctatgaggccggaattctcgaaaaccccaaaaaccaggcccccccaggtctctacactaagactcaggacccggcgaaagcccctaacacacctgacatcttggaaattgaattcaagaagggtgtgccagttaaggtcacaaacgttaaggatggcacaacccatcagacgtctctggagctctttatgtatctcaatgaagttgcaggaaagcacggcgtaggaagaattgacatcgtggaaaataggttcatcggcatgaagtctcgcggaatatatgagactccagccggcactattctctaccacgcccacctagacatcgaggctttcacaatggaccgcgaagtccgcaagatcaagcaaggcctgggtctgaagtttgcggaactggtctacaccgggttctggcatagccccgaatgtgagttcgtccgacattgcatcgccaagtcccaggaacgtgtcgagggtaaagtgcaggtctcagttctcaaggggcaggtctacatcctgggccgcgagtccccattatccctgtataatgaggagttggtttctatgaatgtgcagggtgattatgagcctacagatgccaccggtttcatcaacatcaatagcctacgcctcaaagaataccacaggctacagagtaaggtgactgccaaa

SEQ ID NO: 283910 - DNA, 1236 bp, Artificial Sequence
  derived and/or modified sequence
atgagctcaaagggatccgtggtgctcgcctactccgggggcctagacacatcgtgcatcctggtgtggctgaaggagcagggatatgatgtaatcgcttacctggcaaacatcgggcaaaaggaagacttcgaggaagcaagaaagaaagctctgaaactgggcgcaaaaaaggtattcatagaggacgtgtccagggaatttgtggaggaatttatctggcccgctatccagtccagcgcgttgtatgaagatcggtacctattaggcacaagcctcgctagaccctgtatcgcgagaaagcaggtcgagatcgcgcagcgtgagggagccaagtacgttagccacggcgctaccggcaagggtaacgatcaggtaaggttcgaactgtcatgctatagcctggctccccaaattaaggttattgcaccctggcgtatgccagagttttacaaccgcttcaaagggcggaatgatttgatggaatacgccaaacagcacggaatccccattcccgttactcctaagaatccgtggtcaatggatgagaacttgatgcatatatcctatgaggctggaatcttagaaaatcctaagaaccaggctccaccaggactctatacaaagactcaggaccctgccaaggctccaaacacaccagacattctcgagatcgaatttaaaaagggcgtacctgtaaaggtgaccaatgtaaaagacggtactactcatcagacctcactggagctcttcatgtatttgaacgaagtcgcgggcaagcatggcgtcggacgaattgatattgtggagaatagattcattgggatgaagtcacgtggcatctatgaaacacctgccggaactatactgtaccacgcacacctggatattgaggccttcaccatggatcgggaagtaagaaagatcaagcagggtttgggcctcaagttcgcagaactggtttacactggattttggcactcaccagagtgcgagtttgtacggcattgcattgccaagagccaggagcgtgtggagggtaaagtgcaggtgtccgtcctaaaggggcaggtttatattcttggcagggagtccccattgtcactgtacaatgaggagctcgtctccatgaatgttcagggagactacgagccgacggatgccacaggattcattaacattaacagcctgcggctgaaggaatatcaccgccttcagagtaaagtcacagccaaa

SEQ ID NO: 283911 - DNA, 1236 bp, Artificial Sequence
  derived and/or modified sequence
atgtcatccaaaggttcagtggtgctggcgtactccggaggactggacacctcgtgcatcctggtgtggctgaaggagcagggatacgatgtgatcgcatacttggcgaacatcggacagaaggaagatttcgaagaagcccggaagaaggcactgaagctgggcgccaaaaaagtctttatcgaggacgtgtcccgggaattcgtggaggaattcatttggcccgcgatccaatcaagcgcactgtatgaagatcgctacctcttgggaacctccctcgcgcgcccctgcatcgcacggaaacaggtggaaatcgcccagagggaaggggcgaagtacgtcagccatggcgcaaccggcaaaggaaatgatcaggtgcgcttcgagctgtcgtgctactcactggctccgcagatcaaagtgattgccccttggcggatgccggagttctacaatcgcttcaaggggcgcaatgatcttatggaatacgctaagcagcatggcatcccgatcccggtgaccccgaaaaacccatggtccatggacgagaatctcatgcatatttcctacgaggctggcattctggagaaccccaagaaccaagcgcctccgggcctgtacaccaagactcaagaccctgctaaggccccaaacaccccggacatcctggaaattgagttcaaaaagggcgttccggtgaaggttactaacgtgaaggacgggactacccatcagaccagccttgagcttttcatgtacctgaatgaggtcgcgggcaagcacggggtcggacggattgacatcgtggagaacaggtttatcggcatgaagagccggggtatctacgaaacccctgccgggactatcctgtaccacgcccacctggacatcgaggcctttactatggacagggaggtgagaaagattaagcagggactcggactgaaattcgcagagctcgtgtacacggggttctggcattcgcctgagtgtgaattcgtcaggcattgcatcgcaaagagccaagaaagggtggaaggaaaagtgcaggtttccgtgttgaagggacaagtgtacatcctcgggcgcgagtccccactctcactttacaatgaagagctcgtctcgatgaacgtccaaggagactacgaaccgaccgatgctactggattcatcaatatcaattcactgaggttgaaagaatatcaccgcctgcaatccaaggtgaccgctaaa

SEQ ID NO: 283912 - DNA, 1236 bp, Artificial Sequence
  derived and/or modified sequence
atgtccagcaaaggatcggtagtactggcctatagcggagggctggacacctcttgcatcctggtttggttgaaggaacagggttacgatgtgatagcctatctggcgaatataggccagaaggaagattttgaggaagcacgaaagaaagcccttaaactaggtgccaaaaaagtcttcatcgaagatgtatcccgcgagtttgtcgaggagttcatttggcctgcaatacagtcttccgctctgtacgaggaccggtatttgttgggtacctccctagcacgaccttgcatagcccggaagcaagtggagatagcacagcgggaaggcgccaagtatgtgagccatggagccacaggcaaaggtaatgatcaggttagatttgagctatcttgctattcgctggcccctcagatcaaagtaattgcaccctggcgcatgcctgagttctacaatcgcttcaagggacggaacgacctgatggagtacgctaagcagcacggcattcccatccccgtaactcctaagaatccttggagtatggatgagaacctgatgcatatcagctatgaggccgggatcttagagaacccgaagaatcaggccccgcccggcttatacacgaagacccaagatcctgccaaggcgcccaacacccctgacattctcgagatcgagtttaagaaaggagtgccagtaaaggtgaccaacgtcaaagacgggacaacccaccagacctctcttgagctttttatgtacctgaacgaagttgctggaaagcacggagtgggacggatcgatatcgtagagaatcgtttcataggtatgaaatctcggggaatttatgagacccccgccgggactattctgtaccatgcacacttggacattgaggcatttacaatggatagagaggtacgcaagatcaagcaagggttgggattgaaatttgccgagctggtgtacacgggtttttggcactcccctgaatgtgaattcgtgaggcattgtatcgcgaaatcccaggagcgcgtcgaagggaaagtccaagtgagcgtgctcaaaggacaagtctacatactgggacgagagtcacctctgtcgttgtataatgaggaattggtcagcatgaatgtacaaggcgactacgaacctaccgatgccaccgggttcatcaacattaattctctccgactgaaggagtatcatcgcctgcagtctaaggttaccgccaaa

SEQ ID NO: 283913 - DNA, 1236 bp, Artificial Sequence
  derived and/or modified sequence
atgtcaagcaaagggagcgtcgtgctggcttatagcggggggttagatacctcctgtatcctggtctggttgaaagagcagggctatgacgttattgcctacttggctaacattggccagaaggaggacttcgaggaagccagaaaaaaggcgctcaagcttggagctaagaaagtctttatcgaagatgtgtctcgcgagttcgtggaggaattcatttggccagcaatccagtctagcgcactgtacgaggacaggtacctcttgggtaccagccttgcacggccgtgcatagctcggaagcaggtggagatcgctcaaagggagggtgcaaaatacgtgtctcacggagccactggcaagggcaacgatcaggtacgcttcgagctgtcgtgttattctttagcccctcagattaaggttattgcaccatggaggatgcctgagttttacaacaggttcaagggcaggaacgatttaatggaatatgcaaaacagcacggcatcccaattcccgtgacccccaagaatccatggtccatggacgagaatttgatgcacatcagctacgaggcaggaattttggagaatcccaagaaccaagccccccctgggctatacacaaaaactcaggatcctgccaaggcacccaacacacctgacattctggagatagagttcaagaagggcgtgcctgttaaggtgaccaacgtgaaagatgggacaacacaccagactagtctggaactgttcatgtaccttaatgaggttgccggcaagcatggggttggaagaatcgacatcgtagagaaccggtttattggaatgaagtcacgcggcatctacgagactcccgcgggaacaatactgtaccacgcacacctggacatcgaagcctttaccatggaccgcgaggtcagaaaaataaaacagggcctgggcttgaaattcgctgagcttgtgtatacaggtttctggcacagtccagaatgcgagtttgttcgacactgtatcgcaaaatcccaggagcgcgtggaaggcaaagtgcaagtgagtgtacttaaagggcaggtttatatcctagggagggagtcgccactttccctgtacaacgaggagctggtatcgatgaacgttcagggggactacgagccaaccgatgctaccggatttatcaacattaacagtttaaggcttaaggagtaccataggctgcagtctaaggtgacagcaaag

SEQ ID NO: 283914 - DNA, 1236 bp, Artificial Sequence
  derived and/or modified sequence
atgtcatctaagggaagcgtggtacttgcctactccggcgggttggacactagttgtattctcgtatggctcaaggagcagggttacgacgtcatcgcttacttagctaatatcggccagaaagaggatttcgaagaagcccgtaagaaagcactgaagcttggtgccaaaaaggtcttcatcgaggatgtgagtcgagaattcgtcgaggagtttatatggcccgccatccagtccagcgcgctgtacgaagatagatacctcttgggcacaagtctagccaggccttgcattgccaggaagcaggtagaaatagcccagcgggagggggccaagtacgtatcacacggagcaaccggtaagggtaatgatcaggtgcggttcgaactgagttgttactctttagctccccagatcaaagtgatcgctccttggagaatgcctgagttttacaatcggtttaaaggacgcaacgatcttatggagtatgccaagcagcacggaatccctatccccgttacacctaaaaatccatggagtatggatgagaatctgatgcatatatcttacgaagctggcatattggagaaccctaagaatcaggcaccacctgggctctacacaaagactcaggatccagctaaggcccccaacacacctgacattctggagatcgaattcaagaaaggcgtgcctgtgaaagtcactaatgtgaaagacggtaccacccatcagacctcacttgagctattcatgtacctcaatgaggtggctgggaaacatggagttggaaggatcgatattgtggagaacagatttattggaatgaagtctcggggaatttacgaaacgcctgcagggactattctgtatcatgcccatcttgatattgaagccttcaccatggaccgggaggtaaggaagataaagcaggggttgggacttaagttcgccgaactcgtgtacactggattttggcattcacctgagtgcgagttcgtgcgacattgcatcgccaagtcccaggaacgagtggagggtaaagttcaggtgtcagtcctcaaaggacaggtgtacatccttgggagggagtcccccctgagcttatacaatgaggagctcgtgtctatgaacgtgcagggagattatgaacctactgacgcaaccggattcattaacatcaacagtctgcgattgaaggagtaccaccgtctgcagagtaaagttacagccaag

SEQ ID NO: 283915 - DNA, 1236 bp, Artificial Sequence
  derived and/or modified sequence
atgagcagcaaaggatcggtggtgctcgcgtactcgggcggcctggatacttcctgtattctggtgtggctcaaggaacaaggctacgatgtaatcgcctatctcgctaacatcggccaaaaggaggacttcgaggaagcccgaaagaaggccctcaagctgggtgcgaagaaagtgttcatcgaggacgtctcccgcgaattcgtggaagaattcatttggccagcgatccagagctctgcgctgtacgaagatcggtaccttctcggaacctccctcgctagaccatgcatcgctaggaaacaagtcgaaatcgctcagcgcgagggagctaagtacgtgtcgcacggagcaaccggaaagggaaacgatcaggtccggttcgagctgtcctgctactcgctcgccccacagatcaaagtgatcgcgccgtggaggatgccagaattctacaatcggtttaaggggagaaacgaccttatggaatacgccaaacagcatggaatcccgatcccggtgacccctaagaacccgtggtccatggacgagaacctgatgcacatctcctacgaggcgggaatcctcgaaaatccaaagaatcaggcccctccgggattgtacactaagacccaggacccggccaaggctcctaacaccccagatatcctggaaatcgaattcaagaagggtgtgccggtcaaagttaccaatgtgaaggacggaaccactcaccagacttcactcgaattgttcatgtacctgaacgaagtggcagggaagcatggagtgggcagaatcgacatcgtggagaataggtttatcggaatgaagtccaggggtatctacgaaaccccagccggaacgatcctctaccatgcgcacctcgacatcgaagcgttcaccatggaccgcgaggtcaggaagattaaacagggattgggactgaaatttgcggaacttgtgtacactggattttggcattcgcctgaatgtgagttcgtgcggcattgcattgccaagagccaagagcgggtggagggcaaggtccaggtgtcagtgctgaaagggcaagtgtacattctcgggcgtgaatccccactcagtctgtacaacgaagagctggtgtccatgaacgtgcaaggagactacgaaccaaccgatgctactggtttcatcaacatcaactccctgcggctgaaggaataccatcggctgcagtctaaagtcaccgcaaag

SEQ ID NO: 283916 - DNA, 1236 bp, Artificial Sequence
  derived and/or modified sequence
atgagctcgaagggcagcgtcgtcctggcttactcaggtggactggatacttcatgtatcttggtttggctcaaggagcagggctacgatgtgatcgcgtacctcgccaacatcggccagaaggaagatttcgaagaggcacgcaagaaagccctgaaactgggagctaaaaaggtgttcatcgaggacgtgtcgcgggaattcgtggaagagttcatttggccggcgatccaatcctcagcactgtacgaggaccgctacctccttggtacctccctcgccagaccctgcatagctcgcaagcaggtcgaaatagcccagcgggaaggcgcgaagtatgtgtcccatggcgctaccggaaaagggaacgaccaggtacgctttgagctgtcctgttactccctggcaccccaaatcaaggtgatcgccccttggcggatgcctgagttctataaccggttcaagggtcgaaacgatctgatggaatacgctaagcaacacggtattccgattcctgtcaccccgaagaacccttggtctatggatgagaatctgatgcacatctcctacgaggcggggattcttgagaaccccaagaaccaggccccaccaggtctttatactaaaacccaagacccggccaaggcccctaataccccggacatcttggaaatcgagtttaagaagggcgtgccggtgaaagtgactaacgtcaaggacggaactacccatcaaactagtctcgaacttttcatgtacctgaatgaggttgccggcaagcacggggtgggacggatcgacatcgtggaaaacaggtttattggtatgaaaagcaggggaatctacgaaacgccggcaggaactatcctctaccacgctcacctggacatcgaggccttcactatggatcgcgaggtgagaaagatcaagcaaggccttgggttgaagttcgccgaacttgtatacaccggattttggcattctccagaatgcgaattcgtgagacattgtatcgcgaagagccaggagcgagtggaaggaaaagtccaagtttcggtcctgaaaggtcaggtctacattcttggaagggagtcaccgctgagcctctacaacgaagagctggtgtcgatgaatgtgcagggagactacgagccaaccgacgcgactggattcatcaatatcaattcgttgcgcctcaaggaataccaccgccttcagtccaaggtcacggcgaaa

SEQ ID NO: 283917 - DNA, 1236 bp, Artificial Sequence
  derived and/or modified sequence
atgtcgagtaagggttcggtggtcctggcatactcggggggattggatacttcgtgtattctggtgtggctcaaggaacaggggtacgatgtgattgcctaccttgctaacattgggcagaaagaggactttgaagaagcgagaaagaaggctcttaagctcggagcaaagaaggtctttattgaggatgtgtcaagggaatttgtagaagagttcatctggcccgcaatccagtcgtccgcactgtacgaggatcgctacctcctcggtaccagccttgcgcggccttgtatcgcccggaaacaagttgaaattgcgcaacgagagggagcaaagtacgtcagccacggagcaaccggaaaaggaaacgaccaagtgcgatttgaactttcatgttacagtctggcccctcagattaaagtgatcgccccgtggcgcatgcctgaattctataacagatttaagggaagaaacgatttgatggaatacgcaaaacagcatggaattccaattcctgtcactccgaagaacccgtggtccatggacgaaaatctgatgcatatctcctacgaggccggaatcctggaaaatccaaaaaaccaagcacccccaggcctttacaccaagacccaagatccagctaaggcccccaatactccagatatcctggagatagagtttaagaagggagtcccagtaaaggtgaccaatgttaaagacggcacgactcatcagaccagcctcgagcttttcatgtatctgaatgaagtggcgggaaaacatggagtaggtcgcatcgatattgtcgaaaaccgttttatcggcatgaagagcaggggtatatacgagacgccagcaggtaccatcctgtaccacgcacaccttgatatcgaagcatttactatggatcgggaagtccgcaaaatcaagcagggtctgggcttgaaattcgcagagcttgtgtatactggcttctggcattcacctgagtgcgaattcgtgagacattgcattgcaaagtcccaagaacgcgtggaaggtaaagtgcaagtgtcagtgctcaaggggcaagtctacatacttggcagagagtcccctttgtcgctgtacaacgaagagctcgtctcaatgaatgtgcaaggagattacgaaccaacggacgcaactgggtttatcaacattaactccctcaggctcaaggaataccacaggctccaatcgaaagtcactgccaag

SEQ ID NO: 283918 - DNA, 1236 bp, Artificial Sequence
  derived and/or modified sequence
atgtcgtctaaaggaagcgttgtgctggcctattcagggggcctagacacttcatgcatcctggtttggctcaaagaacagggatatgatgtgattgcctatttggctaacatcggacagaaagaggacttcgaagaagcccgcaaaaaggcgctaaagctgggcgccaagaaagtgtttattgaggatgtctcaagggagtttgtcgaagagtttatatggccagctatacaatccagcgccctatacgaggatcggtacctgctgggcacaagccttgctcggccttgtattgcgaggaagcaagttgaaatcgcacagcgggaaggagcaaaatacgtaagccacggcgctaccggcaagggcaacgaccaagtgagattcgagctatcgtgttactccctcgccccacagatcaaggtgatcgcaccttggagaatgcccgaattctataacaggtttaagggcagaaatgatctcatggaatacgccaagcagcatggtattcccatcccagtgacaccaaaaaacccctggagtatggacgaaaatttaatgcacatctcttacgaggcaggcatcttagagaatcctaagaaccaagcccctccaggcttgtacaccaagacgcaagatccagccaaggcacccaatactccagacatactggagatcgagttcaagaaaggggttcccgtcaaagttactaatgttaaagacggcacaacccatcagacttctctggagctgttcatgtacttaaatgaagttgctggcaaacacggcgtgggcagaatcgatatcgtggagaataggttcatcggcatgaaatctcgaggaatctacgagactcctgccggaacgatcctttaccacgcccatcttgacatcgaggcctttacaatggaccgcgaagtccgtaagatcaagcaaggcttggggttgaaatttgcggaactggtctataccggtttttggcactcacccgagtgtgaattcgtccgacattgtatagccaagagccaggagagggtcgaggggaaggtccaggtgtctgtgctgaagggacaggtctatatcctgggacgcgagtcccccctctctctttacaacgaggagctggtgagcatgaacgtccagggtgactatgagcccacagatgccacagggtttattaacattaactctctgcggctaaaagaatatcacagactacagtccaaggttactgccaag

SEQ ID NO: 283919 - DNA, 1236 bp, Artificial Sequence
  derived and/or modified sequence
atgtcgtcgaagggatcggtggtgctggcatacagcggaggacttgatactagctgtattctggtgtggctgaaagagcaaggctacgacgtgatcgcgtacctcgcaaacatcgggcagaaggaagattttgaagaagcgagaaagaaggctctcaagctgggtgcgaaaaaagtgttcatcgaggatgtctcccgcgaatttgtcgaggaattcatctggccagccatccagtcgtcggccctgtatgaggaccgctacctcctcggtacctccctggctcgcccgtgcattgcccggaaacaagttgaaatagcccagcgagaaggagcgaagtatgtcagccatggtgccacgggaaaaggtaacgaccaggtccgcttcgagctgagctgctacagcttggctccacaaatcaaggttatcgcgccctggcggatgccagagttctacaaccggttcaagggtcgcaatgaccttatggagtacgcgaagcagcatggaatcccaatcccagtgaccccgaaaaacccatggtccatggatgaaaatctcatgcacatcagttacgaggccggaatcctggagaacccgaagaatcaagctcctccgggactgtacactaaaactcaggacccggccaaagcgccgaataccccagacattttggagatcgaatttaagaagggcgtgcctgtgaaggtcaccaacgtgaaagacgggaccacgcaccagacctcactggagctgttcatgtacttgaacgaggtggccgggaagcatggtgtgggacgtatcgatatcgttgaaaatagattcattggaatgaagtcgcggggaatctatgagactccggctggtacgattctgtaccacgcccatctggacatcgaagcctttactatggacagggaagttcggaagataaagcaaggattgggactgaaattcgcggagctggtttacactgggttctggcacagccctgagtgtgaattcgttcgacactgcattgcgaaatcacaggagagagtggaaggcaaggtgcaggtcagcgtactgaaaggccaagtgtacatcctggggagagaatcaccgctctctctgtacaacgaagaactcgtgtccatgaacgtccagggggattacgaaccgaccgatgccaccggcttcatcaacatcaactccctgcgtctcaaggaataccacagacttcagtccaaagtcaccgccaaa

SEQ ID NO: 283920 - DNA, 1236 bp, Artificial Sequence
  derived and/or modified sequence
atgagttccaaaggcagtgtcgtgctcgcttattcagggggacttgacacctcgtgcattctcgtgtggctgaaggaacaggggtatgacgtgattgcctatctggcaaacattggccagaaggaggacttcgaagaggccagaaaaaaagcgctaaaactgggggcgaagaaagtgtttatcgaggatgtgtccagagagtttgtagaagagtttatttggcctgccatacagagtagcgccctgtacgaggatcgctatttactgggaacgtctctggccagaccatgtatcgcacgcaagcaagtggagatcgctcagcgtgagggcgccaaatatgtgagtcacggggcaactggtaaggggaacgatcaggtccgctttgaactcagttgttattcacttgcacctcaaatcaaagtcatcgccccctggcggatgccagaattctataatcgcttcaaagggcggaacgacctgatggagtatgcaaagcaacacggaatccccattccagtaactcctaaaaatccctggtctatggacgagaaccttatgcacatatcctatgaggctggcattctcgaaaatccaaaaaaccaggccccccctggcctctatacgaaaacccaggatcctgccaaggcacctaatactccagacattttggagattgaattcaaaaagggtgtgcctgtcaaggtgactaacgtcaaagacgggacaactcaccagacttccctcgaactctttatgtacctgaatgaagtggctggaaagcacggggtcggtcgcatcgatatagtggagaatagattcatcggcatgaaatcgcgcggtatatatgagacgccagcaggtaccattctgtatcatgcacacttggatatcgaggcctttactatggatagagaggtccgcaagataaagcaagggctgggcctgaagtttgccgaacttgtttacactggcttttggcacagccccgaatgtgagtttgtgcgacattgcatcgcaaagtcccaggagagagtcgaaggcaaagtgcaggtctctgtgctgaagggccaggtatacatcttgggcagagaaagtcccctcagtctttacaatgaggaactcgtttcaatgaacgttcagggggattacgagccaactgatgccactggctttatcaatataaattctttgcgtctgaaagagtaccataggcttcaatcgaaagttactgcaaag

SEQ ID NO: 283921 - RNA, 1382 nt, Artificial Sequence
  derived and/or modified sequence
gggaaauaagagagaaaagaagaguaagaagaaauauaagagccaccauguccucgaagggaagcguagucuuggcguauuccggaggccuugacacuucauguauucuggucuggcucaaggagcagggguacgacgucaucgccuaucuggcuaacaucggacaaaaggaagauuucgaggaagcgcgcaagaaggcgcugaaacucggagccaaaaagguauucaucgaagaugugucgcgggaguuugucgaagaguuuaucuggccugcgauucagucgucagcacuuuaugaggacagauaccuccuuggaacuucacuggcccgaccgugcaucgcgcgcaaacagguagagaucgcacagagggagggggcgaaauaugucucgcauggugcaacugggaaagguaaugaucaggugcgguucgaacucuccugcuacucguuggcaccccagaucaaagugaucgcuccguggaggaugcccgaguuuuacaaccgauucaagggaagaaacgaucugauggaguaugcgaagcagcauggaaucccgauccccgugacgccgaagaaucccuggagcauggacgagaaucuuaugcacauuucauacgaggccgggaucuuggaaaauccgaaaaaccaggcgccuccgggguuguacaccaaaacacaagacccagccaaagcgcccaacacccccgauauucuugaaauugaguuuaagaaaggggugcccgucaaggugacgaaugucaaggacggcacgacccaccaaacaucguuggaacuguuuauguacuugaaugaggucgcgggaaaacacgguguggggagaauugacauuguggaaaaucgguuuaucgggaugaagagccggggaaucuacgaaacaccagcgggaacgauucuguaccaugcccaccucgauauugaagcguuuacaauggacagggaagugagaaagauuaaacaggggcuugguuugaaauucgcagagcugguauauacgggcuucuggcauagcccugaaugugaguucguacgccacugcaucgcaaagagccaggaaagaguggagggaaaggugcaagucuccgugcucaagggucaggucuacauccucgguagggagucgccucuuucacucuacaacgaggaguugguaucgaugaacgugcagggagacuaugaacccaccgaugccacaggguucaucaacaucaacuccuugcgccucaaggaguaucaccggcuucagucgaaaguaacggcuaagugauaagcugccuucugcggggcuugccuucuggccaugcccuucuucucucccuugcaccuguaccucuuggucuuugaauaaagccugaguaggaag

SEQ ID NO: 283922 - protein, 778 aa, Artificial Sequence
  derived and/or modified sequence
MAPDLASQRHSESFPSVNSRPNVILPGREGRREGLPPGGGTRGSLVPTRPVPPSPAPLGTSPYSWSRSGPGRGGGAGSSRVPRGVPGPAVCAPGSLLHHASPTQTMAAADGSLFDNPRTFSRRPPAQASRQAKATKRKYQASSEAPPAKRRNETSFLPAKKTSVKETQRTFKGNAQKMFSPKKHSVSTSDRNQEERQCIKTSSLFKNNPDIPELHRPVVKQVQEKVFTSAAFHELGLHPHLISTINTVLKMSSMTSVQKQSIPVLLEGRDALVRSQTGSGKTLAYCIPVVQSLQAMESKIQRSDGPYALVLVPTRELALQSFDTVQKLLKPFTWIVPGVLMGGEKRKSEKARLRKGINILISTPGRLVDHIKSTKNIHFSRLRWLVFDEADRILDLGFEKDITVILNAVNAECQKRQNVLLSATLTEGVTRLADISLHDPVSISVLDKSHDQLNPKDKAVQEVCPPPAGDKLDSFAIPESLKQHVTVVPSKLRLVCLAAFILQKCKFEEDQKMVVFFSSCELVEFHYSLFLQTLLSSSGAPASGQLPSASMRLKFLRLHGGMEQEERTAVFQEFSHSRRGVLLCTDVAARGLDLPQVTWIVQNTSTGLEEPPGLAAMGAACSFWLLRRQNMSTRWLLTKSTLQSFIQAYATYPRELKHIFHVRSLHLGHVAKSFGLRDAPRNLSALTRKKRKAHVKRPDLHKKTQSKHSLAEILRSEYSSGMEADIAKVKKQNAPGEPGGRPLQHSLQPTPCFGRGKTLKWRKTQKGVQRDSKTSQKV

SEQ ID NO: 283923 - DNA, 2337 bp, Artificial Sequence
  derived and/or modified sequence
atggcgccagacctggcctcccaacgacacagtgagagtttcccgtcagtcaactcgcgaccgaacgtgattcttcccggccgggaggggagaagagagggacttccaccaggaggcggaaccagaggctctctggttcctacaaggccagtacctcctagtccagcaccactgggaacttccccgtactcttggtctcgaagcgggccagggcgcggaggtggtgccgggtccagtcgtgttcctaggggggtccccggaccagccgtctgcgcgcccggaagtctgctgcaccatgcatcccccacacagacaatggccgccgctgacgggagcctcttcgataacccgaggacattttccaggagacctccagcccaggcttcgagacaagcgaaggcaacgaagcgtaaatatcaggcttctagtgaggctcctcccgctaagcgccgcaacgaaactagcttcctcccggctaaaaagacgagtgtgaaggaaacccagcgaacttttaagggtaacgcacagaaaatgttcagccccaagaaacactctgtctcaacaagtgatcggaatcaggaagaacgccagtgcattaagacgagcagcttgttcaaaaacaaccctgatattcctgagctgcaccgtccagtagtaaaacaggtccaggagaaagtctttacatcagcagcattccacgagctcggcctgcatcctcatcttataagcaccatcaacacagtcctcaagatgtcaagcatgaccagtgtgcaaaaacaatcaatcccagtgctattggaggggagagacgccctggtccggtctcagaccgggagcggaaaaaccctggcttactgcattcccgtggttcagagcctccaggccatggaatcaaaaatacagaggagtgacggcccctacgccctcgtactcgtaccaacgcgggagctggcactacaatctttcgacacagtccaaaagctgctcaagccattcacctggattgtgcccggcgtgttaatggggggcgagaagaggaaatcagaaaaggccaggctgcgcaagggcattaatatattgatatctaccccgggaagactggtggaccacattaagagtactaagaatatccatttttcacgcctgagatggttggttttcgacgaagccgacagaatactcgatttgggattcgagaaagatattacagtgatccttaatgccgtcaatgccgagtgccagaagcgccagaatgtattgctaagcgccactctcaccgagggcgttacacgtctcgcggatatctctcttcatgaccccgttagcatcagcgtactggataaatcccacgatcagttgaaccccaaagataaggccgtccaggaggtgtgccctcctcccgccggcgacaagttggatagctttgccattcctgaaagtcttaaacagcacgtcacagttgtgccatccaaactgcgcttagtgtgcttggctgcattcattcttcagaagtgcaaatttgaagaagatcagaaaatggtggtgttctttagcagctgcgaactggttgagtttcactatagtctttttttacagaccctactttctagtagtggggctccagctagcggtcagctcccttcagcctctatgagactgaagtttcttcggctgcacgggggtatggaacaagaggagcgaacggccgtgttccaggaattttcccattctcgcaggggcgtgctgttatgtactgatgtggccgctcgaggtctcgacctcccccaggttacttggatcgtacagaacaccagtactgggttagaggagccaccaggactggccgctatgggggcagcatgctcattttggctgctccggcgacaaaacatgagtacacgctggctgctcacaaagtcaaccctccagtcatttatccaggcctacgccacatatcccagggaactgaagcacattttccatgtcaggtcactccatctgggccacgtcgcaaaaagctttggccttcgcgatgcgcctagaaatctttctgcgcttactagaaaaaagagaaaggcacatgtcaagcggcccgacctacacaaaaagacccagagcaaacatagtctcgctgagatcctgagatcagagtacagttcagggatggaggctgacattgccaaggttaaaaaacagaatgcacccggtgagcccggcggaagacccctgcagcactccctgcagcccaccccatgttttggcagagggaagacgctgaaatggcgaaagactcagaagggagttcagcgagactctaagacttctcagaaggtatag

SEQ ID NO: 283924 - DNA, 2337 bp, Artificial Sequence
  derived and/or modified sequence
atggccccagacctggccagccagaggcacagcgagagcttccccagcgtgaacagccggcccaacgtcatcctgcccggccgggagggcagaagagagggcctgcccccaggcggcggcacccggggcagcctggtgcccaccaggcctgtgccccccagccctgcccccctgggcaccagcccctacagctggagccgcagcggccctggccggggcggcggggccggcagcagccgggtgccccggggcgtgcccggccctgctgtgtgtgcccctggcagcctgctgcaccacgccagccccacccagaccatggctgctgctgatggcagcctgtttgacaaccccaggaccttcagccggcggcccccagcccaggccagccggcaggccaaggccaccaagaggaagtaccaggccagcagcgaggcccccccagccaagagaagaaatgagaccagcttcctgcctgccaagaagacctctgtgaaggagacccagaggaccttcaagggaaatgcccagaagatgttcagccccaagaagcacagcgtgtccaccagtgacaggaaccaggaggagcggcagtgcatcaagaccagcagcctcttcaagaacaacccagacatccctgagctgcacaggcctgtggtgaagcaggtgcaggagaaggtgttcaccagcgctgccttccacgagctgggcctgcacccccacctgatcagcaccatcaacacagtgctgaagatgagctccatgacctctgtgcagaagcagagcatccctgtgctgctggagggcagagatgccctggtgcgcagccagacaggcagcggcaagaccctggcctactgcatccctgtggtgcagagcctgcaggccatggagagcaagatccagaggagtgatggcccctatgccctggtgctggtgcccacccgggagctggccctgcagagctttgacacagtgcagaagctgctgaagcccttcacctggatcgtgcctggggtgctgatgggcggggagaagaggaagtctgagaaggcccggctgaggaagggcatcaacatcctgatcagcaccccaggccgcctggtggaccacatcaagagcaccaagaacatccacttcagccggctgcgctggctggtgtttgatgaggccgaccgcatcctggacctgggctttgagaaggacatcaccgtcatcctgaatgctgtgaatgctgagtgccagaagaggcagaatgtgctgctgagcgccaccctgacagagggcgtgacccggctggccgacatcagcctgcatgaccctgtgtccatctctgtgctggacaagagccatgaccagctgaaccccaaggacaaggctgtgcaggaggtgtgccccccacctgctggggacaagctggacagctttgccatccctgagagcctgaagcagcacgtgacagtggtgcccagcaagctgcggctggtgtgcctggccgccttcatcctgcagaagtgcaagtttgaggaggaccagaagatggtggtgttcttcagcagctgtgagctggtggagttccactacagcctcttcctgcagaccctgctgagcagcagcggggccccagccagcggccagctgcccagcgcctccatgaggctgaagttcctgcggctgcatggaggcatggagcaggaggagaggacagctgtgttccaggagttcagccacagccggcggggcgtgctgctgtgcacagatgtggccgcccggggcctggacctgccccaggtgacctggatcgtgcagaacaccagcacaggcctggaggagcccccaggcctggccgccatgggcgccgcctgcagcttctggctgctgcggcggcagaacatgagcacccgctggctgctgaccaagagcaccctgcagagcttcatccaggcctatgccacctacccccgggagctgaagcacatcttccacgtgcgcagcctgcacctgggccacgtggccaagagctttggcctgagagatgcccccaggaacctgagcgccctgaccaggaagaagaggaaggcccacgtgaagaggccagacctgcacaagaagacccagagcaagcacagcctggccgagatcctgcggtctgagtacagcagcggcatggaggccgacatcgccaaggtgaagaagcagaatgcccctggagagcccggcggccggcccctgcagcacagcctgcagcccaccccctgcttcggccggggcaagaccctgaagtggaggaagacccagaagggcgtgcagagggacagcaagaccagccagaaggtgtag

SEQ ID NO: 283925 - DNA, 2337 bp, Artificial Sequence
  derived and/or modified sequence
atggcccccgacctggccagccagcggcacagcgagagcttcccctctgtcaacagcaggcctaatgtgattctgccgggtagagaaggaaggagagaagggctgcccccagggggtgggactaggggaagtttggttcccacgagaccagtcccaccaagcccagcccctctgggcacgtccccttactcatggtctcgcagcgggcctggaaggggcggcggcgccggttcaagcagggtgccccgtggcgtgccaggccccgcagtgtgtgcgcctggttccctgctccaccatgcttcccctacccagacgatggctgcagcagacggatcactgttcgataatcctcggacattttctcgtcgtcctcctgcacaggccagtcggcaggcaaaggccaccaagcggaagtaccaagcctcctccgaggccccacccgctaagcggagaaacgagacaagttttctaccagccaaaaagacttcagttaaggaaacgcagaggacctttaaaggtaacgcccagaaaatgttctccccaaaaaaacattctgtgagcacctctgatcggaaccaggaagaaagacagtgtatcaaaacatcatcactttttaagaacaaccccgacatcccggagttgcaccgccccgttgtaaagcaggttcaggaaaaggtattcacgtcggccgcgtttcatgagctgggcctgcacccacatttgatttcaaccattaacacagtcctgaaaatgtcatctatgactagcgtccaaaagcaatcaatcccagttctactggagggacgcgacgcactggtgcggtcacagactggtagtggcaaaactctagcctattgtatccccgtggttcaatccctacaagccatggagtctaaaatccagcgcagcgacggtccttatgcactcgttttggttccaacacgggaactggcactgcaatccttcgatacggtgcaaaaactgctcaaaccatttacttggatagtcccaggtgtactgatggggggtgaaaaacgaaaatcagagaaggcgcgtctgcggaaaggtatcaatatcctaataagcacgcctggccgattggtggaccacattaaatccactaaaaacattcacttcagccgcctgcggtggctggtgtttgacgaggcagatagaatcctggatctgggcttcgagaaggacatcactgtgatccttaatgccgtaaatgcagagtgtcaaaaacgccagaacgtcctgctgagcgcgacattgacggagggggtcacgcgcttggcagacatttcactgcatgaccctgtgtcaatttcagtgctggacaagtcacacgatcaacttaatcctaaggacaaggccgttcaggaagtatgcccgccccctgctggcgacaagctcgatagcttcgcgatccccgagtctctgaagcagcatgtgactgttgttccatccaaactgaggttggtatgcctcgccgcgtttatactgcaaaaatgtaaatttgaggaagatcagaaaatggtggtttttttcagctcttgtgaactcgtcgaatttcactattccctgtttctgcagacgctgctgagctcatccggggcacctgcctcaggccaactcccgtccgcctcaatgcggcttaagttcctccgcctccatggaggtatggagcaggaggagcgcacggccgtatttcaggaattcagccattcccgccgcggtgtgctgctgtgcaccgatgtcgccgcccgcggtctggacctgcctcaagtgacctggatcgtgcaaaatacttccactggcctagaggagcctcccggcctcgccgccatgggcgctgcatgctctttctggttgctgcgccggcagaatatgtcaacgagatggctgttgactaagtcaactctacagtctttcattcaggcgtacgcgacctatccaagagagctcaaacacatatttcacgtccggtctttgcatcttgggcacgttgccaagtctttcggccttagagacgcaccccgtaatctgagtgccctaaccagaaagaagagaaaggcccatgtaaagcggcctgacctgcataagaagacgcaaagcaagcatagcttggccgagatcctcagatctgagtatagcagtggaatggaggcggatattgcgaaagtcaagaaacagaatgcccctggcgagcctgggggcaggccactccagcatagcctgcagccgactccatgctttggacgaggaaaaactctgaaatggcggaaaactcagaaaggtgttcagagagacagcaagacgtcccagaaagtgtag

SEQ ID NO: 283926 - DNA, 2337 bp, Artificial Sequence
  derived and/or modified sequence
atggcgccagacctcgctagccagaggcatagcgagagcttcccttccgtgaattctaggcccaatgtaatcctacctggaagagagggtaggcgggaagggctgccacctggcggtggtaccagaggcagtctcgtgcctactcggcctgtcccaccaagcccagctcctctgggaacatcgccttattcctggagcaggagtggaccaggacgcggaggaggcgctggttcatccagagtccccaggggggtgcccggaccagctgtctgcgctcctgggtcgctcctccaccacgcaagtcccacccagaccatggccgctgcagacggaagtctgttcgacaaccccagaaccttctctagaaggcctcctgcccaggcctcccggcaggctaaggccacaaaaaggaagtaccaagcctcctccgaagcgccacctgccaagcgcaggaatgagacaagttttctgcctgctaagaaaacgtcagtgaaggagactcagcgaacttttaaaggaaacgcacaaaaaatgttttcgcccaaaaagcacagcgtgtcgacttcagacagaaaccaggaggaacgacagtgtattaaaacctccagtctgttcaaaaataaccctgacatccctgagctgcaccgcccagtcgtgaagcaggttcaggaaaaagtgtttactagtgctgcgtttcacgagctcgggcttcaccctcacctgataagcaccataaacaccgtgctcaaaatgtccagcatgacaagcgtccagaagcagtctatacccgttctcctggaaggccgtgacgctctggtgcgctcacaaactggttcaggcaaaactttggcatactgtattcctgtggtacaatcactgcaagcgatggagtctaagatacaacggtccgatggcccatatgccctggttctggtccctacccgtgagctggccttgcaaagctttgacacagtccagaagctgctgaagcccttcacttggattgttccaggggtgctgatggggggagagaagagaaaaagcgaaaaagccagactacgtaaaggaataaatatcttaatcagcactcctggtaggctcgtggatcatatcaagtcaactaaaaacattcatttctccaggctgcggtggctcgttttcgatgaagcagatcggatactcgatcttggttttgaaaaggacatcactgtcatcctcaacgccgtaaatgctgagtgccagaaaaggcagaacgtcctcctttctgccaccctgaccgagggcgtgactcgtctggctgacatcagtctacacgaccctgtcagcattagcgttttagacaaaagtcacgatcagttgaatcctaaagataaggccgtgcaggaggtctgtccaccacctgcaggggataagctagacagctttgccatcccagaatcactgaagcagcatgtaactgtggtgccctcgaaattaagacttgtgtgcctcgccgcattcatccttcagaagtgtaaattcgaagaggaccagaaaatggtggtatttttctcttcgtgtgaattagtggagttccactacagcctctttttacaaactcttctatcgagcagtggcgcaccagcatccggacagttgccgtctgctagcatgaggctcaagttccttcggttacacggcggaatggaacaggaggaacgcacagcagtttttcaggagttcagtcatagtagacggggtgtgcttttgtgtacagacgtcgccgcacggggactggaccttccccaagtcacttggattgtccagaatacttccaccgggttagaggagcctcctgggttggcagctatgggcgctgcctgtagcttctggctgctgcggaggcagaatatgagcactcgctggcttttaaccaagagtaccctgcagtcattcattcaggcttacgccacatacccccgagagctcaagcacatcttccatgttaggtcactccatcttggccatgtggccaaatcgtttggcctccgggatgcacccaggaatctttcagctttgactagaaaaaagcgtaaggcccacgtcaagcggcctgacctgcacaaaaagacccagagtaaacacagtttagcagagatcttacggagtgaatacagctctgggatggaggcagacattgctaaggtcaagaagcagaacgctccgggtgagcctggaggtagacctctgcagcatagtctccagccaacaccatgttttggcagggggaagactctgaaatggaggaaaacacagaagggagttcaaagggatagcaaaacctcccagaaggtgtag

SEQ ID NO: 283927 - DNA, 3066 bp, Artificial Sequence
  derived and/or modified sequence
aaaaaggacagcgagcggggagccccgaggacccccttttccctgcccagggattgagctccagagcctgttagggagctacccagacaggctttagttcctaaagtgctgaggaaacgcacggggcggtaaaggggaggctcgtcggtgagatggcgccggatctcgcttctcagaggcattcagagagcttccccagcgtgaactctcggccgaatgtaattttgccaggccgcgagggacgcagagaggggctgccaccaggcgggggcacgcgcggtagtcttgtccctacccgcccggtgccgccgtccccggctcccctcgggacgagtccgtacagctggagccgttccggacccggaaggggcggtggcgcagggtcctcgcgcgtcccacgtggggtcccgggcccagcagtctgcgcaccgggctcgctgctgcaccacgcgtcacccacgcagaccatggcagccgccgacggttcgctcttcgacaaccccaggacgttctccagacgtcccccagcccaggcgagtcggcaagcaaaggctacgaaaagaaaataccaagcgtccagtgaggctcccccagcgaaacggaggaacgaaacttcatttctcccagccaagaaaactagtgttaaagaaactcagaggacttttaaggggaacgcacaaaaaatgttttctccaaagaagcattcggttagcacaagtgatagaaaccaggaggagagacagtgcattaagacttcatcactgtttaaaaacaaccctgacattccagaactccacagacctgtggtaaagcaggtgcaagaaaaagtgtttacttcagctgcttttcatgagctgggcctccacccacatttaatttccacaataaatacggtcttaaaaatgtctagtatgaccagtgttcagaagcaaagtattcctgtgttgctggaaggcagagatgctctcgtgagatcccagacgggctcaggtaaaactcttgcctattgcatccctgtggtccagtcccttcaagcaatggagtcaaaaatacagcgcagtgatggcccctatgccctggtgctcgtgccaacgagagagctagctctacaaagctttgacactgtccagaaactgcttaagcctttcacctggattgtgcctggagtgttaatgggaggagagaagagaaaatcagaaaaggccagactccgcaaaggaataaatatccttatctcaactcctggacgcctggtggatcatataaaatccacaaagaacattcattttagtcggctgcggtggttggtgtttgatgaagcagacagaatcttggatttgggttttgaaaaggacatcacagtgatacttaatgctgtaaatgctgaatgccaaaaacgacagaatgtcttgctatcagcgacactcacagaaggtgtaacgcggctagctgatatcagtttgcatgatccagtcagtatttctgtcctggacaagagccatgaccagttgaacccaaaggacaaagcggtccaggaggtctgtcctccaccagctggcgacaagctggacagctttgcaataccagagagtctcaagcagcatgtgactgtggttcccagcaaactgaggcttgtctgcctagcggccttcatccttcagaaatgcaagtttgaggaagaccagaagatggttgtctttttctcaagttgcgagctggtggagttccactacagcctcttcctacagaccctgctgagcagctcaggggcgccggcatcagggcagttgccatctgcctccatgcgattaaaattcctacggctgcatggcggcatggagcaggaggaaagaacagcagtgtttcaggaattttcacattccagaagaggcgtccttctttgcacggatgttgcagctcggggcttagatctccctcaagtcacgtggattgttcagaatacatccaccggattggaagaaccgcccggattggctgccatgggagcagcctgctcattttggctccttcggaggcagaatatgtcaactcgttggcttctcacaaaatcaactctgcagtccttcatccaagcctacgccacctaccccagggagctgaagcacatcttccacgtccgatccctccaccttgggcatgtggcgaagagcttcggactaagagatgcccccaggaatcttagtgccttgactagaaagaagaggaaagcacacgtgaaaaggcctgaccttcataagaagacccagagtaaacacagcctcgctgaaatcctacgttcggaatactcaagcggcatggaggccgacatcgccaaggtcaaaaagcaaaacgcacctggagagcctggtggccggcccctgcagcacagtctgcagccgacaccctgctttggccgtgggaaaacattaaaatggagaaaaacccaaaaaggtgtacagcgggacagcaagacttcccagaaagtttaaaatctctctgggtcttcgagtggaacctggaagccccgggtggcagtggattgatgtccagttcttgtcagaggaggcttgtgaaaaataactgcgcctttgcctgaataccacgtccccaagaatcagaggggccacagcccttctcctccatgggaggccctggagcctgatagaaatcagtggtgtggggcactgtagagactagccagctcccgacggaaggggtctgtgtcttgtattgatcccatcagtgcccggcactcccttcacccaggtgctgacgtgccggggttgagctggcaccccgggatgtgatgtaagaacgccctgcgcgtcagcctggaacgggcttgattgctgcccttaactgtgttctgaagtttcacagcttggcttcagcctatcagcgcatacattggcatgaattttgtgaattagggtgttaaaaactggaattgaatttgtacaaaaagagaatatatttatcactaattattttcttaatgtaggaatgtaccgttaaaaaggaccaaaagtttttggtctgggtcaaaaaatacgaatgtgttctcag

SEQ ID NO: 283928 - DNA, 2337 bp, Artificial Sequence
  derived and/or modified sequence
atggcccccgacctggccagccagagacacagcgagagcttccccagcgtgaacagcagacccaacgtgatcctgcccggcagagagggcagaagagagggcctgccccccggcggcggcaccagaggcagcctggtgcccaccagacccgtgccccccagccccgcccccctgggcaccagcccctacagctggagcagaagcggccccggcagaggcggcggcgccggcagcagcagagtgcccagaggcgtgcccggccccgccgtgtgcgcccccggcagcctgctgcaccacgccagccccacccagaccatggccgccgccgacggcagcctgttcgacaaccccagaaccttcagcagaagaccccccgcccaggccagcagacaggccaaggccaccaagagaaagtaccaggccagcagcgaggccccccccgccaagagaagaaacgagaccagcttcctgcccgccaagaagaccagcgtgaaggagacccagagaaccttcaagggcaacgcccagaagatgttcagccccaagaagcacagcgtgagcaccagcgacagaaaccaggaggagagacagtgcatcaagaccagcagcctgttcaagaacaaccccgacatccccgagctgcacagacccgtggtgaagcaggtgcaggagaaggtgttcaccagcgccgccttccacgagctgggcctgcacccccacctgatcagcaccatcaacaccgtgctgaagatgagcagcatgaccagcgtgcagaagcagagcatccccgtgctgctggagggcagagacgccctggtgagaagccagaccggcagcggcaagaccctggcctactgcatccccgtggtgcagagcctgcaggccatggagagcaagatccagagaagcgacggcccctacgccctggtgctggtgcccaccagagagctggccctgcagagcttcgacaccgtgcagaagctgctgaagcccttcacctggatcgtgcccggcgtgctgatgggcggcgagaagagaaagagcgagaaggccagactgagaaagggcatcaacatcctgatcagcacccccggcagactggtggaccacatcaagagcaccaagaacatccacttcagcagactgagatggctggtgttcgacgaggccgacagaatcctggacctgggcttcgagaaggacatcaccgtgatcctgaacgccgtgaacgccgagtgccagaagagacagaacgtgctgctgagcgccaccctgaccgagggcgtgaccagactggccgacatcagcctgcacgaccccgtgagcatcagcgtgctggacaagagccacgaccagctgaaccccaaggacaaggccgtgcaggaggtgtgccccccccccgccggcgacaagctggacagcttcgccatccccgagagcctgaagcagcacgtgaccgtggtgcccagcaagctgagactggtgtgcctggccgccttcatcctgcagaagtgcaagttcgaggaggaccagaagatggtggtgttcttcagcagctgcgagctggtggagttccactacagcctgttcctgcagaccctgctgagcagcagcggcgcccccgccagcggccagctgcccagcgccagcatgagactgaagttcctgagactgcacggcggcatggagcaggaggagagaaccgccgtgttccaggagttcagccacagcagaagaggcgtgctgctgtgcaccgacgtggccgccagaggcctggacctgccccaggtgacctggatcgtgcagaacaccagcaccggcctggaggagccccccggcctggccgccatgggcgccgcctgcagcttctggctgctgagaagacagaacatgagcaccagatggctgctgaccaagagcaccctgcagagcttcatccaggcctacgccacctaccccagagagctgaagcacatcttccacgtgagaagcctgcacctgggccacgtggccaagagcttcggcctgagagacgcccccagaaacctgagcgccctgaccagaaagaagagaaaggcccacgtgaagagacccgacctgcacaagaagacccagagcaagcacagcctggccgagatcctgagaagcgagtacagcagcggcatggaggccgacatcgccaaggtgaagaagcagaacgcccccggcgagcccggcggcagacccctgcagcacagcctgcagcccaccccctgcttcggcagaggcaagaccctgaagtggagaaagacccagaagggcgtgcagagagacagcaagaccagccagaaggtgtag

SEQ ID NO: 283929 - protein, 722 aa, Artificial Sequence
  derived and/or modified sequence
MQAKATKRKYQASSEAPPAKRRNETSFLPAKKTSVKETQRTFKGNAQKMFSPKKHSVSTSDRNQEERQCIKTSSLFKNNPDIPELHRPVVKQVQEKVFTSAAFHELGLHPHLISTINTVLKMSSMTSVQKQSIPVLLEGRDALVRSQTGSGKTLAYCIPVVQSLQAMESKIQRSDGPYALVLVPTRELALQSFDTVQKLLKPFTWIVPGVLMGGEKRKSEKARLRKGINILISTPGRLVDHIKSTKNIHFSRLRWLVFDEADRILDLGFEKDITVILNAVNAECQKRQNVLLSATLTEGVTRLADISLHDPVSISVLDKSHDQLNPKDKAVQEVCPPPAGDKLDSFAIPESLKQHVTVVPSKLRLVCLAAFILQKCKFEEDQKMVVFFSSCELVEFHYSLFLQTLLSSSGAPASGQLPSASMRLKFLRLHGGMEQEERTAVFQEFSHSRRGVLLCTDVAARGLDLPQVTWIVQYNAPSSPAEYIHRIGRTARIGCHGSSLLILAPSEAEYVNSLASHKINVSEIKMEDILCVLTRDDCFKGKRWGAQKSHAVGPQEIRERATVLQTVFEDYVHSSERRVSWAKKALQSFIQAYATYPRELKHIFHVRSLHLGHVAKSFGLRDAPRNLSALTRKKRKAHVKRPDLHKKTQSKHSLAEILRSEYSSGMEADIAKVKKQNAPGEPGGRPLQHSLQPTPCFGRGKTLKWRKTQKGVQRDSKTSQKV

SEQ ID NO: 283930 - protein, 160 aa, Artificial Sequence [sequence omitted]

SEQ ID NO: 283931 - DNA, 483 bp, Artificial Sequence
  derived and/or modified sequence
atgcggctcgaggccggcagtggcgctgtctggagaggtggcgagcttgctcctgccccacgcaaagtaaaggagggcatccgcggatgctttccttggaagcaggccaaggccactaagcgcaagtaccaggccagtagcgaagctccacccgctaagaggagaaatgaaacctcgttcctacccgccaaaaaaacatcagtgaaggagacccagcggacttttaagggaaacgcccaaaaaatgttctccccgaagaaacacagtgtgagcacaagtgatcgtaaccaggaagagcggcagtgcatcaagaccagttccttgtttaaaaataatcccgatataccagagctgcaccggcccgtcgttaaacaagtgcaggaaaaagtgtttacgtccgctgcatttcacgagctcggcctccaccctcacctgatcagcactattaacactgtgctgaagatgagctctatgactcgctag

SEQ ID NO: 283932 - DNA, 483 bp, Artificial Sequence
  derived and/or modified sequence
atgaggctggaggccggcagcggggctgtgtggaggggcggggagctggccccagcccccaggaaggtgaaggagggcatccggggctgcttcccctggaagcaggccaaggccaccaagaggaagtaccaggccagcagcgaggcccccccagccaagagaagaaatgagaccagcttcctgcctgccaagaagacctctgtgaaggagacccagaggaccttcaagggaaatgcccagaagatgttcagccccaagaagcacagcgtgtccaccagtgacaggaaccaggaggagcggcagtgcatcaagaccagcagcctcttcaagaacaacccagacatccctgagctgcacaggcctgtggtgaagcaggtgcaggagaaggtgttcaccagcgctgccttccacgagctgggcctgcacccccacctgatcagcaccatcaacacagtgctgaagatgagctccatgaccaggtag

SEQ ID NO: 283933 - DNA, 483 bp, Artificial Sequence
  derived and/or modified sequence
atgcggctggaggccggcagcggcgccgtgtggcggggcggcgagctggcacccgctcctagaaaagtaaaggaggggatccggggatgcttcccttggaaacaggcgaaggctacaaagagaaagtatcaagcctctagcgaagccccacctgccaaacgccggaacgagacgtcatttcttcccgctaagaaaacctctgtcaaggagacgcagagaacattcaaaggtaacgcccaaaagatgttcagcccgaagaaacattcagtgagtacttctgatcgaaaccaggaagagcgtcagtgtataaaaacctcgtccctgtttaaaaataatcctgacattccagaactccaccgccctgtagttaaacaggtacaggagaaggtcttcacgtcggccgcattccatgagctcgggctgcatccccatctcatcagcacaatcaacacggtgcttaaaatgtcctccatgacccgctag

SEQ ID NO: 283934 - DNA, 483 bp, Artificial Sequence
  derived and/or modified sequence
atgcgactggaggcgggtagtggtgccgtttggaggggcggagaattggccccagcccctcgcaaggtgaaggagggaattaggggatgttttccctggaagcaggctaaagctaccaaaagaaagtatcaggccagctccgaggcacccccagctaagcggagaaacgagacctccttcctgcccgcaaaaaagacatctgtcaaagagacacagcggacatttaaggggaacgcccagaaaatgttctcaccaaaaaaacattccgtctcaacaagcgatcgcaatcaggaagagcgacagtgtattaaaacctctagtctgttcaaaaataatcccgatataccggagctacatcgtccagtagtgaagcaggttcaggagaaggtgtttacgtctgctgcattccacgagctagggcttcatccacacctgatttcgactattaacaccgtgctcaagatgtcttctatgacgcgctag

SEQ ID NO: 283935 - DNA, 1510 bp, Artificial Sequence
  derived and/or modified sequence
ctcgcgcgtcccacgtggggtcccgggcccagcagtctgcgcaccgggctcgctgctgcaccacgcgtcacccacgcagaccatggcagccgccgacggttcgctcttcgacaaccccaggacgttctccagacgtcccccagcccaggcgagtcggggatgcgcctggaagcggggagtggagcggtgtggaggggcggggagctggctcctgcgcctagaaaagtaaaggaaggaattagaggctgtttcccgtggaagcaagcaaaggctacgaaaagaaaataccaagcgtccagtgaggctcccccagcgaaacggaggaacgaaacttcatttctcccagccaagaaaactagtgttaaagaaactcagaggacttttaaggggaacgcacaaaaaatgttttctccaaagaagcattcggttagcacaagtgatagaaaccaggaggagagacagtgcattaagacttcatcactgtttaaaaacaaccctgacattccagaactccacagacctgtggtaaagcaggtgcaagaaaaagtgtttacttcagctgcttttcatgagctgggcctccacccacatttaatttccacaataaatacggtcttaaaaatgtctagtatgaccaggtaagaacttcaggctcctcttgatttcttaggcattacgtgggtataaccggacgaaacctgtgtgtgcaaggcagagcaaatttgtgtcttggcgttggaacacagtgccaggttatcgaccataaagggttgtcgtctcacttagctactcattctctccacctgttaaatggaaagactggctttccatccagttctgcccttggctctgaaccgcaagagacgtctcatccagaaggtgggctgcatgagcgccgctgttttctgtgcttccctgaaaagaatttggccaaaatatagcatgtgaccatgtcgtttcttagtagtaagaattagggtcaaccaaaaagacaagagtaaatgttcagttggatagagtgggatactgaaaaaatgttttcaatgtttgttacagggaatgactcctggaaaataaagaagtaaaataggtgcgaggagatgagcttccttgttttgagtatttgtgcttctgtgcattttcataatgattttttacttttactagtaaaaattaataggaatattaaagtccaaattaagggacctccccacaagttttttatcaaccaaatttaagtgatttttgtgtctcttttgtttcttgttttaaaatacatgtgtagacacacatttcagcatgtccataaccttttcctggagaatggacagctgctgctggctctctgaatagttggcgagcttcctcctgctatcctgcatggaaacctttccattatgtttcgttgtgtttcatattcctgttagtgagggcaagagtgtgtgatacacttggtggtaactctgatttgttgtcatgcctgtttctttttcttttttttttttttttt

SEQ ID NO: 283936 - DNA, 483 bp, Artificial Sequence
  derived and/or modified sequence
atgagactggaggccggcagcggcgccgtgtggagaggcggcgagctggcccccgcccccagaaaggtgaaggagggcatcagaggctgcttcccctggaagcaggccaaggccaccaagagaaagtaccaggccagcagcgaggccccccccgccaagagaagaaacgagaccagcttcctgcccgccaagaagaccagcgtgaaggagacccagagaaccttcaagggcaacgcccagaagatgttcagccccaagaagcacagcgtgagcaccagcgacagaaaccaggaggagagacagtgcatcaagaccagcagcctgttcaagaacaaccccgacatccccgagctgcacagacccgtggtgaagcaggtgcaggagaaggtgttcaccagcgccgccttccacgagctgggcctgcacccccacctgatcagcaccatcaacaccgtgctgaagatgagcagcatgaccagatag

SEQ ID NO: 283937 - protein, 868 aa, Artificial Sequence
  derived and/or modified sequence
MEQWRQCGRWLIDCKVLPPNHRVVWPSAVVFDLAQALRDGVLLCQLLHNLSPGSIDLKDINFRPQMSQFLCLKNIRTFLKVCHDKFGLRNSELFDPFDLFDVRDFGKVISAVSRLSLHSIAQNKGIRPFPSEETTENDDDVYRSLEELADEHDLGEDIYDCVPCEDGGDDIYEDIIKVEVQQPMKMGMTEDDKRNCCLLEIQETEAKYYRTLEDIEKNYMSPLRLVLSPADMAAVFINLEDLIKVHHSFLRAIDVSVMVGGSTLAKVFLDFKERLLIYGEYCSHMEHAQNTLNQLLASREDFRQKVEECTLKVQDGKFKLQDLLVVPMQRVLKYHLLLKELLSHSAERPERQQLKEALEAMQDLAMYINEVKRDKETLRKISEFQSSIENLQVKLEEFGRPKIDGELKVRSIVNHTKQDRYLFLFDKVVIVCKRKGYSYELKEIIELLFHKMTDDPMNNKDVKKWSYGFYLIHLQGKQGFQFFCKTEDMKRKWMEQFEMAMSNIKPDKANANHHSFQMYTFDKTTNCKACKMFLRGTFYQGYMCTKCGVGAHKECLEVIPPCKFRTSGDRDASGAGPGPKMVAMQNYHGNPAPPGKPVLTFQTGDVLELLRGDPESPWWEGRLVQTRKSGYFPSSSVKPCPVDGRPPISRPPSREIDYTAYPWFAGNMERQQTDNLLKSHASGTYLIRERPAEAERFAISIKFNDEVKHIKVVEKDNWIHITEAKKFDSLLELVEYYQCHSLKESFKQLDTTLKYPYKSRERSASRASSRSPASCASYNFSFLSPQGLSFASQGPSAPFWSVFTPRVIGTAVARYNFAARDMRELSLREGDVVRIYSRIGGDQGWWKGETNGRIGWFPSTYVEEEGIQ

SEQ ID NO: 283938 - protein, 868 aa, Artificial Sequence
  derived and/or modified sequence
MEQWRQCGRWLIDCKVLPPNHRVVWPSAVVFDLAQALRDGVLLCQLLHNLSPGSIDLKDINFRPQMSQFLCLKNIRTFLKVCHDKFGLRNSELFDPFDLFDVRDFGKVISAVSRLSLHSIAQNKGIRPFPSEETTENDDDVYRSLEELADEHDLGEDIYDCVPCEDGGDDIYEDIIKVEVQQPMKMGMTEDDKRNCCLLEIQETEAKYYRTLEDIEKNYMSPLRLVLSPADMAAVFINLEDLIKVHHSFLRAIDVSVMVGGSTLAKVFLDFKERLLIYGEYCSHMEHAQNTLNQLLASREDFRQKVEECTLKVQDGKFKLQDLLVVPMQRVLKYHLLLKELLSHSAERPERQQLKEALEAMQDLAMYINEVKRDKETLRKISEFQSSIENLQVKLEEFGRPKIDGELKVRSIVNHTKQDRYLFLFDKVVIVCKRKGYSYELKEIIELLFHKMTDDPMNNKDVKKWSYGFYLIHLQGKQGFQFFCKTEDMKRKWMEQFEMAMSNIKPDKANANHHSFQMYTFDKTTNCKACKMFLRGTFYQGYMCTKCGVGAHKECLEVIPPCKFTSPADLDASGAGPGPKMVAMQNYHGNPAPPGKPVLTFQTGDVLELLRGDPESPWWEGRLVQTRKSGYFPSSSVKPCPVDGRPPISRPPSREIDYTAYPWFAGNMERQQTDNLLKSHASGTYLIRERPAEAERFAISIKFNDEVKHIKVVEKDNWIHITEAKKFDSLLELVEYYQCHSLKESFKQLDTTLKYPYKSRERSASRASSRSPASCASYNFSFLSPQGLSFASQGPSAPFWSVFTPRVIGTAVARYNFAARDMRELSLREGDVVRIYSRIGGDQGWWKGETNGRIGWFPSTYVEEEGIQ

SEQ ID NO: 283939 - DNA, 2607 bp, Artificial Sequence
  derived and/or modified sequence
atggagcagtggagacagtgcggcagatggctgatcgactgcaaggtgctgccccccaaccacagagtggtgtggcccagcgccgtggtgttcgacctggcccaggccctgagagacggcgtgctgctgtgccagctgctgcacaacctgagccccggcagcatcgacctgaaggacatcaacttcagaccccagatgagccagttcctgtgcctgaagaacatcagaaccttcctgaaggtgtgccacgacaagttcggcctgagaaacagcgagctgttcgaccccttcgacctgttcgacgtgagagacttcggcaaggtgatcagcgccgtgagcagactgagcctgcacagcatcgcccagaacaagggcatcagacccttccccagcgaggagaccaccgagaacgacgacgacgtgtacagaagcctggaggagctggccgacgagcacgacctgggcgaggacatctacgactgcgtgccctgcgaggacggcggcgacgacatctacgaggacatcatcaaggtggaggtgcagcagcccatgaagatgggcatgaccgaggacgacaagagaaactgctgcctgctggagatccaggagaccgaggccaagtactacagaaccctggaggacatcgagaagaactacatgagccccctgagactggtgctgagccccgccgacatggccgccgtgttcatcaacctggaggacctgatcaaggtgcaccacagcttcctgagagccatcgacgtgagcgtgatggtgggcggcagcaccctggccaaggtgttcctggacttcaaggagagactgctgatctacggcgagtactgcagccacatggagcacgcccagaacaccctgaaccagctgctggccagcagagaggacttcagacagaaggtggaggagtgcaccctgaaggtgcaggacggcaagttcaagctgcaggacctgctggtggtgcccatgcagagagtgctgaagtaccacctgctgctgaaggagctgctgagccacagcgccgagagacccgagagacagcagctgaaggaggccctggaggccatgcaggacctggccatgtacatcaacgaggtgaagagagacaaggagaccctgagaaagatcagcgagttccagagcagcatcgagaacctgcaggtgaagctggaggagttcggcagacccaagatcgacggcgagctgaaggtgagaagcatcgtgaaccacaccaagcaggacagatacctgttcctgttcgacaaggtggtgatcgtgtgcaagagaaagggctacagctacgagctgaaggagatcatcgagctgctgttccacaagatgaccgacgaccccatgaacaacaaggacgtgaagaagtggagctacggcttctacctgatccacctgcagggcaagcagggcttccagttcttctgcaagaccgaggacatgaagagaaagtggatggagcagttcgagatggccatgagcaacatcaagcccgacaaggccaacgccaaccaccacagcttccagatgtacaccttcgacaagaccaccaactgcaaggcctgcaagatgttcctgagaggcaccttctaccagggctacatgtgcaccaagtgcggcgtgggcgcccacaaggagtgcctggaggtgatccccccctgcaagttcagaaccagcggcgacagagacgccagcggcgccggccccggccccaagatggtggccatgcagaactaccacggcaaccccgccccccccggcaagcccgtgctgaccttccagaccggcgacgtgctggagctgctgagaggcgaccccgagagcccctggtgggagggcagactggtgcagaccagaaagagcggctacttccccagcagcagcgtgaagccctgccccgtggacggcagaccccccatcagcagaccccccagcagagagatcgactacaccgcctacccctggttcgccggcaacatggagagacagcagaccgacaacctgctgaagagccacgccagcggcacctacctgatcagagagagacccgccgaggccgagagattcgccatcagcatcaagttcaacgacgaggtgaagcacatcaaggtggtggagaaggacaactggatccacatcaccgaggccaagaagttcgacagcctgctggagctggtggagtactaccagtgccacagcctgaaggagagcttcaagcagctggacaccaccctgaagtacccctacaagagcagagagagaagcgccagcagagccagcagcagaagccccgccagctgcgccagctacaacttcagcttcctgagcccccagggcctgagcttcgccagccagggccccagcgcccccttctggagcgtgttcacccccagagtgatcggcaccgccgtggccagatacaacttcgccgccagagacatgagagagctgagcctgagagagggcgacgtggtgagaatctacagcagaatcggcggcgaccagggctggtggaagggcgagaccaacggcagaatcggctggttccccagcacctacgtggaggaggagggcatccagtag

SEQ ID NO: 283940 - DNA, 2607 bp, Artificial Sequence
  derived and/or modified sequence
atggagcagtggagacagtgcggcagatggctgatcgactgcaaggtgctgccccccaaccacagagtggtgtggcccagcgccgtggtgttcgacctggcccaggccctgagagacggcgtgctgctgtgccagctgctgcacaacctgagccccggcagcatcgacctgaaggacatcaacttcagaccccagatgagccagttcctgtgcctgaagaacatcagaaccttcctgaaggtgtgccacgacaagttcggcctgagaaacagcgagctgttcgaccccttcgacctgttcgacgtgagagacttcggcaaggtgatcagcgccgtgagcagactgagcctgcacagcatcgcccagaacaagggcatcagacccttccccagcgaggagaccaccgagaacgacgacgacgtgtacagaagcctggaggagctggccgacgagcacgacctgggcgaggacatctacgactgcgtgccctgcgaggacggcggcgacgacatctacgaggacatcatcaaggtggaggtgcagcagcccatgaagatgggcatgaccgaggacgacaagagaaactgctgcctgctggagatccaggagaccgaggccaagtactacagaaccctggaggacatcgagaagaactacatgagccccctgagactggtgctgagccccgccgacatggccgccgtgttcatcaacctggaggacctgatcaaggtgcaccacagcttcctgagagccatcgacgtgagcgtgatggtgggcggcagcaccctggccaaggtgttcctggacttcaaggagagactgctgatctacggcgagtactgcagccacatggagcacgcccagaacaccctgaaccagctgctggccagcagagaggacttcagacagaaggtggaggagtgcaccctgaaggtgcaggacggcaagttcaagctgcaggacctgctggtggtgcccatgcagagagtgctgaagtaccacctgctgctgaaggagctgctgagccacagcgccgagagacccgagagacagcagctgaaggaggccctggaggccatgcaggacctggccatgtacatcaacgaggtgaagagagacaaggagaccctgagaaagatcagcgagttccagagcagcatcgagaacctgcaggtgaagctggaggagttcggcagacccaagatcgacggcgagctgaaggtgagaagcatcgtgaaccacaccaagcaggacagatacctgttcctgttcgacaaggtggtgatcgtgtgcaagagaaagggctacagctacgagctgaaggagatcatcgagctgctgttccacaagatgaccgacgaccccatgaacaacaaggacgtgaagaagtggagctacggcttctacctgatccacctgcagggcaagcagggcttccagttcttctgcaagaccgaggacatgaagagaaagtggatggagcagttcgagatggccatgagcaacatcaagcccgacaaggccaacgccaaccaccacagcttccagatgtacaccttcgacaagaccaccaactgcaaggcctgcaagatgttcctgagaggcaccttctaccagggctacatgtgcaccaagtgcggcgtgggcgcccacaaggagtgcctggaggtgatccccccctgcaagttcaccagccccgccgacctggacgccagcggcgccggccccggccccaagatggtggccatgcagaactaccacggcaaccccgccccccccggcaagcccgtgctgaccttccagaccggcgacgtgctggagctgctgagaggcgaccccgagagcccctggtgggagggcagactggtgcagaccagaaagagcggctacttccccagcagcagcgtgaagccctgccccgtggacggcagaccccccatcagcagaccccccagcagagagatcgactacaccgcctacccctggttcgccggcaacatggagagacagcagaccgacaacctgctgaagagccacgccagcggcacctacctgatcagagagagacccgccgaggccgagagattcgccatcagcatcaagttcaacgacgaggtgaagcacatcaaggtggtggagaaggacaactggatccacatcaccgaggccaagaagttcgacagcctgctggagctggtggagtactaccagtgccacagcctgaaggagagcttcaagcagctggacaccaccctgaagtacccctacaagagcagagagagaagcgccagcagagccagcagcagaagccccgccagctgcgccagctacaacttcagcttcctgagcccccagggcctgagcttcgccagccagggccccagcgcccccttctggagcgtgttcacccccagagtgatcggcaccgccgtggccagatacaacttcgccgccagagacatgagagagctgagcctgagagagggcgacgtggtgagaatctacagcagaatcggcggcgaccagggctggtggaagggcgagaccaacggcagaatcggctggttccccagcacctacgtggaggaggagggcatccagtag

SEQ ID NO: 283941 - DNA, 2607 bp, Artificial Sequence
  derived and/or modified sequence
atggagcaatggcgccaatgcggcagatggcttatcgattgcaaggtacttccacctaatcacagggtcgtgtggccttccgcggttgtcttcgacctggcccaagcgttaagagacggagtgctcctgtgtcagttgttgcacaatctgtctcccgggagcatagacctcaaagacattaatttccggccccagatgtcccagtttttatgccttaaaaatattcgcacttttctcaaagtctgtcatgacaaatttggcctcaggaatagcgagctcttcgacccatttgacctgttcgacgtgcgggacttcggtaaagttatctctgccgtctcacgcctgtccctccatagcattgcccaaaacaagggaatcagaccttttcctagcgaagaaaccacggagaatgacgacgacgtgtatagatcacttgaggagcttgctgatgaacatgatctcggcgaggatatttatgactgtgtgccctgtgaggatggcggcgacgacatttatgaggatatcattaaggtcgaagtgcagcaacctatgaagatggggatgactgaggacgacaagcgcaattgttgccttctcgaaatacaagagacggaggcaaaatactacaggactttggaggatattgaaaagaactacatgtccccattgagactggtcctcagtcccgccgacatggccgccgtgtttatcaacctggaagatctcatcaaggtccaccacagttttctgcgcgccatcgatgtgagcgtcatggtggggggaagtacgcttgctaaagtttttttagatttcaaagaacgcctactcatctacggagaatattgctctcacatggaacacgctcagaatacactcaatcagcttttggcctctagagaagactttcgacagaaggtagaggaatgcaccctcaaggttcaggatgggaagtttaagctgcaggatcttctcgtggtccctatgcaaagagtactgaagtatcaccttctactgaaagaactgctgtcacacagcgcagaacgaccagagcggcaacagctcaaggaggcactggaagctatgcaggacctcgcgatgtacatcaatgaagtgaagagggacaaggagaccctcaggaagatttcagaattccagtcctccattgagaacctccaagtgaagctggaagagttcggccggcccaaaattgatggcgaactcaaagttcgatcaatcgtgaaccacacaaaacaggaccgatatttattcttatttgataaagtggtgattgtgtgcaaacgcaagggctactcctatgagcttaaagaaatcattgagttactcttccacaaaatgaccgatgaccctatgaataataaggatgtgaagaaatggagctatggcttttatctgatacatctccaggggaaacaaggcttccagtttttctgtaagacagaagacatgaaaaggaagtggatggagcagtttgagatggcgatgtctaatatcaaacctgataaggcaaatgcaaaccatcactccttccagatgtatactttcgacaagaccaccaactgcaaggcatgtaagatgtttctgagaggcacgttttaccagggatacatgtgcactaagtgcggcgtgggggcgcataaggagtgcctggaggtgattccaccttgcaagtttaggacgagtggcgatcgggacgcctccggagccgggcctgggcctaagatggtggctatgcaaaactaccacgggaaccccgctcctcccggtaagccagtcctcacatttcagaccggggatgtgctcgagttgctccggggtgatcccgagagtccatggtgggaagggcgacttgttcagacccgtaagagcggctacttcccaagctccagcgtcaagccttgtcctgtggatgggaggcctcccattagccggcctccttcccgggagattgactataccgcctacccctggttcgcaggcaacatggagcgccaacagaccgacaacttgctgaagtcacatgcctctgggacctatttaatccgcgagcgccctgctgaagccgagcggtttgcaatatccattaagtttaatgacgaagttaagcacattaaggttgtggagaaagacaattggattcacataacagaagctaaaaagtttgactctctgctagaactggtcgaatactatcaatgtcatagtcttaaggaatccttcaagcagttagatactacactgaagtatccttataaatccagggagcgtagcgcaagtcgggcctcaagtaggtccccggcttcatgcgcctcttacaatttctcctttttaagtccccagggactgtcattcgcctcccaaggcccttccgcacctttttggagcgtttttacaccacgcgttatcggaacagcagtggcccgatacaatttcgcagctcgggacatgcgggaactgagtcttcgggagggtgatgtagtaagaatctattctcgaatcggtggagaccaaggatggtggaaaggggagaccaacgggaggattgggtggtttccctccacttatgtagaagaggaggggattcagtag

SEQ ID NO: 283942 - DNA, 2607 bp, Artificial Sequence
  derived and/or modified sequence
atggagcagtggaggcagtgcggaaggtggctcattgactgcaaggtgctgccccctaatcatcgcgtagtctggccgtcggctgtggtgttcgatctcgcacaggccttacgggacggcgtcctgctgtgtcagctcttgcacaaccttagtccgggtagtatcgacctcaaggatattaatttccggcctcaaatgtcacagtttctttgcctcaagaatatccgcacctttctcaaggtgtgtcacgataaattcggtctgcggaattctgagttgttcgaccctttcgatctgttcgacgtacgcgattttggcaaggtgatttccgccgtcagccggttaagcttgcactcaatcgcacagaacaagggcatcagacctttccctagcgaggagacaaccgagaacgatgatgacgtgtataggtctctggaggagctggccgacgaacacgatcttggagaggatatctatgattgtgttccttgtgaagatggtggcgacgacatatacgaagacataatcaaagtggaggtgcagcagccgatgaagatgggaatgaccgaggacgacaagagaaattgttgtttgctcgagattcaggaaacagaagccaaatactaccggacattagaagatatcgagaaaaattacatgtctccacttcgccttgtactttccccggcggatatggctgcagtttttatcaaccttgaggatctgataaaagtgcaccatagttttttgagggctattgacgtaagtgtgatggtaggtgggtccacgctcgccaaagtgtttctcgatttcaaggaacgtttactgatctacggtgagtattgttcgcacatggagcatgcccaaaacacattaaaccagctgctggcctcaagagaggatttccggcagaaagtggaagaatgtactcttaaagtccaggatggcaagttcaaattacaggatctgctcgtagtgcccatgcagcgtgtcctgaagtaccacctactgctgaaagaacttctctcccactccgccgaacgccctgagcgacagcagctgaaggaagctctcgaagccatgcaggatttggcgatgtatataaacgaggtgaaacgcgacaaagaaactctgcgaaagatctctgagttccagagtagcatcgagaatctgcaggtgaaactggaggaatttggaagacctaaaatcgacggcgagcttaaagtccgtagcatcgtgaaccatactaagcaagacagatatctgtttctgtttgacaaggtggtgattgtatgcaaacgcaagggctatagctatgagctcaaagagatcatagagctgctatttcacaaaatgacagatgaccctatgaataacaaggatgtgaaaaagtggtcctatggcttttatcttatccacctgcagggcaagcaggggttccagttcttttgtaaaacggaggatatgaaaaggaaatggatggaacagtttgagatggccatgagtaatatcaaacccgataaggccaacgcgaaccatcattcatttcagatgtacacctttgataagactacaaactgtaaggcttgtaagatgtttctccgcggaactttttaccagggttatatgtgcacaaagtgtggtgttggagctcacaaggaatgcctggaggtgatcccaccctgtaagttcacctctcctgcagacctggacgcctcaggggcaggtccagggcccaaaatggttgcaatgcaaaattatcacggcaacccagctcccccagggaaacccgtgctcacattccagacaggagatgtcctggagcttttacgcggagatcccgagtccccatggtgggaaggaaggctagtgcaaactcgaaaatccgggtatttccctagcagttctgtgaaaccttgcccagtagatgggaggccccctatatctcgccccccgtctcgggaaatcgactacacggcctacccgtggtttgcgggaaacatggaacgacagcagacagataaccttctgaaaagtcacgccagcgggacctatctgattagagagcggcctgccgaggcagaaaggttcgccatttccataaaatttaacgatgaggttaagcacattaaagtcgtcgaaaaagacaactggatacatatcacagaagcgaaaaagttcgattccctcctcgaattagtggagtactaccagtgtcacagtctgaaggagtcgtttaaacagttagataccacactcaagtacccttacaagtctcgagaacggtccgcctctcgcgcctccagcagatctccagcatcatgtgcttcgtacaacttcagttttctctccccacagggactgagctttgcttcccaaggcccttcagcccccttctggagcgtcttcacaccacgagttatcggcacggccgtagcaaggtataacttcgcagcccgggacatgagagaactcagcctgagagagggcgacgttgtgagaatctactctcgcataggaggagaccaaggatggtggaagggagaaactaatggacgaatcggttggttcccatccacctatgtggaggaggagggcattcagtag

SEQ ID NO: 283943 - DNA, 2607 bp, Artificial Sequence
  derived and/or modified sequence
atggagcagtggaggcagtgtggccgctggctgattgactgcaaggtgctgccccccaaccaccgggtggtgtggcccagcgctgtggtgtttgacctggcccaggccctgagagatggagtgctgctgtgccagctgctgcacaacctgagccctggcagcattgacctgaaggacatcaacttccggccccagatgagccagttcctgtgcctgaagaacatccgcaccttcctgaaggtgtgccacgacaagtttggcctgagaaattctgagctgtttgacccctttgacctgtttgatgtgcgggactttgggaaggtgatctctgctgtgtcccggctgagcctgcacagcatcgcccagaacaagggcatccggcccttccccagcgaggagaccacagaaaatgatgatgatgtgtaccgcagcctggaggagctggctgatgaacatgacctgggggaggacatctatgactgtgtgccctgtgaagatggaggagatgacatctatgaggacatcatcaaggtggaggtgcagcagcccatgaagatgggcatgacagaagatgacaagaggaactgctgcctgctggagatccaggagacagaggccaagtactaccgcaccctggaggacatcgagaagaactacatgagccccctgcggctggtgctgagccctgctgacatggctgctgtgttcatcaacctggaggacctgatcaaggtgcaccacagcttcctgcgggccattgatgtgtctgtgatggtgggcggcagcaccctggccaaggtgttcctggacttcaaggagcggctgctgatctacggggagtactgcagccacatggagcacgcccagaacaccctgaaccagctgctggccagccgggaggacttccggcagaaggtggaggagtgcaccctgaaggtgcaggacggcaagttcaagctgcaggacctgctggtggtgcccatgcagagggtgctgaagtaccacctgctgctgaaggagctgctgagccacagcgctgagaggcctgagcggcagcagctgaaggaggccctggaggccatgcaggacctggccatgtacatcaatgaggtgaagagggacaaggagaccctgaggaagatcagcgagttccagagcagcattgagaacctgcaggtgaagctggaggagtttggccggcccaagattgatggagagctgaaggtgcgcagcatcgtgaaccacaccaagcaggaccgctacctgttcctgtttgacaaggtggtgattgtgtgcaagaggaagggctacagctatgagctgaaggagatcatcgagctgctcttccacaagatgacagatgaccccatgaacaacaaggatgtgaagaagtggagctatggcttctacctgatccacctgcagggcaagcagggcttccagttcttctgcaagacagaggacatgaagaggaagtggatggagcagtttgagatggccatgagcaacatcaagccagacaaggccaatgccaaccaccacagcttccagatgtacacctttgacaagaccaccaactgcaaggcctgcaagatgttcctgcggggcaccttctaccagggctacatgtgcaccaagtgtggggtgggcgcccacaaggagtgcctggaggtgatccccccctgcaagttccgcaccagcggggacagagatgccagcggggccggccctggccccaagatggtggccatgcagaactaccacggcaacccagcccctcctgggaagcctgtgctgaccttccagacaggagatgtgctggagctgctgcggggggaccctgagagcccctggtgggagggccgcctggtgcagaccaggaagagcggctacttccccagcagctctgtgaagccctgccctgtggatggccggccccccatcagcaggcctcccagccgggagattgactacacagcctacccctggtttgctggcaacatggagcggcagcagacagacaacctgctgaagagccacgccagcggcacctacctgatccgggagaggcctgctgaggccgagagatttgccatcagcatcaagttcaatgatgaggtgaagcacatcaaggtggtggagaaggacaactggatccacatcacagaggccaagaagtttgacagcctgctggagctggtggagtactaccagtgccacagcctgaaggagagcttcaagcagctggacaccaccctgaagtacccctacaagagccgggagaggtctgccagccgggccagcagccgcagccctgccagctgtgccagctacaacttctccttcctgagcccccagggcctgagctttgccagccagggccccagcgcccccttctggagcgtcttcacccccagggtcatcggcacagctgtggcccgctacaactttgctgcccgggacatgagggagctgagcctgcgggagggagatgtggtgcgcatctacagcagaattggaggagaccagggctggtggaagggggagaccaacggccgcatcggctggttccccagcacctacgtggaggaggagggcatccagtag

SEQ ID NO: 283944 - DNA, 2607 bp, Artificial Sequence
  derived and/or modified sequence
atggagcagtggaggcagtgtggccgctggctgattgactgcaaggtgctgccccccaaccaccgggtggtgtggcccagcgctgtggtgtttgacctggcccaggccctgagagatggagtgctgctgtgccagctgctgcacaacctgagccctggcagcattgacctgaaggacatcaacttccggccccagatgagccagttcctgtgcctgaagaacatccgcaccttcctgaaggtgtgccacgacaagtttggcctgagaaattctgagctgtttgacccctttgacctgtttgatgtgcgggactttgggaaggtgatctctgctgtgtcccggctgagcctgcacagcatcgcccagaacaagggcatccggcccttccccagcgaggagaccacagaaaatgatgatgatgtgtaccgcagcctggaggagctggctgatgaacatgacctgggggaggacatctatgactgtgtgccctgtgaagatggaggagatgacatctatgaggacatcatcaaggtggaggtgcagcagcccatgaagatgggcatgacagaagatgacaagaggaactgctgcctgctggagatccaggagacagaggccaagtactaccgcaccctggaggacatcgagaagaactacatgagccccctgcggctggtgctgagccctgctgacatggctgctgtgttcatcaacctggaggacctgatcaaggtgcaccacagcttcctgcgggccattgatgtgtctgtgatggtgggcggcagcaccctggccaaggtgttcctggacttcaaggagcggctgctgatctacggggagtactgcagccacatggagcacgcccagaacaccctgaaccagctgctggccagccgggaggacttccggcagaaggtggaggagtgcaccctgaaggtgcaggacggcaagttcaagctgcaggacctgctggtggtgcccatgcagagggtgctgaagtaccacctgctgctgaaggagctgctgagccacagcgctgagaggcctgagcggcagcagctgaaggaggccctggaggccatgcaggacctggccatgtacatcaatgaggtgaagagggacaaggagaccctgaggaagatcagcgagttccagagcagcattgagaacctgcaggtgaagctggaggagtttggccggcccaagattgatggagagctgaaggtgcgcagcatcgtgaaccacaccaagcaggaccgctacctgttcctgtttgacaaggtggtgattgtgtgcaagaggaagggctacagctatgagctgaaggagatcatcgagctgctcttccacaagatgacagatgaccccatgaacaacaaggatgtgaagaagtggagctatggcttctacctgatccacctgcagggcaagcagggcttccagttcttctgcaagacagaggacatgaagaggaagtggatggagcagtttgagatggccatgagcaacatcaagccagacaaggccaatgccaaccaccacagcttccagatgtacacctttgacaagaccaccaactgcaaggcctgcaagatgttcctgcggggcaccttctaccagggctacatgtgcaccaagtgtggggtgggcgcccacaaggagtgcctggaggtgatccccccctgcaagttcaccagccctgctgacctggatgccagcggggccggccctggccccaagatggtggccatgcagaactaccacggcaacccagcccctcctgggaagcctgtgctgaccttccagacaggagatgtgctggagctgctgcggggggaccctgagagcccctggtgggagggccgcctggtgcagaccaggaagagcggctacttccccagcagctctgtgaagccctgccctgtggatggccggccccccatcagcaggcctcccagccgggagattgactacacagcctacccctggtttgctggcaacatggagcggcagcagacagacaacctgctgaagagccacgccagcggcacctacctgatccgggagaggcctgctgaggccgagagatttgccatcagcatcaagttcaatgatgaggtgaagcacatcaaggtggtggagaaggacaactggatccacatcacagaggccaagaagtttgacagcctgctggagctggtggagtactaccagtgccacagcctgaaggagagcttcaagcagctggacaccaccctgaagtacccctacaagagccgggagaggtctgccagccgggccagcagccgcagccctgccagctgtgccagctacaacttctccttcctgagcccccagggcctgagctttgccagccagggccccagcgcccccttctggagcgtcttcacccccagggtcatcggcacagctgtggcccgctacaactttgctgcccgggacatgagggagctgagcctgcgggagggagatgtggtgcgcatctacagcagaattggaggagaccagggctggtggaagggggagaccaacggccgcatcggctggttccccagcacctacgtggaggaggagggcatccagtag

SEQ ID NO: 283945 - DNA, 2607 bp, Artificial Sequence
  derived and/or modified sequence
atggagcagtggcggcagtgcggccggtggctgatcgactgcaaggtcctaccccccaatcatcgtgtggtgtggccaagtgctgtcgtatttgacctggcacaggccctgcgggacggcgtgctcttgtgccaactgctgcataatctgagccccggatctattgacctaaaagatattaactttcgtccgcagatgagtcagtttctatgtcttaaaaacatccgaaccttcctcaaggtgtgtcacgacaagttcgggctgcgaaacagtgaactgttcgatccctttgacctcttcgacgtgcgagacttcggtaaggtaattagtgcagtgtcccgactgtccctgcactccatcgcacagaataaaggcattcggccttttccatccgaggagactacagagaatgatgacgatgtgtatagaagcctggaggaattagcagatgaacacgatctcggtgaagacatatacgattgcgtcccatgcgaggatgggggagatgatatctacgaagacattattaaggtggaggtgcaacagcccatgaaaatgggaatgaccgaggatgacaagaggaactgttgtctgttggagatacaggaaacagaggcgaagtattatcgcaccctcgaagatattgagaagaattacatgtctccgttgagactggtgttgagccccgccgacatggctgccgttttcataaatcttgaagacctgatcaaagtgcaccactcattcctgcgggccattgatgtgagtgtgatggtcgggggcagcaccttggccaaagtttttctggatttcaaggaaagactgcttatttatggcgaatattgctcccatatggagcacgctcagaatactttaaatcagctcctcgcatccagagaagattttcgccagaaagtagaggaatgtaccctaaaagttcaagacggtaaattcaaattgcaggatcttctcgtggtcccaatgcagagggtgcttaaatatcacctgctgctgaaggagctcctgtctcactcggctgagcggcccgagaggcagcagctgaaagaggccttggaggcaatgcaggatttggccatgtacatcaacgaagtaaaacgggacaaggagacgttgcgtaagatttctgagtttcagagttctatcgagaatctgcaggtgaagctggaggaatttggcaggcctaaaatcgacggtgagctgaaggtcaggtcaatcgtcaaccatacaaaacaggatagatacctctttctgtttgataaggtggtgatcgtttgcaaacgcaaaggttactcctacgagctgaaggaaatcattgaactactgtttcataaaatgaccgatgatccaatgaacaacaaggatgtgaagaaatggtcatacggcttttacctcattcatctccaggggaagcaggggttccagtttttctgcaaaacggaagacatgaagcgcaaatggatggagcagtttgagatggctatgtcaaatatcaagcctgataaggccaacgcaaatcaccactccttccagatgtataccttcgataagaccactaactgcaaggcctgcaagatgttcctgcgcgggacattctatcagggctatatgtgtactaaatgcggcgtgggcgcccacaaggagtgtcttgaagtgatacccccatgcaaattccggacatcaggtgatagggacgcctccggagcaggacccggccctaagatggtggctatgcagaactaccatggcaacccagcacccccgggcaaacctgtgctgacttttcaaactggagatgtcctagagctgttacgaggagatcctgaatctccttggtgggagggcaggctggtccagactcggaaatctggttacttccctagcagcagcgtaaagccatgccccgtggacggccggcctcctattagccgtccaccttcaagagagattgattacactgcctatccttggttcgctgggaatatggaacggcagcagacggacaacttgctcaaatcacatgccagtggcacatacctcatccgagaaagaccggctgaggcggaacggttcgcaatctccattaagtttaacgacgaggtgaagcatataaaagtggtggaaaaggacaattggattcatataacagaggcaaagaagttcgattcacttctggagctggttgaatattaccaatgccattctttgaaggaaagctttaagcagctggatactaccctaaaatacccatacaaatctcgtgagagaagtgcatctagggcgtcctcgaggtcgcctgcctcctgtgccagctataatttttctttcctgtctccacagggactgagcttcgcctcccaaggacccagcgctccattctggtccgtgttcactcctagggtcataggtacagccgtggctcggtacaatttcgctgcccgcgacatgagagagctgagcctacgagaaggggacgtagtgagaatctacagtagaatcggaggcgatcagggatggtggaagggcgaaacaaacggtaggatcggctggtttccctcaacctatgtggaggaagaggggatacagtag

SEQ ID NO: 283946 - DNA, 2607 bp, Artificial Sequence
  derived and/or modified sequence
atggagcagtggcggcagtgcggccggtggctgatcgactgcaaggtgctgccccccaatcaccgggtggtgtggccatccgcagtggtgttcgacttggcacaggctctaagagacggtgtgttactgtgtcagctgctgcacaatcttagtccaggaagcattgacctgaaggacatcaatttccggccccaaatgagtcagttcctctgtctaaagaatatccgcacatttctgaaggtgtgccatgataaattcggtctgaggaattcggagctgttcgatccctttgacctgttcgatgtaagagacttcgggaaggttatttctgccgtatcccgcctttcgctgcactccattgcccagaataaaggcattcgccccttcccttcggaggagacaacagagaacgacgacgacgtctatcggtcgctggaggaattggcagacgagcacgatctcggtgaggatatctacgactgcgtgccttgtgaagatggaggggacgatatctatgaggatataatcaaagtggaagtgcagcagcctatgaagatgggcatgacggaggatgacaagcggaattgttgcttgttggagatacaggagactgaggcgaaatactaccgaacgttagaggacatcgaaaaaaattacatgtcccccctccggctggtgctgtcccctgctgacatggcggccgtcttcatcaatctcgaggaccttatcaaggtccaccattcgttcctgagagccatcgacgtatctgtgatggtggggggctccaccctggccaaggtatttctggacttcaaggagcgcctcttgatatatggagaatattgtagccatatggaacatgcccagaacacgttgaatcaactccttgcatccagagaagattttcgtcagaaagtggaggagtgtaccctaaaggtgcaggatggcaaattcaaactgcaggatctgctcgtcgtgcccatgcagcgggttctgaaatatcacctactgctgaaagagctgttgtcccattcagctgagcgccctgaacgtcagcagttgaaagaagcactggaggctatgcaggatcttgctatgtacatcaacgaagtgaaacgcgacaaggagacattacgcaaaatcagcgagtttcaaagcagcattgaaaatctgcaggtaaaactcgaagaattcggacggccaaagattgatggagaacttaaggtaagatcgattgtgaaccacaccaagcaggaccgatacttgttcctgttcgataaagtcgttatcgtgtgtaaacggaagggatactcctacgagttgaaggagattatagagctgctgtttcacaaaatgaccgatgatcccatgaacaataaggatgtgaagaagtggagctacggcttctatcttattcacctccagggaaaacaaggattccaattcttctgtaagactgaagacatgaaaagaaagtggatggaacagttcgaaatggccatgtccaatattaaacccgacaaagcaaacgccaatcatcactcctttcaaatgtacaccttcgacaagaccacaaactgcaaggcatgcaagatgtttcttcggggaaccttctaccagggctatatgtgtactaaatgcggcgtgggggcgcataaagagtgtctcgaagtcatccctccttgtaagttcactagcccagctgacttggatgcaagtggcgccggcccgggacctaagatggtcgccatgcagaactaccacggaaaccccgcgccaccaggaaagccggtcttaacattccagaccggggatgtccttgaactccttagaggcgatcctgagtcaccttggtgggaggggaggctcgtgcagacgcggaaatccggctacttcccttcttcttccgttaagccttgccccgtcgatgggaggccgcctatctctcgacccccatctcgggaaatcgactacacagcctacccttggttcgccggaaatatggagaggcaacagactgacaacctccttaagtcccacgccagcgggacatacctgatcagggagcgcccagccgaggctgaaaggtttgcaatctccattaagttcaatgatgaggttaagcacatcaaggtagtggaaaaggataactggattcacatcactgaagcaaagaaattcgactccctgttggaactggttgagtattatcagtgccattccctgaaggagtccttcaagcagctcgataccaccctgaagtacccttataagagccgtgaacgaagtgcttctcgcgcatcttcacgcagcccagcctcatgcgctagttacaacttctccttcctctcccctcagggcctttcatttgcaagccagggccctagcgccccattctggtccgtgtttactcctagagtgatcggaacagctgtggccagatataatttcgccgcgcgggacatgcgcgagttgagtctgcgggagggggatgtggtacgcatctactcgcgcatagggggggatcaaggatggtggaaaggtgaaacaaacggacgcatagggtggtttccctccacatacgtcgaggaggagggcatacaatag

SEQ ID NO: 283947 - DNA, 2607 bp, Artificial Sequence
  derived and/or modified sequence
atggagcagtggcgacagtgcggtcgatggttgatcgactgtaaagtcctgccacctaatcacagagtggtgtggccatcagccgtggtgttcgaccttgcccaggctctgagggatggtgtcctactttgtcagctactccataatttgagccccggatccatcgatctgaaggacataaacttccgccctcagatgtcacagttcctttgcctcaagaatatccgaactttcttgaaagtttgccatgataaattcggactcagaaattctgagcttttcgatcccttcgacctgtttgacgtgcgtgactttggtaaggtcatttctgccgtgagtagactgtcactgcactccattgcgcaaaataaggggatcaggcctttcccgtcagaagaaaccacagaaaatgatgatgacgtgtaccgatctctcgaggagttagcagacgagcacgacttgggcgaagatatttacgactgtgtgccgtgcgaggacggcggagatgacatctatgaggacataattaaagttgaggtacagcagcccatgaagatggggatgaccgaggatgacaaaagaaattgttgtctgctcgagattcaggaaaccgaggccaagtactaccggactctagaagacattgaaaagaattacatgtccccgcttagactggtgctctctcctgctgacatggctgcagtgtttatcaatctggaagaccttattaaagtgcatcatagctttctcagggcaatcgacgtgtcagtgatggtgggagggtcaaccctcgccaaggtatttctagatttcaaggaacggctactgatttatggcgagtactgttcccatatggagcacgcgcaaaatacacttaaccagctgctggcatcccgcgaagattttcgacaaaaagttgaggaatgcaccctgaaagttcaggacggaaagtttaagctgcaggacctcttggtggtccccatgcagagggtgctgaagtatcaccttttactcaaagagctgctctctcattccgcagagagacctgaacggcaacagttgaaagaggctctggaggccatgcaggacttggccatgtatatcaatgaggtaaaaagagataaagaaacgctccgcaaaatctccgagttccaaagtagcattgagaacctgcaggtaaagctggaggagttcggtcgcccaaagattgacggggaattgaaagtgagaagcatcgtgaatcataccaaacaggaccggtatctcttcttgtttgataaggtcgtgattgtgtgcaagcggaaaggatactcctacgagctgaaggaaatcatcgaactgctcttccataagatgacagatgatccaatgaataataaggacgtgaagaagtggagctacgggttttatctgatccatctgcagggaaagcagggatttcagttcttttgtaagacagaggatatgaagcgcaaatggatggaacagtttgaaatggctatgagtaacattaaaccagacaaggctaacgcaaatcatcatagcttccaaatgtatacttttgacaagacgactaactgcaaagcatgcaaaatgtttctccggggaactttttaccagggctacatgtgtacgaagtgcggcgtgggggcacacaaggagtgtttagaggtcatcccaccctgcaagtttcgcaccagtggagatagagacgcctccggggcaggcccagggccaaagatggtggctatgcaaaactaccatggtaaccccgctccacccggtaaacctgttcttacattccaaacaggagatgtactcgagctgctgcggggtgatcccgaatccccatggtgggagggcagacttgtgcagaccagaaaaagtggctattttcctagctcgagtgtaaagccatgccctgtggatggcaggccccctatttctcggcctccctcacgcgagattgattacactgcttacccttggtttgctggcaatatggagcgtcaacagaccgacaacctcctcaaatctcacgcaagcggtacatacttgattcgcgaacgccctgccgaagccgaaagattcgctattagcattaagtttaacgatgaagtcaaacacattaaggtagtggaaaaggacaactggattcatatcacagaagcaaagaagttcgactcacttctagagcttgtcgaatactatcagtgtcattccctcaaggagagtttcaagcagcttgacaccacactgaagtatccctataagtcccgagaacgctctgccagtagggcttcttccaggagccctgcgagttgtgccagttataacttctcctttctaagtccgcagggactgtcctttgctagtcagggcccatctgcgcctttctggagcgtgtttacccctcgagtcatcgggaccgcagtcgctcgctataacttcgcagctcgggacatgagagaattgagtttgagggagggtgatgtcgtcagaatttacagcagaataggaggggatcaagggtggtggaaaggggagacgaatgggaggattggctggttccctagtacctatgtggaagaagaagggattcagtag

SEQ ID NO: 283948 - DNA, 2607 bp, Artificial Sequence
  derived and/or modified sequence
atggagcaatggaggcaatgtgggcgatggctgattgactgcaaggtgctccccccaaaccatcgggttgtatggccaagcgcggtggttttcgatctggcccaggcccttcgagatggcgtgcttctttgccaactccttcataatctctccccgggtagcatcgaccttaaagacattaatttcaggcctcagatgtctcagtttctgtgtctgaagaacatcaggaccttcctgaaggtgtgccatgacaaatttggactgagaaactccgaactgttcgacccatttgatctgttcgatgttcgtgacttcgggaaggtcatcagtgctgtgagtaggctcagtctgcactctatcgcacagaacaaagggatccgaccctttccgagtgaagaaaccactgagaacgatgatgacgtgtaccgtagtctcgaagaattggctgatgaacacgacttaggggaagacatttacgactgcgttccctgtgaagacggcggtgatgatatttacgaagacattatcaaagtcgaagtgcagcagccgatgaagatggggatgaccgaagacgacaagcggaactgctgcctgttggagatccaagagaccgaagccaaatattatcgcaccctggaggatatcgagaagaattatatgtctcctcttcggttggtcctctcaccggcagatatggctgccgtatttattaatctggaggacctgattaaggtgcaccactcctttctgcgagcaatcgatgtgtccgtgatggtcgggggttctacgctcgccaaagtttttctggattttaaagaaaggcttcttatttatggtgaatactgtagccacatggagcatgcccaaaacacccttaatcagctgctcgcaagccgggaggatttcaggcaaaaagtggaagagtgcaccctgaaggtacaggacgggaagtttaaactgcaggatctgcttgtggtccctatgcaacgggtactgaagtaccacctcctgctgaaagagttactgagtcacagcgccgagaggcccgaacggcagcagctgaaggaggcccttgaggcgatgcaagacctagccatgtatattaatgaggtgaagagagataaggaaacgctgaggaaaatttctgagtttcagtctagcatcgaaaatttgcaggttaagctggaagaattcggaaggcccaagatcgatggggagttgaaggtacgttcaatagttaatcacacaaagcaagacagatacctgtttctattcgataaggtggttatcgtttgtaagagaaaaggatatagctacgaactcaaagagatcatcgaactcctgttccacaaaatgacagacgatccaatgaacaacaaggacgtgaagaagtggagttatgggttttacctcatccaccttcaaggcaagcagggattccagttcttctgcaagaccgaagatatgaagcggaagtggatggagcagtttgagatggccatgagtaacataaagcccgacaaggctaacgctaatcatcattctttccagatgtatacatttgataaaactacgaactgtaaggcttgcaaaatgttcttgcgcggtacgttctatcaggggtacatgtgtacaaagtgcggtgtgggcgctcataaggagtgcttggaggtcattcctccttgtaaattcactagccctgcagatctggacgcttcgggtgcaggaccaggccctaagatggtcgccatgcagaactaccatggaaatcctgcgccaccagggaaacccgtactaactttccagaccggagacgtgctggagctccttaggggcgatcctgagtccccatggtgggagggaaggctggttcagacccgcaaaagcggctactttccgagctctagcgtgaagccctgtccagtcgacggacggccacccataagccggccacccagccgtgagattgactatacggcgtacccatggttcgccggtaatatggaaagacagcaaaccgacaacctcctgaaaagtcacgccagcggcacctatttaatcagagagcggccagctgaggccgagcgcttcgcaatttctatcaagtttaacgatgaagtaaaacacattaaagttgtggaaaaagataattggatccacatcacagaagccaaaaaattcgactctctactggaactggtcgagtactaccagtgtcacagcctaaaggaaagcttcaaacagctggacaccaccttgaaatacccttataagagcagggaaagaagtgcaagcagggcgagttcccgttctcccgcaagttgcgctagttataacttttcctttttgtctcctcaaggcctcagcttcgcctctcaaggccctagcgcccctttttggagtgtctttacaccacgagtaatcggcaccgctgtggcccgttataactttgcggctagagacatgagggagctttccttgcgagaaggcgacgtggtgcgcatctattccaggatcggcggagaccagggctggtggaaaggtgagactaacggcaggataggttggttcccctctacgtacgtggaggaggagggtattcagtag

SEQ ID NO: 283949 - DNA, 4820 bp, Artificial Sequence
  derived and/or modified sequence
actttggctcgagcactgccctgagccggtcgggcccgcgggcgccatggagcagtggcggcagtgcggccgctggctcatcgattgcaaggtcctgccgcccaaccaccgggtggtgtggccctcggccgtggtcttcgacctggcgcaggcgctgcgcgacggggtccttctgtgccagctgctgcacaacctctcccccggctccatcgacctcaaggacatcaacttccggccgcagatgtcccagtttctgtgtttgaagaacatacgcaccttcctgaaagtctgccacgataaatttggattaaggaacagcgagctgtttgacccctttgacctcttcgatgtgcgagactttggaaaggtcatctccgcggtgtcgaggctctccctgcacagcatcgcgcagaacaaagggatcaggccttttccctcagaggagaccacagagaatgacgatgacgtctaccgcagcctggaggagctggccgacgagcatgacctgggggaggacatctacgactgcgtcccgtgtgaggatggaggggacgacatctacgaggacatcatcaaggtggaggtgcagcagcccatgaaaatgggcatgactgaagatgacaagaggaactgctgcctgctggagatccaggagaccgaggccaagtactaccgcaccctggaggacattgagaagaactacatgagccccctgcggctggtgctgagcccggcggacatggcagctgtcttcattaacctggaggacctgatcaaggtgcatcacagcttcctgagggccatcgacgtgtccgtgatggtggggggcagcacgctggccaaggtcttcctcgatttcaaggaaaggcttctgatctacggggagtactgcagccacatggagcacgcccagaacacactgaaccagctcctggccagccgggaggacttcaggcagaaagtcgaggagtgcacactgaaggtccaggatggaaaatttaagctgcaagacctgctggtggtccccatgcagagggtgctcaaataccacctgctcttgaaggagcttctgagccattctgcggaacggcctgagaggcagcagctcaaagaagcactggaagccatgcaggacttggcgatgtacatcaatgaagttaaacgggacaaggagaccttgaggaaaatcagcgaatttcagagttctatagaaaatttgcaagtgaaactggaggaatttggaagaccaaagattgacggggaactgaaagtccggtccatagtcaaccacaccaagcaggacaggtacttgttcctgtttgacaaggtggtcatcgtctgcaagcggaagggctacagctacgagctcaaggagatcatcgagctgctgttccacaagatgaccgacgaccccatgaacaacaaggacgtcaagaagtggtcctacggcttctacctaattcaccttcaaggaaagcagggcttccagtttttctgcaaaacagaagatatgaagaggaagtggatggagcagtttgagatggccatgtcaaacatcaagccagacaaagccaatgccaaccaccacagtttccagatgtacacgtttgacaagaccaccaactgcaaagcctgcaaaatgttcctcaggggcaccttctaccagggatacatgtgtaccaagtgtggcgtcggggcacacaaggagtgcctggaagtgatacctccctgcaagttcagaactagtggggacagggacgcctccggagcgggaccaggtcccaagatggtggccatgcagaattaccatggcaacccagcccctcccgggaagcctgtgctgaccttccagacgggcgacgtgcttgagctgctgaggggcgaccctgagtctccgtggtgggagggtcgtctggtacaaaccaggaagtcagggtatttccccagctcatctgtgaagccctgccctgtggatggaaggccgcccatcagccggccgccatcccgggagatcgactacactgcatacccctggtttgcaggtaacatggagaggcagcagacggacaacctgctcaagtcccacgccagcgggacctacctgatcagggagcggcctgccgaggctgagcgctttgcaataagcatcaagttcaatgatgaggtgaagcacatcaaggtggtggagaaggacaactggatccacatcacagaggccaagaaattcgacagcctcctggagttggtggagtactaccagtgccactcactgaaggagagcttcaagcagctggacaccacactcaagtacccctacaagtcccgggaacgttcggcctccagggcctccagccggtccccagcttcctgtgcttcctacaacttttcttttctcagtcctcagggcctcagctttgcttctcagggcccctccgctcccttctggtcagtgttcacgccccgcgtcatcggcacagctgtggccaggtataactttgccgcccgagatatgagggagctttcgctgcgggagggtgacgtggtgaggatctacagccgcatcggcggagaccagggctggtggaagggcgagaccaacggacggattggctggtttccttcaacgtacgtagaagaggagggcatccagtgacggcaggaacgtggacaagactcgcagattttcttgggagagtcactccagccctgaagtctgtctctagctcctctgtgactcagaggggaaataccaacctcccagtcttccactgcccacagggatagggagggtgttgagaatcctaaactcgaaccgtttcactgtcagcctgccctcggcgacccatcactgggtatgctattgtacatagaggaaacctgggctagccccacccagagcgcagaggagggggcaccgacagcgctgcgagccaggctctgggtagtggctgaggccagaggcccatcgcctgcccctgtccaactgagatggccttcaggagcctaggtttgaacagcagatgctgtcccaggaagggctagggacatcggaggggacctgcccccacaccctctgctcagcccctggactcagccttgcctgtcttttcctgctgctcccagggggaggtgtcagacctcgggaggcagacgggaccagagccaggctgttcactgtgggcccacttgccccactgtgctagggcgcgggaggagagagcactgtggtcgccctctgcagccactctggctcccaagacttccctgactcccccactcccctccttgccaggggcacacccggaccccacacggcaggcccctctcttgggaggggcctttggaatgatgaaattccaaccctgctgcccggtcagcggtaccgtttcctgccctctctctgagaggccctttctggagtcctgggaaggtgtctgcctggccgcgctgccagatcagtacatcttttgtaaaaaccctgaaatgggcagggaagaaaacagggatttcccctctctagatccctgccaggtccctctccaggaggcccctctgctctcctgaagggtggtccctgagggtctgcccagccttggcacgagaggttggttccagcccctggcagggcttccttccaagggcccctgcagcctacaaactgggcctcgggcgactcaaaataagtgctcttgggggtggctctaccccattacctcccccagccacaactcctggccttcgacttctggctgggttagccagaccctggtttctctaccctgatgttgcatgagacctggtaacagtgtctccctcccagctccttgccaaagcctctgttgagacctgggcttcttgtagccccttctccctctggccagctgcacagcctgtgggaggtgcccggcccaggctgggtgtgggggaagctggtccctgctgtgggtggcgctggggacctaggggctccttctgaggttggccttgtggcctctgggctgtatgcctctggggtgtagggaagaggcgggaggagtcatggggatggggagcggcagggggagagaggggccctcgacaaaggcttgggaaatgaggggaggtggaggcagggcaggggaagcgaagagtcagccttggagagagcaccctggggcctccgtgtcggggtacacccagcactttgcgacctgcggcccagcaggcgcggaggatggcggggaggaagccagcagcccctgtgtttactgtcgtcagaaaggtcttgtgttttggttttggggtttttgttttgtttgtgttttgtttggcttgtttgttttttaaggggaaaaaagtttgtaattatttcatccaaatctcccgttatatatctgtgaataataagagattttataatagcaagaaaatgatgtatattttagtttgttgacaaataagtcatcatgatcacgaaggacactgagaaaaaataatttagaaccctggtttttgtgaatttttttgttttgtgtttctttgttttgagatttgtgtttggtttggtttttgcactgcactaaggcaggagggttggagggctgggtgcagcctgggagtccgatggttttcagcaggagacggggtgtcccctgcagggggctaaactgcaggggcctgagattagctgtgaacatgtgggagcccgatgcatgtgggtcagggatctgggggcccccccagctggcgggaaccccaaatggacacaaactgtacatttgccaatgggtttttttcagaccatggtttttacttgcaaataaacctgagttcttttctgc

SEQ ID NO: 283950 - DNA, 5101 bp, Artificial Sequence
  derived and/or modified sequence
cgcggattggggagcgctgcggcgactggctgcgtggagcccggcccggggcccgcaggcacttgcgtgtgtgaagcggggagatccggcgcgctgcccgttgcccgccccgcggccgcacgtgggcgggagcggcggcccgagaggagcccgaggagtaggaggaggaagaggaggggacgcacggcggcgcagcgggggacctggggcagcccgcgcgaagccccgccccggccctgagccccgcgcgcgcgcgggcgggatgccccgcggccgctgcactttggctcgagcactgccctgagccggtcgggcccgcgggcgccatggagcagtggcggcagtgcggccgctggctcatcgattgcaaggtcctgccgcccaaccaccgggtggtgtggccctcggccgtggtcttcgacctggcgcaggcgctgcgcgacggggtccttctgtgccagctgctgcacaacctctcccccggctccatcgacctcaaggacatcaacttccggccgcagatgtcccagtttctgtgtttgaagaacatacgcaccttcctgaaagtctgccacgataaatttggattaaggaacagcgagctgtttgacccctttgacctcttcgatgtgcgagactttggaaaggtcatctccgcggtgtcgaggctctccctgcacagcatcgcgcagaacaaagggatcaggccttttccctcagaggagaccacagagaatgacgatgacgtctaccgcagcctggaggagctggccgacgagcatgacctgggggaggacatctacgactgcgtcccgtgtgaggatggaggggacgacatctacgaggacatcatcaaggtggaggtgcagcagcccatgaaaatgggcatgactgaagatgacaagaggaactgctgcctgctggagatccaggagaccgaggccaagtactaccgcaccctggaggacattgagaagaactacatgagccccctgcggctggtgctgagcccggcggacatggcagctgtcttcattaacctggaggacctgatcaaggtgcatcacagcttcctgagggccatcgacgtgtccgtgatggtggggggcagcacgctggccaaggtcttcctcgatttcaaggaaaggcttctgatctacggggagtactgcagccacatggagcacgcccagaacacactgaaccagctcctggccagccgggaggacttcaggcagaaagtcgaggagtgcacactgaaggtccaggatggaaaatttaagctgcaagacctgctggtggtccccatgcagagggtgctcaaataccacctgctcttgaaggagcttctgagccattctgcggaacggcctgagaggcagcagctcaaagaagcactggaagccatgcaggacttggcgatgtacatcaatgaagttaaacgggacaaggagaccttgaggaaaatcagcgaatttcagagttctatagaaaatttgcaagtgaaactggaggaatttggaagaccaaagattgacggggaactgaaagtccggtccatagtcaaccacaccaagcaggacaggtacttgttcctgtttgacaaggtggtcatcgtctgcaagcggaagggctacagctacgagctcaaggagatcatcgagctgctgttccacaagatgaccgacgaccccatgaacaacaaggacgtcaagaagtggtcctacggcttctacctaattcaccttcaaggaaagcagggcttccagtttttctgcaaaacagaagatatgaagaggaagtggatggagcagtttgagatggccatgtcaaacatcaagccagacaaagccaatgccaaccaccacagtttccagatgtacacgtttgacaagaccaccaactgcaaagcctgcaaaatgttcctcaggggcaccttctaccagggatacatgtgtaccaagtgtggcgtcggggcacacaaggagtgcctggaagtgatacctccctgcaagttcacttctcctgcagatctggacgcctccggagcgggaccaggtcccaagatggtggccatgcagaattaccatggcaacccagcccctcccgggaagcctgtgctgaccttccagacgggcgacgtgcttgagctgctgaggggcgaccctgagtctccgtggtgggagggtcgtctggtacaaaccaggaagtcagggtatttccccagctcatctgtgaagccctgccctgtggatggaaggccgcccatcagccggccgccatcccgggagatcgactacactgcatacccctggtttgcaggtaacatggagaggcagcagacggacaacctgctcaagtcccacgccagcgggacctacctgatcagggagcggcctgccgaggctgagcgctttgcaataagcatcaagttcaatgatgaggtgaagcacatcaaggtggtggagaaggacaactggatccacatcacagaggccaagaaattcgacagcctcctggagttggtggagtactaccagtgccactcactgaaggagagcttcaagcagctggacaccacactcaagtacccctacaagtcccgggaacgttcggcctccagggcctccagccggtccccagcttcctgtgcttcctacaacttttcttttctcagtcctcagggcctcagctttgcttctcagggcccctccgctcccttctggtcagtgttcacgccccgcgtcatcggcacagctgtggccaggtataactttgccgcccgagatatgagggagctttcgctgcgggagggtgacgtggtgaggatctacagccgcatcggcggagaccagggctggtggaagggcgagaccaacggacggattggctggtttccttcaacgtacgtagaagaggagggcatccagtgacggcaggaacgtggacaagactcgcagattttcttgggagagtcactccagccctgaagtctgtctctagctcctctgtgactcagaggggaaataccaacctcccagtcttccactgcccacagggatagggagggtgttgagaatcctaaactcgaaccgtttcactgtcagcctgccctcggcgacccatcactgggtatgctattgtacatagaggaaacctgggctagccccacccagagcgcagaggagggggcaccgacagcgctgcgagccaggctctgggtagtggctgaggccagaggcccatcgcctgcccctgtccaactgagatggccttcaggagcctaggtttgaacagcagatgctgtcccaggaagggctagggacatcggaggggacctgcccccacaccctctgctcagcccctggactcagccttgcctgtcttttcctgctgctcccagggggaggtgtcagacctcgggaggcagacgggaccagagccaggctgttcactgtgggcccacttgccccactgtgctagggcgcgggaggagagagcactgtggtcgccctctgcagccactctggctcccaagacttccctgactcccccactcccctccttgccaggggcacacccggaccccacacggcaggcccctctcttgggaggggcctttggaatgatgaaattccaaccctgctgcccggtcagcggtaccgtttcctgccctctctctgagaggccctttctggagtcctgggaaggtgtctgcctggccgcgctgccagatcagtacatcttttgtaaaaaccctgaaatgggcagggaagaaaacagggatttcccctctctagatccctgccaggtccctctccaggaggcccctctgctctcctgaagggtggtccctgagggtctgcccagccttggcacgagaggttggttccagcccctggcagggcttccttccaagggcccctgcagcctacaaactgggcctcgggcgactcaaaataagtgctcttgggggtggctctaccccattacctcccccagccacaactcctggccttcgacttctggctgggttagccagaccctggtttctctaccctgatgttgcatgagacctggtaacagtgtctccctcccagctccttgccaaagcctctgttgagacctgggcttcttgtagccccttctccctctggccagctgcacagcctgtgggaggtgcccggcccaggctgggtgtgggggaagctggtccctgctgtgggtggcgctggggacctaggggctccttctgaggttggccttgtggcctctgggctgtatgcctctggggtgtagggaagaggcgggaggagtcatggggatggggagcggcagggggagagaggggccctcgacaaaggcttgggaaatgaggggaggtggaggcagggcaggggaagcgaagagtcagccttggagagagcaccctggggcctccgtgtcggggtacacccagcactttgcgacctgcggcccagcaggcgcggaggatggcggggaggaagccagcagcccctgtgtttactgtcgtcagaaaggtcttgtgttttggttttggggtttttgttttgtttgtgttttgtttggcttgtttgttttttaaggggaaaaaagtttgtaattatttcatccaaatctcccgttatatatctgtgaataataagagattttataatagcaagaaaatgatgtatattttagtttgttgacaaataagtcatcatgatcacgaaggacactgagaaaaaataatttagaaccctggtttttgtgaatttttttgttttgtgtttctttgttttgagatttgtgtttggtttggtttttgcactgcactaaggcaggagggttggagggctgggtgcagcctgggagtccgatggttttcagcaggagacggggtgtcccctgcagggggctaaactgcaggggcctgagattagctgtgaacatgtgggagcccgatgcatgtgggtcagggatctgggggcccccccagctggcgggaaccccaaatggacacaaactgtacatttgccaatgggtttttttcagaccatggtttttacttgcaaataaacctgagttcttttctgca

SEQ ID NO: 283951 - protein, 556 aa, Artificial Sequence
  derived and/or modified sequence
MSTATTVAPAGIPATPGPVNPPPPEVSNPSKPGRKTNQLQYMQNVVVKTLWKHQFAWPFYQPVDAIKLNLPDYHKIIKNPMDMGTIKKRLENNYYWSASECMQDFNTMFTNCYIYNKPTDDIVLMAQALEKIFLQKVAQMPQEEVELLPPAPKGKGRKPAAGAQSAGTQQVAAVSSVSPATPFQSVPPTVSQTPVIAATPVPTITANVTSVPVPPAAAPPPPATPIVPVVPPTPPVVKKKGVKRKADTTTPTTSAITASRSESPPPLSDPKQAKVVARRESGGRPIKPPKKDLEDGEVPQHAGKKGKLSEHLRYCDSILREMLSKKHAAYAWPFYKPVDAEALELHDYHDIIKHPMDLSTVKRKMDGREYPDAQGFAADVRLMFSNCYKYNPPDHEVVAMARKLQDVFEMRFAKMPDEPVEAPALPAPAAPMVSKGAESSRSSEESSSDSGSSDSEEERATRLAELQEQLKAVHEQLAALSQAPVNKPKKKKEKKEKEKKKKDKEKEKEKHKVKAEEEKKAKVAPPAKQAQQKKAPAKKANSTTTAGRDHFLTCGV

SEQ ID NO: 283952 - protein, 20 aa, Artificial Sequence
  derived and/or modified sequence
MSTATTVAPAGIPATPGPVN

SEQ ID NO: 283953 - DNA, 1671 bp, Artificial Sequence
  derived and/or modified sequence
atgagtactgctacgaccgtcgctccagctgggatccccgcgacacccggccctgtgaaccctccaccaccagaagtttcaaacccatccaaacccggaagaaagaccaatcagctgcagtatatgcagaacgttgtggtgaagacgctatggaaacatcagttcgcttggcccttttatcagcctgtggatgctattaaattgaacctgcccgactaccacaaaataatcaaaaatcccatggatatggggaccatcaagaaacgcttggaaaacaactattattggtctgcctctgaatgtatgcaggactttaataccatgttcacaaattgttacatctacaataagccgaccgatgacatagtgttgatggcccaggctctcgaaaagatcttcctccagaaggtggcccaaatgccgcaagaggaggtagaattgctcccccctgcgcccaaaggaaagggtcgcaaacctgctgccggtgctcagtcagctggaacccagcaggttgcagcagttagttctgttagtcccgctaccccgtttcagagcgtgcctcctacagtcagccaaacccccgtaatagcggccacgcctgtgccaacgattaccgccaatgtgacctccgtgccggtgccacccgcagccgcgcctccaccaccggccactcccattgttccagtcgtacctcccacaccaccagttgttaaaaagaagggcgtcaaaaggaaagccgataccaccacaccgaccacaagcgctatcacagctagccggagtgagtcccctccccctctcagtgatcccaaacaggctaaggttgtggctcgtcgagaatccggcggtcgccctataaagccacctaaaaaggacctcgaggatggcgaagttccacaacatgctggcaaaaaggggaaactcagcgaacatctgagatattgtgactccatcctgcgggagatgctttcaaagaaacacgccgcatatgcatggccattctataagccggtggatgcggaggctctggagcttcacgattatcatgatattatcaaacatcccatggacctatctacagtgaaaaggaagatggatggtagggaatacccggacgctcagggatttgcagccgatgtgagactgatgttctctaattgctacaagtacaaccctccagatcacgaggtggtagcaatggccaggaaactgcaggatgtgtttgaaatgcgctttgctaaaatgcccgatgaacctgttgaagcccccgcactgcccgcccccgccgccccaatggtgtcaaaaggcgcagagtcatcacgcagcagtgaggagtctagttcggatagtggaagttctgattcagaagaggaacgggccacaaggctggccgaattgcaggagcagctgaaggccgtgcacgagcagctggccgccctgagtcaagcgccagtgaataaaccgaagaaaaagaaggagaaaaaagaaaaggagaaaaaaaagaaagataaagaaaaggaaaaggagaagcataaagtaaaagcagaagaggagaagaaagcgaaggttgcgcctcctgccaaacaagcccagcagaaaaaagcccccgccaagaaggccaatagtacaactaccgccgggagagatcactttctcacatgcggcgtgtag

SEQ ID NO: 283954 - DNA, 1671 bp, Artificial Sequence
  derived and/or modified sequence
atgagtactgccactactgttgcaccagccgggatacctgctaccccgggtcctgtgaaccctccacctcctgaagtgtccaacccttctaaaccggggcgtaagacaaaccaactacagtacatgcagaacgtggtagtcaaaaccctgtggaaacaccagttcgcatggccattctatcagcccgtagacgcaatcaagctaaacctgcctgactatcataagattatcaaaaaccccatggacatgggtactattaaaaagcggttggagaacaattactactggtcagccagcgaatgtatgcaagatttcaatactatgttcacaaattgttatatctacaataaacctactgatgatatcgtgctgatggcccaggctctggagaagatatttctccagaaagttgcccaaatgcctcaggaagaggttgagcttttgccgcccgctcccaaagggaaaggcagaaagcccgccgccggcgcgcagtctgcaggaactcagcaggttgccgccgtgagtagcgtatcaccagccacgccattccagtccgtgccccctaccgtgagtcaaacgcccgttatcgctgccacccccgtgccaacaattacggcgaacgtgacttccgtccctgttccaccggcagcagccccacctcctcccgctacccccattgtgccagtggttcctcccacccctccggttgtaaagaagaagggggtcaaacgcaaggccgatacaactacccctacgacatcagccatcaccgcaagtcggagcgagtcgcccccacccctgagcgaccccaagcaggcaaaggtcgtggccaggagagagtcaggtggaaggccaattaagccaccaaagaaagatcttgaagacggggaggttccgcagcacgcgggaaaaaaaggtaaactgtctgaacatctgcgttactgtgatagtattctgcgtgaaatgctatctaaaaagcacgccgcttatgcctggcctttttataaaccagtggacgctgaggcacttgagctgcatgactatcacgatatcatcaaacacccgatggacctgagcactgtgaagagaaaaatggacggcagggaatatccggatgcacaaggtttcgctgccgatgtcagactgatgttttccaattgctacaagtacaacccacccgatcacgaggtggtcgcaatggccaggaaactgcaggacgtgtttgagatgcgctttgccaagatgccggatgaaccggtagaggctcccgccctgcccgcccccgctgcacccatggtttccaagggcgctgagagttcacgatccagcgaggagagcagctcggactctgggtcctctgacagcgaggaggaacgggcgacccggctggctgaactgcaggaacagctgaaagccgtacacgagcaactggccgccctctcacaggcccccgttaacaagccaaaaaaaaagaaagaaaagaaagagaaagagaaaaaaaaaaaggataaagaaaaggaaaaggagaagcacaaggtcaaggcagaagaggagaagaaggccaaagtggcaccacccgccaaacaagcccagcagaaaaaggcccccgctaagaaggcaaactcaaccaccaccgcaggccgggaccattttttgacatgcggagtctag

SEQ ID NO: 283955 - DNA, 225 bp, Artificial Sequence
  derived and/or modified sequence
atgagcacagccaccaccgtggcccccgctgggattcccgccacaccgggcccagtgaatcccccccctcctgaagtctccaatccttccaaacctggtcgcaagaccaaccagcttcagtacatgcagaatgttgtggttaagacactgtggaagcaccagtttgcctggcctttttaccagcctgtggatgcaattaaactgaatctcccggattaccactag

SEQ ID NO: 283956 - DNA, 1671 bp, Artificial Sequence
  derived and/or modified sequence
atgagcacagccaccaccgtggccccagctggcatcccagccaccccaggccctgtgaaccccccacctcctgaggtgagcaaccccagcaagccaggcaggaagaccaaccagctgcagtacatgcagaatgtggtggtgaagaccctgtggaagcaccagtttgcctggcccttctaccagcctgtggatgccatcaagctgaacctgcctgactaccacaagatcatcaagaaccccatggacatgggcaccatcaagaagaggctggagaacaactactactggagcgccagcgagtgcatgcaggacttcaacaccatgttcaccaactgctacatctacaacaagcccacagatgacatcgtgctgatggcccaggccctggagaagatcttcctgcagaaggtggcccagatgccccaggaggaggtggagctgctgcccccagcccccaagggcaaaggaaggaagccagctgctggggcccagagcgctggcacccagcaggtggccgctgtgtcctctgtgtccccagccacccccttccagagcgtgcccccaacagtgtcccagacccctgtgattgctgccacccctgtgcccaccatcacagccaacgtgacctctgtgcctgtgcccccagctgctgcccctcctcctccagccacccccatcgtgcctgtggtgccccccaccccacctgtggtgaagaagaagggcgtgaagaggaaggctgacaccaccacccccaccaccagcgccatcacagccagccgctctgagagccccccacccctgagtgaccccaagcaggccaaggtggtggcccggcgggagagcggcggccggcccatcaagccacccaagaaggacctggaggatggagaggtgccccagcacgccggcaagaagggcaagctgtctgagcacctgcgctactgtgacagcatcctgcgggagatgctgagcaagaagcacgccgcctatgcctggcccttctacaagcctgtggatgctgaggccctggagctgcatgactaccatgacatcatcaagcaccccatggacctgagcacagtgaagaggaagatggatggccgggagtacccagatgcccagggctttgctgctgatgtgcggctgatgttcagcaactgctacaagtacaaccccccagaccacgaggtggtggccatggccaggaagctgcaggatgtgtttgagatgagatttgccaagatgccagatgagcctgtggaggccccagccctgcctgccccagctgcccccatggtgtccaaaggagctgagagcagccgcagcagcgaggagagcagcagtgacagcggcagcagtgacagcgaggaggagcgggccacccggctggccgagctgcaggagcagctgaaggctgtgcatgagcagctggccgccctgagccaggcccctgtgaacaagcccaagaagaagaaggagaagaaggagaaggagaagaagaagaaggacaaggagaaggagaaggagaagcacaaggtgaaggccgaggaggagaagaaggccaaggtggcccccccagccaagcaggcccagcagaagaaggccccagccaagaaggccaacagcaccaccacagctggccgggaccacttcctgacctgtggggtgtag

SEQ ID NO: 283957 - DNA, 225 bp, Artificial Sequence
  derived and/or modified sequence
atgagcacagccaccaccgtggccccagctggcatcccagccaccccaggccctgtgaaccccccacctcctgaggtgagcaaccccagcaagccaggcaggaagaccaaccagctgcagtacatgcagaatgtggtggtgaagaccctgtggaagcaccagtttgcctggcccttctaccagcctgtggatgccatcaagctgaacctgcctgactaccactag

SEQ ID NO: 283958 - DNA, 1671 bp, Artificial Sequence
  derived and/or modified sequence
atgagcaccgccaccaccgtggcccccgccggcatccccgccaccccgggtccagtcaaccctccgcctcccgaagtaagtaaccccagtaagcccggccgcaagacgaatcagcttcagtacatgcagaatgtcgttgttaaaacactctggaagcatcagttcgcctggccattttaccaacccgtagacgccatcaaattaaacttgccagattaccacaagattattaagaatccaatggatatgggaaccataaagaagcggctggagaacaactattactggtccgcttccgaatgtatgcaggactttaacacgatgtttaccaattgttacatttataacaagcccactgacgatattgtgctaatggcgcaggcccttgagaagatttttctgcaaaaggtggcccagatgccacaggaagaagtggaactgctgcctcccgcccccaaggggaagggtcgcaaacccgcggcgggcgcccagagtgccggcactcagcaggtggcagcagtcagcagcgttagcccagcgacaccctttcagtctgtgccaccaactgttagccagacacccgtgatcgctgcaacccccgtcccaacaatcactgccaatgtgacctccgtacccgtacctcctgccgcagctccaccccctcctgccacaccaattgtaccggtggtgccacctacccctccagtggtaaagaagaagggcgtgaaaagaaaggcggacaccaccaccccaaccacatcagcaattaccgctagccggagtgagagtcccccaccattgtccgaccccaaacaggccaaggtggtcgcgagacgggaaagcgggggccgccccataaaacccccgaaaaaggacctagaggatggtgaggttcctcaacatgccggtaagaaaggcaaactatccgaacacttgcgctattgcgacagcatattgagagagatgctctccaagaagcacgctgcgtatgcatggcccttctacaagcctgttgatgccgaggcgctggagctacacgactaccatgacatcataaagcaccccatggacctgtcaactgtcaagcgtaagatggacggcagagagtatcccgatgcccaagggtttgctgcggacgtgcggctcatgttctctaactgttacaaatacaaccctccagatcacgaggtcgttgcaatggcccgcaagttgcaggacgtgttcgaaatgcgatttgccaagatgcccgacgagcctgtggaagcacctgccctgccggcccctgctgctcccatggtgtccaagggagccgaatcgagcagaagctccgaggagtctagctccgactctggctcgagcgatagtgaggaagagcgggccacgaggctggccgaattacaggagcagctcaaagcggtgcatgaacagttggctgctctaagccaggctcccgtgaacaaaccgaagaagaaaaaagaaaaaaaggaaaaggagaagaagaaaaaagacaaagaaaaagaaaaagaaaagcacaaagtcaaggctgaggaggagaagaaggcaaaagtggcccccccagccaagcaagcacagcagaagaaggcccccgctaaaaaagcaaactccacaacaacagcaggacgtgaccattttctgacgtgcggcgtatag

SEQ ID NO: 283959 - DNA, 1671 bp, Artificial Sequence
  derived and/or modified sequence
atgagcaccgccaccaccgtggcccccgccggcatccccgccacccccggcccggtcaaccctccccccccggaggtctcaaacccctcaaaacccggtcgcaaaactaatcaattgcagtatatgcaaaatgtcgttgtgaaaaccctatggaagcatcaattcgcctggccattttaccagcccgtggacgccataaagctgaacctgccggactatcataagattatcaagaatccaatggacatgggtactattaagaagaggctggagaacaactattactggtcagcatcagaatgtatgcaagactttaatactatgttcaccaactgctacatttataacaagccgaccgacgatattgtgcttatggcacaggccctggagaagattttccttcagaaggtcgcccagatgccacaggaggaggtagagctactcccgccagcccctaaggggaaaggtcgtaagccagccgccggcgcccaatcagccggtacccagcaagtcgcggccgtctcatccgtgagcccagctactcctttccagtcagtaccccctacagtgtcccagacgcctgtgatcgccgccaccccagtgccgactatcactgctaacgtgacaagcgtgcctgttccacccgccgccgccccaccacctccagcaaccccaatcgtgcctgtagtgcctcccaccccacccgtcgtgaagaaaaaaggggtaaagagaaaagcagacaccaccactccgaccacatctgctattacagctagtagaagcgaaagcccgccccctctgtccgacccaaagcaagcaaaagtggtggctagacgggaatcaggtggacgccccattaagcccccgaagaaggaccttgaggacggggaagtacctcaacatgctgggaaaaagggcaagctgtcagagcatttaaggtactgcgatagcatcctgagggagatgctgtctaaaaagcatgccgcttacgcatggcccttttataaaccggtcgacgccgaagcgttagagctgcatgattaccacgatatcataaaacaccctatggatcttagcactgttaagcgtaagatggacggccgagagtatccggatgcgcagggttttgctgcagacgtcaggctgatgttcagcaactgctataagtacaaccctccagatcacgaggtcgtggcgatggcccgaaagctgcaagatgttttcgagatgcgctttgcaaagatgcccgatgaaccagtggaggcccctgcgctcccggcccctgccgcacccatggtgtcgaaaggggcagaaagcagtcgctcttctgaggagtcatctagtgactccggcagttcagatagcgaagaggaaagagccactcgcctggccgagttacaggaacagcttaaagctgtccacgagcagttggccgccttatcacaggcaccggtgaataagccaaagaagaagaaggagaagaaggaaaaggagaaaaagaaaaaagacaaggaaaaggaaaaagagaaacataaggtcaaagccgaagaagagaagaaggctaaagtggctccccctgccaagcaagcacagcagaagaaggcaccagcgaaaaaagccaactctaccaccaccgccgggcgggatcatttcctaacctgcggagtatag

SEQ ID NO: 283960 - DNA, 225 bp, Artificial Sequence
  derived and/or modified sequence
atgagcaccgccaccaccgtggcccccgccggcatccccgccacccccgggcctgtgaatccaccccctcctgaagtctccaatccgtccaagcccggtcggaagaccaatcagctccaatacatgcagaatgttgtcgtcaaaacactctggaagcatcagttcgcatggcctttttatcagccagtggatgcgattaaactgaacctgcctgactaccactag

SEQ ID NO: 283961 - DNA, 1671 bp, Artificial Sequence
  derived and/or modified sequence
atgtccacagcaacgacagttgcccctgccggtatacccgctacgcccggacccgtgaaccccccacctccggaggtgtcaaatccttctaaacccggtagaaaaacaaaccagctccagtacatgcagaacgtggtcgtgaaaactctgtggaagcatcagtttgcgtggccattctatcagccggttgacgctatcaagcttaatctgcccgattaccataaaatcattaaaaacccaatggacatggggacaatcaagaaacggctcgaaaataattactactggtcagcttccgaatgcatgcaagactttaatacaatgtttaccaactgttatatctataacaaacctacagacgatatagttcttatggcccaggcgctcgagaagatcttccttcagaaggttgctcagatgccccaagaggaggtggagctgttgcctccagcccctaagggtaagggtagaaagccagcggctggggcacaatcggctggtacccaacaggtggccgcagttagttctgtctcccctgcgactccctttcagtccgttcctccaacagtatcccagaccccggttatcgcagcgaccccggtcccaacaattacggctaacgtgacatccgtgcccgtcccaccagcagctgcgcctccacccccagcaacacccattgtccctgtggtgcccccaacccctcccgtagtgaaaaagaagggagtgaagagaaaggccgacacaacgactcctactacaagcgccattaccgcaagtcggagcgaatcgccgccaccactgagcgatccaaagcaggccaaggtcgttgccagaagggaatcaggtggtagaccaattaagcccccaaagaaggatctggaggacggtgaggtgccacagcacgccggaaaaaaagggaaactgagtgagcatctgagatattgtgactccattctccgagagatgctatccaagaagcatgccgcatacgcgtggcctttttataagcccgtcgatgctgaagcgctcgaactgcatgactatcacgacatcattaagcatcccatggacctgtcgacagtgaaaaggaagatggacggacgcgagtatccagatgcacagggcttcgcggcagacgtccggctcatgttctccaactgctataagtataaccctcccgatcacgaagtagtggcaatggccaggaaacttcaggatgtgttcgaaatgcggttcgccaaaatgccagacgaaccagttgaagcacctgcactgcccgcacccgctgccccaatggtctctaagggagcagagtcttctcgcagcagcgaagagagctcaagtgattcagggtcatcagattcagaggaagagcgagccacccgcctggctgagctgcaggagcagttgaaggcggtgcacgaacagctcgctgcactctcccaggcgccagtgaacaagccgaagaaaaagaaggagaagaaggagaaggagaaaaagaagaaagataaggaaaaggaaaaagaaaaacacaaggttaaagccgaggaggaaaaaaaagccaaagtggctcctcctgccaagcaggcccagcagaagaaggcacctgccaagaaggctaactccaccacaaccgcaggacgcgaccactttcttacctgtggcgtgtag

SEQ ID NO: 283962 - DNA, 1671 bp, Artificial Sequence
  derived and/or modified sequence
atgagtacggccacaaccgtggctcccgcagggattcccgcaaccccaggtccagtgaacccccctcccccagaagtctcaaatccgagcaagcctgggaggaagaccaaccaactgcaatacatgcaaaacgtcgtcgtcaagactctctggaagcatcagttcgcatggccattttatcagcctgttgacgcaattaagctcaatctcccagattaccataaaataattaagaaccccatggacatgggaaccattaaaaaacgcctggagaacaattattattggagtgcctcagagtgtatgcaggacttcaatacaatgttcacgaattgctacatctataacaagcctaccgatgatatcgttttaatggcccaagcgctagaaaaaatattcctccagaaagtcgcccagatgccacaggaggaggtggagcttctgcctccagcccctaagggcaagggcagaaagcctgccgcaggagcccagagtgccggaacacagcaagttgcggctgttagctccgtgagtccagcaacgccgtttcagtctgtccctccaacggtgtcccagacccctgttatcgcagcaacccccgtccccaccatcactgcaaacgtgacttccgtcccagtgcccccagctgcggcacctccaccgcctgccacacccatagtccccgtcgtgcctcccacaccccctgtcgtgaagaagaaaggagtgaagcggaaagccgacaccaccaccccgactacctcagccattaccgcatcaaggtccgaatcaccccctccattgtctgatccaaaacaggccaaggtcgtcgctcggcgagagtctggcggtcggccaataaagcctcccaaaaaggatctggaggatggagaggttccgcagcatgctggcaagaagggcaaattgagtgagcaccttcgatactgcgattctatactgagagagatgttgtccaagaagcatgcagcatacgcctggcctttctacaaacccgtcgatgctgaggctctggaactacacgactaccacgacatcattaagcatcctatggatctttctaccgtgaagagaaaaatggacggacgcgagtatccggacgcacagggcttcgccgcagatgtgagactcatgttctcaaattgctacaagtacaaccctcctgatcatgaagtagtcgccatggctcggaagctacaggacgttttcgaaatgaggttcgctaaaatgccagacgaacccgtggaagcccctgctctgcctgccccagcagccccaatggtttccaagggcgctgagtcgtcacggtcatccgaggaaagctcttccgatagtggttcttccgattccgaggaagagagggctactcgactagctgaactccaggagcagttaaaagctgtgcatgaacagctggctgccttgagtcaagcgccagtgaataaacctaagaagaaaaaggaaaagaaagaaaaggaaaaaaaaaaaaaggataaagaaaaagagaaggaaaaacataaggtgaaagcagaagaggagaaaaaggctaaagtagcaccacctgccaaacaagcccagcagaaaaaggctcccgctaaaaaggccaatagtactactactgccggacgcgaccatttcctcacgtgcggagtgtag

SEQ ID NO: 283963 - DNA, 225 bp, Artificial Sequence
  derived and/or modified sequence
atgtctacggctacaacagtggccccagccggtatcccagcaacaccgggtccagtcaaccctcctcctcctgaggtttcaaatccttccaagcctgggcgaaaaaccaaccagctccagtatatgcagaatgtcgtggtgaagaccctgtggaaacatcaatttgcctggcctttctaccagcctgtggacgctattaagctgaaccttcccgactaccactag

SEQ ID NO: 283964 - DNA, 1810 bp, Artificial Sequence
  derived and/or modified sequence
gacggccgccggagccgcgaggccaactgtcgcctggttgggcccggaaatgggacgtcgcgctttctcagggagcgtagaagcagccagggcctctccaagccgctgctgtgacagaaagtgagtgagctgccggaggatgtccaccgccacgacagtcgcccccgcggggatcccggcgaccccgggccctgtgaacccaccccccccggaggtctccaaccccagcaagcccggccgcaagaccaaccagctgcagtacatgcagaatgtggtggtgaagacgctctggaaacaccagttcgcctggcccttctaccagcccgtggacgcaatcaaattgaacctgccggattatcataaaataattaaaaacccaatggatatggggactattaagaagagactagaaaataattattattggagtgcaagcgaatgtatgcaggacttcaacaccatgtttacaaattgttacatttataacaagcccacagatgacatagtgctaatggcccaagctttagagaaaatttttctacaaaaagtggcccagatgccccaagaggaagttgaattattaccccctgctccaaagggcaaaggtcggaagccggctgcgggagcccagagcgcaggtacacagcaagtggcggccgtgtcctctgtctccccagcgaccccctttcagagcgtgccccccaccgtctcccagacgcccgtcatcgctgccacccctgtaccaaccatcactgcaaacgtcacgtcggtcccagtccccccagctgccgccccacctcctcctgccacacccatcgtccccgtggtccctcctacgccgcctgtcgtcaagaaaaagggcgtgaagcggaaagcagacacaaccactcccacgacgtcggccatcactgccagccggagtgagtcgcccccgccgttgtcagaccccaagcaggccaaagtggtggcccggcgggagagtggtggccgccccatcaagcctcccaagaaggacctggaggacggcgaggtgccccagcacgcaggcaagaagggcaagctgtcggagcacctacgctactgcgacagcatcctcagggagatgctatccaagaagcacgcggcctacgcctggcccttctacaagccagtggatgccgaggccctggagctgcacgactaccacgacatcatcaagcacccgatggacctcagcaccgtgaaaaggaagatggatggccgagagtacccagacgcacagggctttgctgctgatgtccggctgatgttctcgaattgctacaaatacaatcccccagaccacgaggttgtggccatggcccggaagctccaggacgtgtttgagatgaggtttgccaagatgccagatgagcccgtggaggcaccggcgctgcctgcccccgcggcccccatggtgagcaagggcgctgagagcagccgtagcagtgaggagagctcttcggactcaggcagctcggactcggaggaggagcgggccaccaggctggcggagctgcaggagcagctgaaggccgtgcacgagcagctggccgccctgtctcaggccccagtaaacaaaccaaagaagaagaaggagaagaaggagaaggagaagaagaagaaggacaaggagaaggagaaggagaagcacaaagtgaaggccgaggaagagaagaaggccaaggtggctccgcctgccaagcaggctcagcagaagaaggctcctgccaagaaggccaacagcacgaccacggccggcagagatcatttcttgacctgtggagtttga

SEQ ID NO: 283965 - DNA, 2529 bp, Artificial Sequence
  derived and/or modified sequence
ccaggctaattaggcgcgcggtttgtttacaaacacgggctcccggcaggtgcgcgccgccccgcccgtgcgcggccggggttcgagggtggctcccgcgggcctcggggtgcccggacgggggctgcggtgctggctgcgtgcccgcttcttccatgccgtcctggggcaccggaaaatccgccgccaggcgctgtccccgacacgggctgtcgcctggttgggcccggaaatgggacgtcgcgctttctcagggagcgtagaagcagccagggcctctccaagccgctgctgtgacagaaagtgagtgagctgccggaggatgtccaccgccacgacagtcgcccccgcggggatcccggcgaccccgggccctgtgaacccaccccccccggaggtctccaaccccagcaagcccggccgcaagaccaaccagctgcagtacatgcagaatgtggtggtgaagacgctctggaaacaccagttcgcctggcccttctaccagcccgtggacgcaatcaaattgaacctgccggattatcataaaataattaaaaacccaatggatatggggactattaagaagagactagaaaataattattattggagtgcaagcgaatgtatgcaggacttcaacaccatgtttacaaattgttacatttataacaagcccacagatgacatagtgctaatggcccaagctttagagaaaatttttctacaaaaagtggcccagatgccccaagaggaagttgaattattaccccctgctccaaagggcaaaggtcggaagccggctgcgggagcccagagcgcaggtacacagcaagtggcggccgtgtcctctgtctccccagcgaccccctttcagagcgtgccccccaccgtctcccagacgcccgtcatcgctgccacccctgtaccaaccatcactgcaaacgtcacgtcggtcccagtccccccagctgccgccccacctcctcctgccacacccatcgtccccgtggtccctcctacgccgcctgtcgtcaagaaaaagggcgtgaagcggaaagcagacacaaccactcccacgacgtcggccatcactgccagccggagtgagtcgcccccgccgttgtcagaccccaagcaggccaaagtggtggcccggcgggagagtggtggccgccccatcaagcctcccaagaaggacctggaggacggcgaggtgccccagcacgcaggcaagaagggcaagctgtcggagcacctacgctactgcgacagcatcctcagggagatgctatccaagaagcacgcggcctacgcctggcccttctacaagccagtggatgccgaggccctggagctgcacgactaccacgacatcatcaagcacccgatggacctcagcaccgtgaaaaggaagatggatggccgagagtacccagacgcacagggctttgctgctgatgtccggctgatgttctcgaattgctacaaatacaatcccccagaccacgaggttgtggccatggcccggaagctccaggacgtgtttgagatgaggtttgccaagatgccagatgagcccgtggaggcaccggcgctgcctgcccccgcggcccccatggtgagcaagggcgctgagagcagccgtagcagtgaggagagctcttcggactcaggcagctcggactcggaggaggagcgggccaccaggctggcggagctgcaggagcagctgaaggccgtgcacgagcagctggccgccctgtctcaggccccagtaaacaaaccaaagaagaagaaggagaagaaggagaaggagaagaagaagaaggacaaggagaaggagaaggagaagcacaaagtgaaggccgaggaagagaagaaggccaaggtggctccgcctgccaagcaggctcagcagaagaaggctcctgccaagaaggccaacagcacgaccacggccggcagagatcatttcttgacctgtggagtttgagacgcctatggggtgtagagaggaacgaacctctgtaattgtttcctggccaagggctggaaaccccgcagctgggagcgacttttctaaccttggattttctgccttggggcaccactttgggaagaaagcttggtcccagagagcagcctgctgttgggaggaaggggtgtgtgcagtgggctcccacggcaggtagacggagactcaacaccacgttgctctgtctcctgccccagacagctgaagaaaggcggcaagcaggcatctgcctcctacgactcagaggaagaggaggagggcctgcccatgagctacgatgaaaagcgccagcttagcctggacatcaaccggctgcccggggagaagctgggccgggtagtgcacatcatccaatctcgggagccctcgctcagggactccaaccccgacgagatagaaattgactttgagactctgaaacccaccactttgcgggaactggagagatatgtcaagtcttgtttacagaaaaagcaaaggaaaccgttctgtaa

SEQ ID NO: 283966 - DNA, 574 bp, Artificial Sequence
  derived and/or modified sequence
gcactccggtgtccatggctggagctgggctccttctcagtctccggtttgaaacagtggtcaggtggttggaagtgggtggcttagagggcctgatctggccaggcgtgggatcctgacggcagcataagcaggcccccatgttgagctgtgaccgtccatcctcatgcttggaggaagctggcctgcagcctgggagccttcctttgtgccctgaccacccccacatccccaaagctgtcgcctggttgggcccggaaatgggacgtcgcgctttctcagggagcgtagaagcagccagggcctctccaagccgctgctgtgacagaaagtgagtgagctgccggaggatgtccaccgccacgacagtcgcccccgcggggatcccggcgaccccgggccctgtgaacccaccccccccggaggtctccaaccccagcaagcccggccgcaagaccaaccagctgcagtacatgcagaatgtggtggtgaagacgctctggaaacaccagttcgcctggcccttctaccagcccgtggacgcaatcaaattgaacctgccggattatcataa

SEQ ID NO: 283967 - DNA, 599 bp, Artificial Sequence
  derived and/or modified sequence
actgcttggcctcgctcaagggcaccacctccccgcaccgtgtttgggtctgcaaacgtccgtgttgtgccggccccacttcccctggctgtgttgggcccgcaccgtggctgtccacgcatgggtcactcttcagtacattgttgtggccaagctgtcagagcccagtagcaacgagtcgaccccacgagtgggtggttggtgggcagaaggctgccagtggctgagtcccttggcacacctgcctcccagtgtgttccccaagcccccacctgggagcaagtggcatgtgcctgagctccctccaccgcccaggccttccctcccgtgcctgagagcagtggttggagagtcgttctgagctggtcgcgcttcgcctgagcagctttcccgacagcctctcacctgggtggctgggcaatggggctgtcgcctggttgggcccggaaatgggacgtcgcgctttctcagggagcgtagaagcagccagggcctctccaagccgctgctgtgacagaaagtgagtgagctgccggaggatgtccaccgccacgacagtcgcccccgcggggatcccggcgaccccgggccctgtgaac

SEQ ID NO: 283968 - DNA, 1671 bp, Artificial Sequence
  derived and/or modified sequence
atgagcaccgccaccaccgtggcccccgccggcatccccgccacccccggccccgtgaacccccccccccccgaggtgagcaaccccagcaagcccggcagaaagaccaaccagctgcagtacatgcagaacgtggtggtgaagaccctgtggaagcaccagttcgcctggcccttctaccagcccgtggacgccatcaagctgaacctgcccgactaccacaagatcatcaagaaccccatggacatgggcaccatcaagaagagactggagaacaactactactggagcgccagcgagtgcatgcaggacttcaacaccatgttcaccaactgctacatctacaacaagcccaccgacgacatcgtgctgatggcccaggccctggagaagatcttcctgcagaaggtggcccagatgccccaggaggaggtggagctgctgccccccgcccccaagggcaagggcagaaagcccgccgccggcgcccagagcgccggcacccagcaggtggccgccgtgagcagcgtgagccccgccacccccttccagagcgtgccccccaccgtgagccagacccccgtgatcgccgccacccccgtgcccaccatcaccgccaacgtgaccagcgtgcccgtgccccccgccgccgccccccccccccccgccacccccatcgtgcccgtggtgccccccaccccccccgtggtgaagaagaagggcgtgaagagaaaggccgacaccaccacccccaccaccagcgccatcaccgccagcagaagcgagagccccccccccctgagcgaccccaagcaggccaaggtggtggccagaagagagagcggcggcagacccatcaagccccccaagaaggacctggaggacggcgaggtgccccagcacgccggcaagaagggcaagctgagcgagcacctgagatactgcgacagcatcctgagagagatgctgagcaagaagcacgccgcctacgcctggcccttctacaagcccgtggacgccgaggccctggagctgcacgactaccacgacatcatcaagcaccccatggacctgagcaccgtgaagagaaagatggacggcagagagtaccccgacgcccagggcttcgccgccgacgtgagactgatgttcagcaactgctacaagtacaacccccccgaccacgaggtggtggccatggccagaaagctgcaggacgtgttcgagatgagattcgccaagatgcccgacgagcccgtggaggcccccgccctgcccgcccccgccgcccccatggtgagcaagggcgccgagagcagcagaagcagcgaggagagcagcagcgacagcggcagcagcgacagcgaggaggagagagccaccagactggccgagctgcaggagcagctgaaggccgtgcacgagcagctggccgccctgagccaggcccccgtgaacaagcccaagaagaagaaggagaagaaggagaaggagaagaagaagaaggacaaggagaaggagaaggagaagcacaaggtgaaggccgaggaggagaagaaggccaaggtggccccccccgccaagcaggcccagcagaagaaggcccccgccaagaaggccaacagcaccaccaccgccggcagagaccacttcctgacctgcggcgtgtag

SEQ ID NO: 283969 - DNA, 225 bp, Artificial Sequence
  derived and/or modified sequence
atgagcaccgccaccaccgtggcccccgccggcatccccgccacccccggccccgtgaacccccccccccccgaggtgagcaaccccagcaagcccggcagaaagaccaaccagctgcagtacatgcagaacgtggtggtgaagaccctgtggaagcaccagttcgcctggcccttctaccagcccgtggacgccatcaagctgaacctgcccgactaccactag

SEQ ID NO: 283970 - protein, 2091 aa, Artificial Sequence
  derived and/or modified sequence
MGDEMDAMIPEREMKDFQFRALKKVRIFDSPEELPKERSSLLAVSNKYGLVFAGGASGLQIFPTKNLLIQNKPGDDPNKIVDKVQGLLVPMKFPIHHLALSCDNLTLSACMMSSEYGSIIAFFDVRTFSNEAKQQKRPFAYHKLLKDAGGMVIDMKWNPTVPSMVAVCLADGSIAVLQVTETVKVCATLPSTVAVTSVCWSPKGKQLAVGKQNGTVVQYLPTLQEKKVIPCPPFYESDHPVRVLDVLWIGTYVFAIVYAAADGTLETSPDVVMALLPKKEEKHPEIFVNFMEPCYGSCTERQHHYYLSYIEEWDLVLAASAASTEVSILARQSDQINWESWLLEDSSRAELPVTDKSDDSLPMGVVVDYTNQVEITISDEKTLPPAPVLMLLSTDGVLCPFYMINQNPGVKSLIKTPERLSLEGERQPKSPGSTPTTPTSSQAPQKLDASAAAAPASLPPSSPAAPIATFSLLPAGGAPTVFSFGSSSLKSSATVTGEPPSYSSGSDSSKAAPGPGPSTFSFVPPSKASLAPTPAASPVAPSAASFSFGSSGFKPTLESTPVPSVSAPNIAMKPSFPPSTSAVKVNLSEKFTAAATSTPVSSSQSAPPMSPFSSASKPAASGPLSHPTPLSAPPSSVPLKSSVLPSPSAGRSAQGSSSPVPSMVQKSPRITPPAAKPGSPQAKSLQPAVAEKQGHQWKDSDPVMAGIGEEIAHFQKELEELKARTSKACFQVGTSEEMKMLRTESDDLHTFLLEIKETTESLHGDISSLKTTLLEGFAGVEEAREQNERNRDSGYLHLLYKRPLDPKSEAQLQEIRRLHQYVKFAVQDVNDVLDLEWDQHLEQKKKQRHLLVPERETLFNTLANNREIINQQRKRLNHLVDSLQQLRLYKQTSLWSLSSAVPSQSSIHSFDSDLESLCNALLKTTIESHTKSLPKVPAKLSPMKQAQLRNFLAKRKTPPVRSTAPASLSRSAFLSQRYYEDLDEVSSTSSVSQSLESEDARTSCKDDEAVVQAPRHAPVVRTPSIQPSLLPHAAPFAKSHLVHGSSPGVMGTSVATSASKIIPQGADSTMLATKTVKHGAPSPSHPISAPQAAAAAALRRQMASQAPAVNTLTESTLKNVPQVVNVQELKNNPATPSTAMGSSVPYSTAKTPHPVLTPVAANQAKQGSLINSLKPSGPTPASGQLSSGDKASGTAKIETAVTSTPSASGQFSKPFSFSPSGTGFNFGIITPTPSSNFTAAQGATPSTKESSQPDAFSSGGGSKPSYEAIPESSPPSGITSASNTTPGEPAASSSRPVAPSGTALSTTSSKLETPPSKLGELLFPSSLAGETLGSFSGLRVGQADDSTKPTNKASSTSLTSTQPTKTSGVPSGFNFTAPPVLGKHTEPPVTSSATTTSVAPPAATSTSSTAVFGSLPVTSAGSSGVISFGGTSLSAGKTSFSFGSQQTNSTVPPSAPPPTTAATPLPTSFPTLSFGSLLSSATTPSLPMSAGRSTEEATSSALPEKPGDSEVSASAASLLEEQQSAQLPQAPPQTSDSVKKEPVLAQPAVSNSGTAASSTSLVALSAEATPATTGVPDARTEAVPPASSFSVPGQTAVTAAAISSAGPVAVETSSTPIASSTTSIVAPGPSAEAAAFGTVTSGSSVFAQPPAASSSSAFNQLTNNTATAPSATPVFGQVAASTAPSLFGQQTGSTASTAAATPQVSSSGFSSPAFGTTAPGVFGQTTFGQASVFGQSASSAASVFSFSQPGFSSVPAFGQPASSTPTSTSGSVFGAASSTSSSSSFSFGQSSPNTGGGLFGQSNAPAFGQSPGFGQGGSVFGGTSAATTTAATSGFSFCQASGFGSSNTGSVFGQAASTGGIVFGQQSSSSSGSVFGSGNTGRGGGFFSGLGGKPSQDAANKNPFSSASGGFGSTATSNTSNLFGNSGAKTFGGFASSSFGEQKPTGTFSSGGGSVASQGFGFSSPNKTGGFGAAPVFGSPPTFGGSPGFGGVPAFGSAPAFTSPLGSTGGKVFGEGTAAASAGGFGFGSSSNTTSFGTLASQNAPTFGSLSQQTSGFGTQSSGFSGFGSGTGGFSFGSNNSSVQGFGGWRS

SEQ ID NO: 283971 - protein, 1684 aa, Artificial Sequence
  derived and/or modified sequence
GAEGRKFAVERPGFRGQGRGRQRWLLRHTTPTSSQAPQKLDASAAAAPASLPPSSPAAPIATFSLLPAGGAPTVFSFGSSSLKSSATVTGEPPSYSSGSDSSKAAPGPGPSTFSFVPPSKASLAPTPAASPVAPSAASFSFGSSGFKPTLESTPVPSVSAPNIAMKPSFPPSTSAVKVNLSEKFTAAATSTPVSSSQSAPPMSPFSSASKPAASGPLSHPTPLSAPPSSVPLKSSVLPSPSAGRSAQGSSSPVPSMVQKSPRITPPAAKPGSPQAKSLQPAVAEKQGHQWKDSDPVMAGIGEEIAHFQKELEELKARTSKACFQVGTSEEMKMLRTESDDLHTFLLEIKETTESLHGDISSLKTTLLEGFAGVEEAREQNERNRDSGYLHLLYKRPLDPKSEAQLQEIRRLHQYVKFAVQDVNDVLDLEWDQHLEQKKKQRHLLVPERETLFNTLANNREIINQQRKRLNHLVDSLQQLRLYKQTSLWSLSSAVPSQSSIHSFDSDLESLCNALLKTTIESHTKSLPKVPAKLSPMKQAQLRNFLAKRKTPPVRSTAPASLSRSAFLSQRYYEDLDEVSSTSSVSQSLESEDARTSCKDDEAVVQAPRHAPVVRTPSIQPSLLPHAAPFAKSHLVHGSSPGVMGTSVATSASKIIPQGADSTMLATKTVKHGAPSPSHPISAPQAAAAAALRRQMASQAPAVNTLTESTLKNVPQVVNVQELKNNPATPSTAMGSSVPYSTAKTPHPVLTPVAANQAKQGSLINSLKPSGPTPASGQLSSGDKASGTAKIETAVTSTPSASGQFSKPFSFSPSGTGFNFGIITPTPSSNFTAAQGATPSTKESSQPDAFSSGGGSKPSYEAIPESSPPSGITSASNTTPGEPAASSSRPVAPSGTALSTTSSKLETPPSKLGELLFPSSLAGETLGSFSGLRVGQADDSTKPTNKASSTSLTSTQPTKTSGVPSGFNFTAPPVLGKHTEPPVTSSATTTSVAPPAATSTSSTAVFGSLPVTSAGSSGVISFGGTSLSAGKTSFSFGSQQTNSTVPPSAPPPTTAATPLPTSFPTLSFGSLLSSATTPSLPMSAGRSTEEATSSALPEKPGDSEVSASAASLLEEQQSAQLPQAPPQTSDSVKKEPVLAQPAVSNSGTAASSTSLVALSAEATPATTGVPDARTEAVPPASSFSVPGQTAVTAAAISSAGPVAVETSSTPIASSTTSIVAPGPSAEAAAFGTVTSGSSVFAQPPAASSSSAFNQLTNNTATAPSATPVFGQVAASTAPSLFGQQTGSTASTAAATPQVSSSGFSSPAFGTTAPGVFGQTTFGQASVFGQSASSAASVFSFSQPGFSSVPAFGQPASSTPTSTSGSVFGAASSTSSSSSFSFGQSSPNTGGGLFGQSNAPAFGQSPGFGQGGSVFGGTSAATTTAATSGFSFCQASGFGSSNTGSVFGQAASTGGIVFGQQSSSSSGSVFGSGNTGRGGGFFSGLGGKPSQDAANKNPFSSASGGFGSTATSNTSNLFGNSGAKTFGGFASSSFGEQKPTGTFSSGGGSVASQGFGFSSPNKTGGFGAAPVFGSPPTFGGSPGFGGVPAFGSAPAFTSPLGSTGGKVFGEGTAAASAGGFGFGSSSNTTSFGTLASQNAPTFGSLSQQTSGFGTQSSGFSGFGSGTGGFSFGSNNSSVQGFGGWRS

SEQ ID NO: 283972 - DNA, 6276 bp, Artificial Sequence
  derived and/or modified sequence
atgggcgacgaaatggacgcaatgatcccggagagagagatgaaggacttccagtttagagcactaaagaaggttcgaatctttgacagtccagaagagctacccaaggaaaggagctctctccttgctgtgtcaaacaaatatggcctggttttcgccggaggtgcctcgggcctgcagatatttcccacaaagaacctactgatacagaacaagcccggggatgatcctaataaaatagttgacaaggttcaaggcctacttgttcccatgaaatttcctatccatcacctggccctaagttgcgataacctcacactcagcgcttgtatgatgagttctgagtatggaagcatcattgcttttttcgatgttagaaccttctcgaacgaggccaagcagcaaaaacgtccgtttgcctaccacaagctgctgaaagatgccgggggcatggtcattgatatgaagtggaatcctacagtcccttctatggtcgctgtatgcctggctgatggctccattgctgtccttcaagtgaccgaaaccgtgaaggtttgtgctacactcccatcgacggtggccgtgaccagtgtttgttggtccccgaaaggcaaacagctggctgttgggaaacagaacgggactgtcgtgcagtatctgcccacgctgcaggagaagaaggtcatcccctgtccacctttctacgagagcgatcatccagtgagagtgctggacgttctgtggatagggacatacgtgtttgctattgtgtatgctgcagccgacgggactctggagaccagccctgatgtggtgatggctcttctcccaaaaaaggaggaaaaacaccccgagatctttgttaacttcatggagccctgttatggatcatgcactgaacgccaacaccactactaccttagttatatagaagagtgggacctcgtcctggccgcctccgccgcctctaccgaggtttcaattttagcaagacagagtgatcaaataaactgggagagctggctgttagaggattcatcaagagctgagctcccagtgaccgacaaatccgacgattctctgcctatgggagtggtcgtggattataccaatcaagtggagatcacgatatccgacgagaaaacactgccccctgcccccgtactgatgcttttgtccaccgatggcgtactctgtcctttttatatgattaaccaaaacccaggggtgaagagtctgataaaaacgcctgagcgcctctcattggaaggggagcggcagcccaaatctccaggctcaaccccaactacccccacgagttctcaggcaccacagaagctagacgccagcgctgcggctgcccccgccagcctccccccaagcagccccgcagcacccatcgcaactttctctctgctccccgccggtggagccccaacggtgttcagcttcggatcatccagtctgaagtcctctgcaaccgttacgggagagcccccgagctattcttcaggctcagactcatctaaggcagcgcccgggcccgggcccagtacattctctttcgtaccaccttccaaggctagccttgcgccgacacccgccgccagccctgtcgcccctagcgccgccagcttctctttcggaagcagtggctttaagccaacactcgagtccaccccagtcccctctgtgtccgccccaaatattgccatgaaaccctcatttcctccttcaaccagtgcagtgaaggtaaatctgtcagaaaagttcaccgcagcagccacttcaactcccgtctcaagcagccagtctgccccaccaatgtcacctttcagtagcgcctcgaagcccgccgcttccggcccactgtcacatcccacacccctgtctgctcctcccagtagcgtgcccctcaagtccagtgtgttaccatctcccagtgccggaagatccgcgcagggatcctcctctcccgtcccgagcatggtgcagaagtctccaagaattaccccgcctgcagcgaagcctggcagtccgcaagctaaatctctgcaacccgcggtggctgagaagcagggacatcagtggaaggatagcgatcccgtgatggccggaattggagaggaaattgctcatttccagaaggagttagaggaattgaaggcccgtacatcaaaggcttgtttccaggtgggtacaagcgaagaaatgaaaatgctgcgcactgaaagtgacgacctccacactttcctgctggagattaaggaaacgacagagagtctgcatggggatattagttcgctcaaaaccacactgttggaaggcttcgccggtgtagaagaagctcgtgagcagaatgagaggaatcgtgattccggatacctgcatctgctttacaagcgcccgctggaccccaagagcgaagctcagctacaggaaatcaggaggctgcaccaatacgtaaagtttgccgtgcaagacgtaaatgacgtgctagatttggagtgggatcagcacttggagcaaaaaaagaagcagaggcacctgctggtgcctgaacgcgaaaccttgttcaacaccctggcgaataaccgagaaatcatcaaccagcagagaaagagactgaaccatctggtagatagtctgcaacagctgcgcctgtacaaacaaacttccctgtggagtctcagttccgcagtgccatcccagtcttctattcattcgttcgacagtgacctagaaagcctctgcaatgcacttttgaaaacgacgatcgagtcccataccaagagcctgcccaaggtacctgctaagctaagtcccatgaaacaggcccaactgcgcaactttttggctaagcggaagacaccgcctgtcaggtcaaccgcgccggcatcccttagccgcagcgcttttctgtctcagaggtactatgaggaccttgatgaagttagttccactagcagcgtcagccagtctcttgaaagcgaggacgccaggacctcttgtaaagatgacgaggctgtcgtgcaggccccgcggcacgctcccgtggtcaggacaccttcaatacaaccatctctcttgccgcatgccgcacccttcgccaaatcccacctggtgcatggatctagcccaggagtgatgggtacttctgttgccacaagcgccagtaagataatcccacagggggccgactcaacaatgcttgccaccaaaaccgttaagcatggagccccgtcaccttctcaccctatctctgcaccacaagctgctgcggcagcagcgcttcgaaggcagatggctagccaggcgcccgctgtgaacacgcttactgagagcactttaaagaatgtgccccaagttgtgaacgtccaggagctcaaaaacaaccccgctactccttctactgccatgggtagcagcgtgccttattcaacagctaaaactccgcacccagttctgacaccggtcgcagctaaccaggccaagcaaggttccttaatcaactcactgaagccttccggtcctacacctgcctctggccagctgagtagcggagacaaagcttccggaactgccaaaattgagaccgcggtcacgtccacgccgtctgcatctggccaattctcaaagccattcagctttagcccatcagggaccggcttcaactttgggatcatcactccaacacccagctccaattttaccgctgcccagggggccacacccagcaccaaagaatcatctcagcctgacgcattctcctcgggaggcggctctaagcccagttatgaagctattccagagtccagcccgccttctggcattaccagcgcctcaaacaccacaccaggcgagcccgctgccagctcatctaggcccgtggcccccagtggcacagcactgtctaccacgtcttcaaagcttgaaaccccccccagtaaactcggagagcttttgttccccagctcactcgccggcgagaccttaggtagcttttcggggttgagggtggggcaggcggacgacagcactaagccaactaacaaggcaagttcgacgtcccttactagtacacaaccaacaaaaacaagcggtgtgccaagtggatttaatttcaccgcgccgcccgtcctcggcaagcatactgaacctccagtgactagctcagctacaactacaagtgttgcccctccggccgctacaagtacgagcagcaccgccgtgttcggctctttaccagtcacatctgccgggtcttctggagtcatctcctttggcggtacttctctgagcgccggcaagacatcattttcatttggttctcagcagactaatagcactgttccgccaagcgctccgccacccacgactgcggctaccccactgcctactagcttccccacgctgtctttcggaagcctcctgtccagcgccaccacacctagtctgccaatgtctgccggtcggagtactgaggaggcaaccagctcagccttacctgagaagcccggtgacagtgaggtgtctgcatccgctgcatcattgctggaagaacaacaatctgcacaattgccacaggctcctccccagacctcagattccgttaagaaggagcccgtcctggcacagccggctgtttctaattccggcaccgctgcctcttcaacctcacttgtggccctgtccgccgaggcgaccccagcaacaaccggagtccccgatgcccggacggaggcagtgccccccgcatcctcgttctctgtccccggtcagaccgctgtgactgccgctgccattagcagcgctgggcctgtggcggttgaaacatcaagcaccccaatcgcgtcgtctaccacgtccatcgtcgctcctgggccttcggcagaagcagctgcctttggaaccgttacctcaggaagttctgtctttgcgcagcctcccgccgccagtagctcgagcgcgtttaaccaactgacaaacaataccgctaccgccccttctgccactccggttttcggacaggtggcagccagtaccgcgccgtccttgtttgggcagcaaacaggctctaccgcctctacagccgctgccacccctcaagtgtcttcatcaggcttttccagccctgctttcgggacaacagcacctggagttttcgggcaaaccaccttcggacaggctagcgtgttcggtcaaagcgcctctagcgccgcctctgtgttttcattctctcaaccaggcttttcgtctgtgcccgcctttgggcagcccgcttcttctactcccacgtccaccagcggctcagtctttggggcagcttcgagcactagcagcagcagtagtttctcattcggccagagctcccctaataccgggggcggccttttcggacagtcgaatgcccccgcgtttggacagtctcccggttttggccaaggcggtagtgtctttggagggaccagcgctgccaccacgactgctgctacgagtgggttttcgttttgccaagccagtggtttcggaagcagcaatacaggcagcgttttcggacaagccgctagtactggcggcatcgtgttcggccaacagagtagttcaagctcaggctcagtttttggcagtggcaacactggtaggggaggaggctttttcagcggcctgggagggaagcctagccaggacgcagccaacaaaaatcccttttcttccgcgagtggtggcttcggctctaccgcaaccagcaacacatccaacctgttcggaaattccggagccaagactttcggaggattcgcgtcgagcagctttggtgaacagaagccaacaggcacattcagcagcggtggcgggagcgtggcatcacaaggcttcggattctcatcacctaataagaccggtgggttcggagctgccccagttttcggctcaccacccactttcggaggatctccaggctttggcggggtgccagctttcggcagcgcacccgcatttacttcccccctgggatcaaccggaggaaaggtgttcggcgaaggcacagcggccgctagtgctggaggcttcgggtttgggagcagtagcaacactacatcctttggaactctggcatcacagaacgcacctacatttggaagcttgagtcagcagaccagcggcttcggcacgcagtcgagcgggttctcaggctttggtagcggtacaggaggattttcttttggctcaaacaactcatctgttcagggctttggcgggtggcgatcctag

SEQ ID NO: 283973 - DNA, 5055 bp, Artificial Sequence
  derived and/or modified sequence
ggcgctgagggccgtaaatttgcagtcgagagacccggctttcgcggacagggtaggggccggcagcggtggctgctgcgccatactactcccacaagctcacaggccccccaaaaactggatgcaagtgcggcagccgccccagcttccctgcctcctagtagccctgctgcgccgatcgccactttcagtttgctgcctgcggggggcgctccaacagttttctcttttggtagctctagcctgaaaagctcagcaacagtgaccggagagcctccctcctattcctctgggtctgatagcagtaaagccgctcccggacccggacccagtacatttagttttgttccaccttcaaaagcatccttggcccctactccagctgcgagccctgtcgccccctcagcagccagcttctcctttggctccagcggttttaagcccacgttagagagcacccctgtgcccagcgtgtctgcccccaatatagccatgaagccctctttccctccctcgactagcgcagtgaaggttaatctgagcgagaaattcacagccgccgccaccagcactccggtgtcctcttcacaatctgccccgccgatgtcaccattctcatccgcaagtaaaccagccgcttcgggcccactgtctcatccaacccctctgtcagccccgcccagttctgtaccactgaaatcctcggttttgccctcacctagtgccggccggagcgctcaagggagtagctcacctgtccccagcatggtccagaagagcccacgcatcacaccccctgccgcaaaaccaggcagtcctcaagctaagagtcttcagcccgctgtcgccgaaaaacagggacaccagtggaaagactccgacccagtaatggccggaatcggagaagagatcgctcatttccaaaaggagctggaagaactcaaggctcgaacttctaaagcttgtttccaagtaggaacttccgaagaaatgaagatgctgagaaccgaatcagacgatctacacacttttctcctggagattaaggaaactactgaatcccttcatggggatattagttcactgaaaactacgttgcttgaaggatttgcgggggtcgaagaggcgcgcgagcagaatgagcggaaccgggattccggctaccttcaccttctttacaagcggcccctggaccccaaatctgaggctcaactgcaggagataaggcgtttgcaccagtatgtgaagttcgccgtccaggatgttaatgacgtactggacctggagtgggatcagcacctggaacagaagaaaaaacagcgccacctgttagtgcctgaacgcgagaccctctttaacactctcgcaaataaccgagagattattaaccagcagcgcaagagattgaatcaccttgtggatagtttgcaacaactgcgactgtacaagcagacctcactgtggtcccttagttctgcggtgccatcgcagagttccatccactcttttgactcggatctggaaagtctctgtaatgctctcctgaagaccaccattgaaagccacaccaagtcgctacccaaggtgccagctaaactgtcacccatgaagcaggcccagttgcgaaattttctggcgaagaggaagacccccccagttcgcagcactgctcccgcttcactgtccagaagcgcattcctctcccagcgctattacgaggacctggacgaggtttcgtccacgtcttctgttagtcaatctcttgagagtgaggacgcccggacttcatgcaaggacgatgaggccgtcgtccaggccccccggcatgctcccgtcgtgagaacaccgtcaatccagccctcgttgcttcctcacgccgctccctttgccaagagtcacttggtccacggcagcagtccaggggttatgggtacgtccgtcgcaacctctgccagcaagattattccacaaggagcagactctacgatgcttgccaccaaaactgttaagcatggagccccgtccccctcccacccaatctcagccccccaagctgcagctgccgccgccctgcgccgccagatggcctcccaggcacctgctgttaacacactcacagagtccacgctgaagaacgtgccccaggtggtcaatgtgcaggagttgaagaataacccggcaaccccctccacagctatggggtcaagcgtgccatattctacagccaagaccccacatcccgtgctgacccctgtggccgcaaatcaggctaaacagggcagtctgatcaattctttaaagcctagtgggcccaccccagcgagcggccagctgtctagcggagataaggcctcaggaactgcaaagattgaaaccgcggttacgtctacgcctagcgctagtggccagtttagcaaaccatttagctttagtccctctggcacaggtttcaactttggcatcatcaccccaaccccatcttcgaactttaccgccgcgcaaggcgcaactccctctacaaaggaatccagtcagccggacgcattcagcagcggcggtggatctaaaccttcgtatgaggcaatccctgagtctagccccccttccggtataacctcggcgtcaaatacaactccaggggagcctgccgcatcgtctagtcgcccggtggccccaagtggcacggccctctccacaacctcatcaaagttagaaacccccccttccaaactcggggaacttctcttcccatcaagcttagctggtgagacccttggttccttttctggcctccgtgtcgggcaggcggacgatagtactaaaccgaccaataaagcctccagcaccagcctcacttctacacaaccaacaaagacttccggcgtgccatcaggcttcaactttaccgcccctcctgtattgggcaagcatacagagccacccgtaacctcgagcgccaccactaccagtgtggcgcccccagccgccacctccacatcctcaacagcagttttcgggtctttgcccgtaacgagcgccggatcttcaggagtaatttcttttggggggaccagcctgtcagccggtaagacttccttttccttcggaagtcagcagaccaacagcactgtcccaccaagcgctcccccaccaaccaccgccgccacccctctccccacaagcttcccgactctgagcttcggttccctcctgagctcagctacaactcctagtctgccaatgtctgctggccggagcaccgaggaagccacatcttctgctcttccagagaagcccggggactccgaggtctcagcctccgccgccagcctgctggaggagcagcagtcagctcagttaccacaggcacctccgcaaacctccgactctgttaagaaggaaccagtgttggcccagcccgcagtctctaacagcggcaccgctgctagcagcacctcacttgtggccctgtctgctgaggccacgcctgccactactggagtgcccgatgctagaactgaagcggttccgcccgcgtcttcattctccgttccagggcagaccgccgtgacagcggccgccatatcgtccgctgggccagtggctgtagagacctcaagcaccccgatagccagtagtaccacaagcattgtggctcccggccccagcgccgaggcagccgcttttggcacagtgaccagcggatcctcagtttttgcccagcctcccgccgcctctagtagttcagctttcaatcaactgaccaacaacactgcaacggctccaagtgccacgcctgtcttcggccaagttgccgccagcacagctccttcactattcggtcagcagaccggatctacagcctcaaccgcagcagccacgccccaggtgtcctctagtggattcagctctcctgcctttgggaccaccgcaccaggcgtgttcggtcaaacgacgtttggtcaggcttctgtttttggccagtcggcaagctccgcagcctcagtcttctcattctctcagcctggcttctcctcagtgcctgccttcggccagcctgcaagttcaactccaacatccacttctggctctgtctttggggccgcctctagtacttcttccagcagtagctttagctttggccagagttcacccaataccggaggaggcctttttggccaatccaacgctcctgcattcgggcaatccccaggatttggccaaggaggctccgtgttcggcggcaccagcgccgcgacgaccactgcagcaacctcaggatttagtttctgtcaggcatccgggttcgggtcttcaaacactgggagcgtgttcgggcaggccgcatctacaggcggtatcgtgtttggtcagcagagcagtagcagcagcggtagcgtgttcggatctgggaacacaggaagaggaggtggcttttttagcggcctgggtggaaagccgtcccaggatgcggcaaacaaaaaccctttctccagcgcttccggcgggttcgggagcactgccacctctaacacttcgaatctgttcggtaactccggcgccaaaactttcgggggcttcgccagttcatcatttggtgaacaaaaacctacaggaacctttagctcaggcggtggttcagtagcatctcagggcttcgggttctcctctcctaataaaactggtgggttcggggccgctcctgtgttcggaagccctcccacatttgggggatctcccggcttcgggggggtccccgcatttggcagcgcccctgctttcaccagccccctgggttcaacaggcggcaaagtttttggggaaggaaccgcagccgcttccgctggcggctttggctttgggtcaagctctaacaccacaagctttggaaccctggcttctcagaatgctccaacatttgggtcactgtctcagcagacctcaggattcgggacacagtcaagcggattctcaggttttggttccggcaccggcggattttccttcggcagtaataacagttcagtccagggattcggagggtggcggagttag

SEQ ID NO: 283974 - DNA, 6276 bp, Artificial Sequence
  derived and/or modified sequence
atgggagatgagatggatgccatgatccctgagcgggagatgaaggacttccagttccgggccctgaagaaggtgcgcatctttgacagccctgaggagctgcccaaggagaggagcagcctgctggccgtgagcaacaagtatggcctggtgtttgctggaggagccagcggcctgcagatcttccccaccaagaacctgctgatccagaacaagccaggagatgaccccaacaagatcgtggacaaggtgcagggcctgctggtgcccatgaagttccccatccaccacctggccctgagctgtgacaacctgaccctgagcgcctgcatgatgagcagtgaatatggcagcatcatcgccttctttgatgtgaggaccttcagcaatgaggccaagcagcagaagaggccctttgcctaccacaagctgctgaaggatgctgggggcatggtgattgacatgaagtggaaccccaccgtgcccagcatggtggccgtgtgcctggctgatggcagcattgctgtgctgcaggtgacagagaccgtgaaggtgtgtgccaccctgcccagcacagtggccgtgacctctgtgtgctggagccccaagggcaagcagctggccgtgggcaagcagaatggaacagtggtgcagtacctgcccaccctgcaggagaagaaggtgatcccctgcccccccttctatgaaagtgaccaccctgtgcgggtgctggatgtgctgtggattggcacctacgtgtttgccatcgtgtatgctgctgctgatggcaccctggagaccagcccagatgtggtgatggccctgctgcccaagaaggaggagaagcaccctgagatctttgtgaacttcatggagccctgctacggcagctgcacagagcggcagcaccactactacctgagctacatcgaggagtgggacctggtgctggccgccagcgctgccagcacagaggtgtccatcctggcccggcagagcgaccagatcaactgggagagctggctgctggaggacagcagcagagctgagctgcctgtgacagacaagagtgatgacagcctgcccatgggcgtggtggtggactacaccaaccaggtggagatcaccatcagtgatgagaagaccctgcccccagcccctgtgctgatgctgctgagcacagatggagtgctgtgccccttctacatgatcaaccagaaccctggggtgaagagcctcatcaagaccccagagcggctgagcctggagggggagcggcagcccaagagccctggcagcacccccaccacccccaccagcagccaggccccccagaagctggatgccagcgctgctgctgccccagccagcctgccccccagcagccctgctgcccccatcgccaccttcagcctgctgcctgctggaggagcccccaccgtcttctcctttggcagcagcagcctgaagagcagcgccaccgtgactggagagcccccatcctacagcagcggcagtgacagcagcaaggccgcccctggccctggccccagcaccttctcctttgtgccccccagcaaggccagcctggcccccaccccagctgccagccctgtggcccccagcgctgccagcttctcctttggcagcagcggcttcaagcccaccctggagagcacccctgtgcccagcgtgtctgcccccaacatcgccatgaagcccagcttcccccccagcaccagcgctgtgaaggtgaacctgtctgagaagttcaccgctgctgccaccagcacccctgtgagcagcagccagagcgccccacccatgagccccttcagcagcgccagcaagccagctgccagcggccccctgagccaccccacccccctgagcgccccacccagctctgtgcccctgaagagctctgtgctgcccagccccagcgctggccgcagcgcccagggcagcagcagccctgtgcccagcatggtgcagaagagcccccgcatcaccccacctgctgccaagccaggcagcccccaggccaagagcctgcagcctgctgtggccgagaagcagggccaccagtggaaggacagcgaccctgtgatggccggcattggagaggagatcgcccacttccagaaggagctggaggagctgaaggcccggaccagcaaggcctgcttccaggtgggcaccagcgaggagatgaagatgctgaggacagaaagtgatgacctgcacaccttcctgctggagatcaaggagaccacagagagcctgcatggagacatcagcagcctgaagaccaccctgctggagggctttgctggggtggaggaggcccgggagcagaatgaaagaaacagagattctggctacctgcacctgctgtacaagaggcccctggaccccaagtctgaggcccagctgcaggagatccggcggctgcaccagtatgtgaagtttgctgtgcaggatgtgaatgatgtgctggacctggagtgggaccagcacctggagcagaagaagaagcagaggcacctgctggtgcctgagcgggagaccctcttcaacaccctggccaacaaccgggagatcatcaaccagcagaggaagaggctgaaccacctggtggacagcctgcagcagctgcggctgtacaagcagaccagcctgtggagcctgagcagcgctgtgcccagccagagcagcatccacagctttgacagcgacctggagagcctgtgcaatgccctgctgaagaccaccatcgagagccacaccaagagcctgcccaaggtgcctgccaagctgagccccatgaagcaggcccagctgaggaacttcctggccaagaggaagaccccacctgtgcgcagcacagccccagccagcctgagccgcagcgccttcctgagccagcgctactatgaggacctggatgaggtgagcagcaccagctctgtgtcccagagcctggagagtgaagatgcccggaccagctgcaaggatgatgaagctgtggtgcaggcccccaggcatgcccctgtggtgaggacccccagcatccagcccagcctgctgccccatgctgccccctttgccaagagccacctggtgcacggcagcagccctggggtgatgggcacctctgtggccaccagcgccagcaagatcatcccccagggcgctgacagcaccatgctggccaccaagacagtgaagcacggggcccccagccccagccaccccatcagcgccccccaggccgctgctgctgctgccctgcggcggcagatggccagccaggccccagctgtgaacaccctgacagagagcaccctgaagaatgtgccccaggtggtgaatgtgcaggagctgaagaacaacccagccacccccagcacagccatgggcagctctgtgccctacagcacagccaagaccccccaccctgtgctgacccctgtggccgccaaccaggccaagcagggcagcctcatcaacagcctgaagcccagcggccccaccccagccagcggccagctgagcagcggggacaaggccagcggcacagccaagattgaaacagctgtgaccagcacccccagcgccagcggccagttcagcaagcccttctccttcagccccagcggcaccggcttcaactttggcatcatcacccccacccccagcagcaacttcaccgctgcccagggcgccacccccagcaccaaggagagcagccagccagatgccttcagcagcggcggcggcagcaagcccagctatgaggccatccctgagagcagcccccccagcggcatcaccagcgccagcaacaccaccccaggagagcctgctgccagcagcagcaggcctgtggcccccagcggcacagccctgagcaccaccagcagcaagctggagaccccacccagcaagctgggggagctgctcttccccagcagcctggccggggagaccctgggcagcttcagcggcctgcgggtgggccaggctgatgacagcaccaagcccaccaacaaggccagcagcaccagcctgaccagcacccagcccaccaagaccagcggcgtgcccagcggcttcaacttcaccgcccctcctgtgctgggcaagcacacagagccccctgtgaccagcagcgccaccaccacctctgtggcccccccagctgccaccagcaccagcagcacagctgtgtttggcagcctgcctgtgaccagcgctggcagcagtggagtcatcagctttggaggcaccagcctgtctgctgggaagaccagcttctcctttggcagccagcagaccaacagcacagtgccccccagcgcccccccacccaccacagctgccacccccctgcccaccagcttccccaccctgagctttggcagcctgctgagcagcgccaccacccccagcctgcccatgtctgctggccgcagcacagaggaggccaccagcagcgccctgcctgagaagccaggggacagcgaggtgtctgccagcgctgccagcctgctggaggagcagcagagcgcccagctgccccaggccccaccccagaccagtgacagcgtgaagaaggagcctgtgctggcccagcctgctgtgagcaacagcggcacagctgccagcagcaccagcctggtggccctgtctgctgaggccaccccagccaccactggagtgcctgatgccaggacagaggccgtgcccccagccagcagcttctctgtgcccggccagacagctgtgacagctgctgccatcagcagcgctggccctgtggccgtggagaccagcagcacccccatcgccagcagcaccaccagcatcgtggcccctggccccagcgctgaggccgccgccttcggcaccgtgaccagcggcagctctgtgtttgcccagcccccagctgccagcagcagcagcgccttcaaccagctgaccaacaacacagccacagcccccagcgccacccctgtgtttggccaggtggccgccagcacagcccccagcctgtttggccagcagacaggcagcacagccagcacagctgctgccaccccccaggtgagcagcagcggcttcagcagccctgccttcggcaccacagcccctggggtgtttggccagaccaccttcggccaggcctctgtgtttggccagagcgccagcagcgctgccagcgtcttctccttcagccagcccggcttcagctctgtgcctgccttcggccagcctgccagcagcacccccaccagcaccagcggctctgtgtttggagctgccagcagcaccagcagcagcagcagcttctcctttggccagagcagccccaacacaggaggcggcctgtttggccagagcaatgccccagccttcggccagagccctggcttcggccagggcggctctgtgtttggaggcaccagcgctgccaccaccacagctgccaccagcggcttctccttctgccaggccagcggcttcggcagcagcaacacaggctctgtgtttggccaggccgccagcactggaggcatcgtgtttggccagcagagcagcagcagcagcggctctgtgtttggaagtggcaacacaggccggggcggcggcttcttcagcggcctgggcggcaagcccagccaggatgctgccaacaagaaccccttcagcagcgccagcggcggcttcggcagcacagccaccagcaacaccagcaacctgtttggaaacagcggggccaagacctttggaggctttgccagcagcagctttggagagcagaagcccaccggcaccttcagcagcggcggcggctctgtggccagccagggcttcggcttcagcagccccaacaagacaggaggctttggagctgcccctgtgtttggcagcccccccacctttggaggcagccctggctttggaggagtgcctgcctttggaagtgccccagccttcaccagccccctgggcagcactggaggcaaggtgtttggagagggcacagctgctgccagcgctgggggctttggatttggcagcagcagcaacaccaccagctttggcaccctggccagccagaatgcccccaccttcggcagcctgagccagcagaccagcggcttcggcacccagagcagcggcttcagcggctttggaagtggcactggaggcttctcctttggcagcaacaacagctctgtgcagggctttggaggctggaggagctag

SEQ ID NO: 283975 - DNA, 5055 bp, Artificial Sequence
  derived and/or modified sequence
ggggctgagggcaggaagtttgctgtggagcggcccggcttccggggccagggccggggccggcagcgctggctgctgcggcacaccacccccaccagcagccaggccccccagaagctggatgccagcgctgctgctgccccagccagcctgccccccagcagccctgctgcccccatcgccaccttcagcctgctgcctgctgggggcgcccccaccgtcttctcctttggcagcagcagcctgaagagcagcgccaccgtgactggagagccccccagctacagcagcggcagtgacagcagcaaggccgcccctggccctggccccagcaccttctcctttgtgccccccagcaaggccagcctggcccccaccccagctgccagccctgtggcccccagcgctgccagcttctcctttggcagcagcggcttcaagcccaccctggagagcacccctgtgcccagcgtgtctgcccccaacatcgccatgaagcccagcttcccccccagcaccagcgctgtgaaggtgaacctgtctgagaagttcaccgctgctgccaccagcacccctgtgagcagcagccagagcgccccacccatgagccccttcagcagcgccagcaagccagctgccagcggccccctgagccaccccacccccctgagcgccccacccagctctgtgcccctgaagagctctgtgctgcccagccccagcgctggccgcagcgcccagggcagcagcagccctgtgcccagcatggtgcagaagagcccccgcatcaccccacctgctgccaagccaggcagcccccaggccaagagcctgcagcctgctgtggccgagaagcagggccaccagtggaaggacagcgaccctgtgatggccggcatcggggaggagatcgcccacttccagaaggagctggaggagctgaaggcccggaccagcaaggcctgcttccaggtgggcaccagcgaggagatgaagatgctgaggacagaaagtgatgacctgcacaccttcctgctggagatcaaggagaccacagagagcctgcacggggacatcagcagcctgaagaccaccctgctggagggctttgctggggtggaggaggcccgggagcagaatgaaagaaacagagacagcggctacctgcacctgctgtacaagaggcccctggaccccaagtctgaggcccagctgcaggagatccggcggctgcaccagtatgtgaagtttgctgtgcaggatgtgaatgatgtgctggacctggagtgggaccagcacctggagcagaagaagaagcagaggcacctgctggtgcctgagcgggagaccctcttcaacaccctggccaacaaccgggagatcatcaaccagcagaggaagaggctgaaccacctggtggacagcctgcagcagctgcggctgtacaagcagaccagcctgtggagcctgagcagcgctgtgcccagccagagcagcatccacagctttgacagcgacctggagagcctgtgcaatgccctgctgaagaccaccatcgagagccacaccaagagcctgcccaaggtgcctgccaagctgagccccatgaagcaggcccagctgaggaacttcctggccaagaggaagaccccacctgtgcgcagcacagccccagccagcctgagccgcagcgccttcctgagccagcgctactatgaggacctggatgaggtgagcagcaccagctctgtgtcccagagcctggagagtgaagatgcccggaccagctgcaaggatgatgaggccgtggtgcaggcccccaggcatgcccctgtggtgaggacccccagcatccagcccagcctgctgccccacgccgccccctttgccaagagccacctggtgcacggcagcagccctggggtgatgggcacctctgtggccaccagcgccagcaagatcatcccccagggcgctgacagcaccatgctggccaccaagacagtgaagcatggagcccccagccccagccaccccatcagcgccccccaggccgctgctgctgctgccctgcggcggcagatggccagccaggccccagctgtgaacaccctgacagagagcaccctgaagaatgtgccccaggtggtgaatgtgcaggagctgaagaacaacccagccacccccagcacagccatgggcagctctgtgccctacagcacagccaagaccccccaccctgtgctgacccctgtggccgccaaccaggccaagcagggcagcctcatcaacagcctgaagcccagcggccccaccccagccagcggccagctgagcagcggggacaaggccagcggcacagccaagattgaaacagctgtgaccagcaccccatctgccagcggccagttcagcaagcccttctccttcagccccagcggcaccggcttcaactttggcatcatcacccccacccccagcagcaacttcaccgctgcccagggcgccacccccagcaccaaggagagcagccagccagatgccttcagcagcggcggcggcagcaagcccagctatgaggccatccctgagagcagccccccatctggcatcaccagcgccagcaacaccaccccaggagagcctgctgccagcagcagcaggcctgtggcccccagcggcacagccctgagcaccaccagcagcaagctggagaccccacccagcaagctgggggagctgctcttccccagcagcctggccggggagaccctgggcagcttcagcggcctgcgggtgggccaggctgatgacagcaccaagcccaccaacaaggccagcagcaccagcctgaccagcacccagcccaccaagaccagcggcgtgcccagcggcttcaacttcaccgcccctcctgtgctgggcaagcacacagagccccctgtgaccagcagcgccaccaccacctctgtggcccctcctgctgccaccagcaccagcagcacagctgtgtttggcagcctgcctgtgaccagcgctggcagcagcggggtcatcagctttggaggcaccagcctgtctgctgggaagaccagcttctcctttggcagccagcagaccaacagcacagtgcccccatctgcccccccacccaccacagctgccacccccctgcccaccagcttccccaccctgagctttggcagcctgctgagcagcgccaccacccccagcctgcccatgtctgctggccgcagcacagaggaggccaccagcagcgccctgcctgagaagccaggggacagcgaggtgtctgccagcgctgccagcctgctggaggagcagcagagcgcccagctgccccaggccccaccccagaccagtgacagcgtgaagaaggagcctgtgctggcccagcctgctgtgagcaacagcggcacagctgccagcagcaccagcctggtggccctgtctgctgaggccaccccagccaccaccggggtgcctgatgccaggacagaagctgtgcccccagccagcagcttctctgtgcccggccagacagctgtgacagctgctgccatcagcagcgctggccctgtggccgtggagaccagcagcacccccatcgccagcagcaccaccagcatcgtggcccctggccccagcgctgaggccgccgcctttggaacagtgaccagcggcagctctgtgtttgcccagcccccagctgccagcagcagcagcgccttcaaccagctgaccaacaacacagccacagcccccagcgccacccctgtgtttggccaggtggccgccagcacagcccccagcctgtttggccagcagacaggcagcacagccagcacagctgctgccaccccccaggtgagcagcagcggcttcagcagccctgccttcggcaccacagcccctggggtgtttggccagaccaccttcggccaggcctctgtgtttggccagagcgccagcagcgctgcctctgtgttctccttcagccagcccggcttcagctctgtgcctgccttcggccagcctgccagcagcacccccaccagcaccagcggctctgtgtttggagctgccagcagcaccagcagcagcagcagcttctcctttggccagagcagccccaacacaggaggcggcctgtttggccagagcaatgccccagccttcggccagagccctggcttcggccagggcggctctgtgtttggaggcaccagcgctgccaccaccacagctgccaccagcggcttctccttctgccaggccagcggcttcggcagcagcaacacaggctctgtgtttggccaggccgccagcactggaggcatcgtgtttggccagcagagcagcagcagcagcggctctgtgtttggcagcggcaacacaggccggggcggcggcttcttcagcggcctgggcggcaagcccagccaggatgctgccaacaagaaccccttcagcagcgccagcggcggcttcggcagcacagccaccagcaacaccagcaacctgtttggaaattctggggccaagaccttcggcggctttgccagcagcagctttggagagcagaagcccaccggcaccttcagcagcggcggcggctctgtggccagccagggcttcggcttcagcagccccaacaagacaggaggctttggagctgcccctgtgtttggcagcccccccaccttcggcggcagccctggctttggaggagtgcctgccttcggcagcgccccagccttcaccagccccctgggcagcactggaggcaaggtgtttggagagggcacagctgctgccagcgctgggggcttcggcttcggcagcagcagcaacaccaccagctttggcaccctggccagccagaatgcccccaccttcggcagcctgagccagcagaccagcggcttcggcacccagagcagcggcttcagcggcttcggcagcggcaccggcggcttctcctttggcagcaacaacagctctgtgcagggctttggaggctggaggagctag

SEQ ID NO: 283976 - DNA, 6276 bp, Artificial Sequence
  derived and/or modified sequence
atgggcgacgagatggacgccatgatccccgagcgggagatgaaggacttccaattccgtgccctgaaaaaggtgagaattttcgacagtcctgaggaactgccaaaggaaaggtccagtttacttgcagtgtccaataagtacggactggtgttcgccggaggggcttcggggttgcagatattccccaccaaaaacctcctgatccagaataaacccggtgatgacccaaacaagattgttgataaggtgcaggggttgttggtgccaatgaaatttccaattcaccacctggctttgtcatgtgataacctcaccctgagcgcctgcatgatgtccagcgaatacggatccatcatcgccttcttcgacgtgcggacattttcgaatgaggctaaacaacagaaacgtccctttgcataccataaattgcttaaagacgctggaggcatggttatagatatgaagtggaacccaacggttccttcaatggtggcagtctgtctggccgacggatccattgctgtgctccaggtgaccgagaccgtcaaagtgtgtgccaccctcccgtcaacagttgctgtgactagcgtgtgctggtcgcctaaagggaagcagctggcagtgggcaaacaaaacgggacagtcgttcaatacctgcctacccttcaggagaaaaaggttattccgtgcccaccattctacgagtcagaccaccccgtaagagttttggatgtgttgtggatcggtacctacgtgttcgcgattgtatacgctgccgctgatggaacgctggaaaccagtcccgacgtggtgatggctctgctcccaaaaaaagaagagaaacatcccgaaatctttgtaaacttcatggaaccgtgctacggaagctgtacagagcgccaacatcattattatttgtcatatatcgaagaatgggatctggttcttgccgcatccgccgcatcaaccgaagtgtcaattttggcccggcagtctgatcagatcaattgggagtcttggctgctggaggatagttctcgggccgagctcccagtgactgataaatctgacgattcactgcccatgggggtggtggtggattacactaaccaggtggaaatcacaatctctgacgagaaaacattaccacccgctcctgtattgatgctgttgtcaacagatggtgttctgtgccccttttatatgataaatcagaaccccggcgtgaaaagtcttattaagactccagaaaggctgtcactggagggcgagcggcagcccaaaagcccaggcagcacccccacaaccccaacaagctcacaggcccctcaaaaactagatgccagcgcagccgccgctcccgctagcctgcccccgagctcacccgccgcaccgattgcgacatttagtcttctgccagccggcggcgccccaaccgtgttcagcttcggctcctcttcattgaagtccagtgctactgttactggcgaaccgccaagctactcttcagggagcgattcctctaaggcggcacctggcccaggacccagcacgtttagctttgtgcccccttcgaaggcttctctggcgcctactcccgccgcttctcctgtggctccttccgccgccagtttcagcttcggatccagcgggtttaaaccgacactcgagtcgacaccagtgccatcagtttccgccccaaacattgccatgaagccgtcattcccccccagcacttccgctgtaaaagtcaacttgagtgagaagtttacggccgccgcgacctctacaccggtctcttcgtctcagagcgctcctccaatgtcacccttcagttcagctagcaaacccgctgcttctgggcccctgagccatccgacgccactgagcgcacctccctcctcggtgcctctaaagtcatctgtgctgcccagcccatccgcgggtaggtcagcccaaggctcatcatccccagttccatccatggtgcagaaatctccacgcatcacacccccggctgcaaagcccggttctcctcaggcaaagtccctccagcctgccgtggccgaaaaacagggacaccagtggaaggactctgaccccgtcatggccggtatcggcgaggagatcgctcacttccaaaaagagctggaggaattgaaagcaagaacctctaaggcgtgcttccaggtcggaacgtccgaggaaatgaagatgctacggaccgaatccgatgatcttcacacattcttgttggagatcaaggagacaaccgaaagcctccacggagacatcagctccctgaaaacgaccttactggaggggttcgcaggagtcgaagaggctcgcgaacaaaacgagcgaaaccgggactcaggttatttgcaccttttatacaaacgtcccctggatcccaaatccgaggcacaactgcaggaaattcgacgcctgcaccaatacgtcaagtttgcagtgcaggatgtgaatgatgtgctggacttagagtgggaccagcatctggagcagaaaaaaaaacagcggcacctgctcgtaccagagcgcgagactctgttcaacacactggccaacaatcgagagattataaatcaacagaggaagcgcctaaaccatttggtggattccctgcagcagctgcggctttataagcagacctccttatggagcttatcctccgctgtgccctcccaatcttccatccatagcttcgattccgacctggaaagcctttgtaacgctctgctcaagactaccatcgagtcacacaccaaatccttgcctaaggtgcccgctaaactgagccctatgaagcaggctcagttgcggaattttctagctaaaaggaagaccccaccagtaagatcaacggccccagctagcctctccagaagcgcgttcttgtcacagcggtactacgaagacctagacgaggtttcctcgacctcttctgtttctcagtccctggaatccgaggacgctcgcacatcttgcaaggatgacgaggcagttgtgcaagctccccggcacgcaccagtggtccgaaccccctctatccagccgtcattgcttcctcacgcggcaccgtttgccaaaagccatctggtgcatggctcaagtcctggggtcatgggcaccagcgtggcaacgtcagcctccaaaatcatccctcagggagccgattctaccatgttggccaccaaaaccgttaaacacggtgcccctagcccatcgcatcccatctctgctccacaggccgcagccgctgccgcccttaggcggcagatggcttcacaggcaccagccgtgaacacactgacagagtcaacactgaaaaacgtcccacaagtagtgaatgtccaggagctgaagaataatcccgcaaccccctccacagcaatgggctcatccgtgccatactccacagccaagaccccacatccggttcttactccggtcgccgcaaatcaggccaaacaagggtccctgatcaactcgctgaagccctctggccccactcctgcgtccgggcagctatcatcaggtgataaagcatccggcacagccaagatcgagactgctgttacaagtacaccatcagcatcgggtcagttctctaaacccttttctttctctcccagtgggaccgggttcaatttcgggataattaccccaactccctcttcaaacttcactgcggcccaaggcgcgacgcccagcacaaaggagtcctcacagcccgacgcatttagtagcggaggcggatccaagccctcgtacgaggcaattcccgaaagtagccctccttctggcataacttccgcaagtaataccactcccggagaacccgccgcatcttctagtaggcccgttgcccctagcggtacagccctgtctaccacctcttctaagctagagactcctcctagcaaactcggagagctgctattcccctccagtctcgcgggcgagactctggggtctttttcaggcttgagggtggggcaggccgacgattccaccaagcccaccaataaagccagtagcaccagcctgaccagtacacagccaacgaaaaccagcggagtaccatcaggcttcaattttaccgcacctccagtgctgggaaagcataccgagcctcccgtcacgtcatctgccaccaccacgtcggttgccccccccgctgctactagtacatcaagtacagcagtattcgggtccctacctgtgacatctgctgggtcttcaggagtgatctcattcggtggaactagtctatcggctggcaaaacgtccttcagctttggctcccagcaaactaactctactgtgcctccatcagcccctccccctactactgctgcgacaccactgcctacgtcattccccactctgagctttggtagccttctgagctctgcgaccacaccatcactgcccatgtcggctggccggagcaccgaggaggcaacgagcagtgcactgcccgaaaagcctggcgactctgaagtttctgcaagtgccgcttcccttctcgaggaacagcaatctgctcagctgcctcaggcccccccacagacttctgactcagttaaaaaggagcctgtactggcccagcccgcagtgagtaatagcgggactgccgcgtcctccacgtcacttgttgctcttagcgcagaagcgactcccgccacaacgggcgtcccagacgccaggaccgaggcggtgcccccagcaagctccttctctgtgccgggccagactgccgtaacagctgcggcaatctcatcagctggtccagtggcagtcgagaccagcagcacacctatcgccagtagcacaacctcaatcgtggccccgggaccctccgccgaagcggccgcctttggcactgtgacaagcggcagctccgtgtttgcacagccccctgcagctagctcatcaagtgcatttaaccagctcaccaataacaccgcaaccgccccctcagctacacccgtgttcggtcaagtggcagccagcactgctcccagtctgttcggacaacagacaggcagtactgcctcaaccgccgcagcaacaccccaagtcagttccagtgggtttagcagtccagccttcggtacgactgcaccgggggtctttggacaaactaccttcggacaggctagcgtgttcggacagtcggctagcagcgcagcgagtgtttttagtttcagccagccaggcttttcctccgtacccgcctttggacagcccgcaagctccacacctaccagcacttcaggctcagttttcggggcagcctcaagcacaagctcatccagttctttctcattcggacaatcttcgcccaacaccggcgggggccttttcggacagagtaatgcgccagcgtttggccaatctccagggtttggccagggaggaagtgtgttcggaggaacctctgcagccaccactactgctgccacatccggtttttcattctgtcaagcgagcgggtttggaagcagtaataccgggagcgtgtttgggcaggcagcctctaccggaggcattgtgttcggccagcagtcatcgagtagcagtggtagcgtgttcggctccggcaatactggaagaggtggcggctttttttcgggactcgggggtaaaccgagccaggacgctgccaataagaacccctttagttccgcttccggcggctttggaagcacagccacgtcaaacacatctaatttgtttggaaactccggcgccaagacatttgggggtttcgcctcttcttcctttggcgagcagaagcctacaggaactttctcaagcggaggcggaagtgtcgccagtcagggatttggtttcagcagtccaaacaaaacaggcgggttcggtgccgctcccgtattcggatcaccaccaactttcggcgggtcccccggtttcgggggcgtgcccgcatttgggagtgctccagcatttacatcaccattggggtccactggcggaaaggtgtttggggaggggaccgccgcagccagcgctggtggtttcgggttcggttcaagcagtaatacaacatcctttggtaccctggccagccagaacgccccaacgtttgggagcctctcccagcaaactagtggtttcggaacccagtcatcgggctttagcggcttcggatcgggtacaggagggttttcttttggatccaataatagttcagtgcagggtttcggcggttggcggtcctag

SEQ ID NO: 283977 - DNA, 5055 bp, Artificial Sequence
  derived and/or modified sequence
ggcgccgagggccggaagttcgccgtggagcggcccggcttccggggacagggtcgcggcaggcaacgctggttgctaaggcacactacccctacctcctcacaggcacctcaaaagttggacgcctccgcagccgccgctccagccagtttgcctccctcttcgccagcagcaccgattgcgacattcagcctattacctgccggtggagcccccaccgtcttctctttcgggtcctcctctttgaaaagcagcgccacagtgacaggggaacccccctcctatagctctgggagcgatagctctaaagccgcgcccggacctgggcctagtacattctcctttgttcccccgtctaaggcctcattagccccgacgccagcagcttctccagttgctccatctgccgcatcattctcttttggctctagcggatttaagccaaccctagaatccactccagttccctctgtcagcgctccaaatatcgctatgaagcccagcttccccccatccacctccgcagttaaggtgaatctgagcgaaaaatttacagctgctgctacctccacaccagtcagctcttcacagagtgcgccccctatgagccccttctccagtgcgtcgaagcctgcagccagcggaccgctttctcaccctacacccctgtctgctcccccttcctccgttcctttgaagagttctgttctgccctcaccctcagccggtcgctctgctcagggttctagttcgcccgtgccaagcatggtgcagaaatcccccagaatcacccccccagccgccaaacctggcagtcctcaggcgaagagcttacagcccgctgtcgccgagaaacagggccaccagtggaaagatagtgatcctgttatggctggcatcggcgaggaaatcgcgcatttccagaaggagctggaggaattgaaagcccggacaagcaaggcttgttttcaagtcggcacttcggaagaaatgaaaatgcttcgtactgagagcgatgacctgcatacattcttgcttgagattaaggagactaccgaaagcttgcatggagatattagctctctgaagactacgctactagaaggatttgccggtgtcgaggaggcacgggaacagaatgaaaggaaccgggactctggctatctccatctgttgtataaaaggcctcttgatcctaagagtgaagctcagctgcaggagatacggcgactccatcaatacgtcaagtttgccgtacaggatgtgaacgacgttcttgacctagagtgggaccaacacctcgagcagaaaaagaaacagcgccacttgttggtgcctgagcgagaaacattgtttaacactctggccaacaatagggagataattaatcagcaacgcaaacgactcaaccacctggtggacagcttgcagcagctgcgactttacaagcaaacctcactttggtcgctttcttccgcggttccctctcagtcatcaatccacagttttgatagtgacctggagagcctgtgtaacgctttgctcaaaactaccattgagtcacacaccaagagcctgcccaaagtgcccgctaaactgagccctatgaaacaggcccaattgcggaacttcctggcgaagagaaagactcctccagtccggagtacagcacccgcatcactcagtcgttccgcattcctaagccaacgctactacgaggacctcgatgaggtgagtagtacgagcagtgtgagccagtcactcgagtctgaagacgcaaggacatcttgcaaggatgacgaggcagtggtacaggcccctaggcatgcaccagtggtccgcacccccagtatccaacccagcctactacctcacgccgcaccatttgctaagtctcatctcgtccatggttcttcccctggcgtaatgggcacctctgtggccactagcgcctcgaaaattataccgcagggggcagacagtactatgctggcaacaaaaactgtcaagcacggggctccctctccatcccaccctatctccgcaccacaggctgccgcagcagcagccctccgcaggcagatggcttcccaggcccctgccgtgaacaccctaacagagtctacactcaagaacgtgccgcaagtcgtaaacgtccaggagcttaagaacaaccctgcaactcctagtactgccatgggtagtagtgtcccttactcaactgctaagaccccgcatccagtgttaacaccggtcgctgccaaccaggccaagcagggctctttaatcaattcactcaagccttctggtccaacacccgcttctggacagctgtcatccggcgacaaggcctcgggaacagctaaaatagaaacggctgtgacaagtactccgtcggcctcaggacaattttctaagccattctctttcagcccaagcgggacggggttcaatttcggcatcatcacccccactcctagcagcaatttcacagccgctcagggagccactccttctacaaaggagagctcacagcctgatgccttttcaagcggtggcggctctaaaccaagttatgaggctattcctgagagttcgccaccatcggggataacctccgcgtccaacaccactccaggggagcccgcggcttccagctcccgaccagtcgccccaagcgggacagctttaagtacaactagttccaaactggaaacaccgccctcaaaattgggagagctgctcttcccgtcatctctggccggggaaaccctgggttcgttctccggtttacgagtggggcaggcagacgacagcactaagcccaccaataaggcgagtagtacatcactgacttccactcagcccacaaagacctctggggtgccaagtggatttaattttacagctcctcccgtgcttggcaaacataccgagcctccagttacttcttcagctacaacgacatccgtcgcccctccggcagcaacctcaacttcaagcactgctgtttttgggtcccttcccgtgacttccgccggttcaagtggcgtaatatcctttggagggacctcactgagcgctgggaagacttccttttctttcggatcccagcagacaaactctacggttcccccgagcgctccgcctcctaccaccgctgccactccactcccaaccagcttcccaaccttgagttttggtagcctgctcagtagcgccaccactccttccctgcctatgtctgcaggacggtccacagaagaggccacttcctccgccctccccgaaaagccaggggattccgaggtttctgccagtgctgctagcctgctcgaggaacagcagtcggcacagttaccccaagcccctccccagacttccgacagcgttaaaaaagagccagtgttagcgcagccggctgtgtctaattctggcaccgcggctagttccacatccctggttgcactctccgccgaggccacccccgctacaacaggtgtcccggacgccaggactgaggcagtgcctcctgcttcctcatttagcgtacctggacagaccgccgtgactgctgcagccatttctagcgccgggcccgtggccgtggagacaagttctacgcccatcgcatcatctaccacaagcatcgttgctcccgggccctcggccgaggccgcggccttcggcactgtgacttcaggctccagtgtctttgcccagcctccagctgctagctcttccagcgctttcaaccagctgacaaacaataccgccacggcccccagtgccacccctgtttttggccaggtggctgcctccacagctccatctctcttcggtcagcaaaccggatcaactgcctccactgccgctgctactccccaggtcagtagttcgggcttctccagccccgcttttggcactacagccccgggtgtgttcggccaaaccaccttcggacaggcctcagtcttcgggcagagtgcctcctctgcagcgtccgtctttagtttcagccagccgggattctccagcgtgcccgctttcggacagcccgccagctcaacccctacgtcaacgtccgggagcgtcttcggggcggcgagttccactagctctagcagtagcttttcctttggccagtcaagcccaaacaccggaggcggactgttcggtcagtctaacgcccccgccttcgggcaatctcccggcttcggacagggggggtcggtattcggcggtacctctgcggctactactacagctgctacaagcggtttcagcttctgccaggcttcaggatttggaagcagcaacacaggaagcgtgttcggccaagccgctagcaccggtgggatcgtgtttggtcagcagagctcttccagctctgggtccgtttttggcagcggcaataccggacgagggggcggattcttctctggattaggcgggaagcctagccaggacgccgctaataaaaatcctttttcttcggctagcggggggtttggtagcaccgccacctcgaacacttccaacctgtttggcaactcaggtgccaagacgttcggcggatttgcctcatcctcctttggcgagcaaaagcccacaggcacatttagtagtggaggcggatctgtggctagtcagggctttgggttcagctcccccaataaaacaggcggattcggcgctgcaccagtgtttggatccccacccacattcggagggagccccggctttggaggggtccccgcatttgggagcgctcctgcattcacctcgccacttggctctaccgggggaaaggtattcggagaaggtacagctgccgcctccgcaggcggcttcgggttcgggtcgtccagtaataccacgagcttcggtacactggcaagtcagaacgcccctacattcggtagcttaagtcagcagacatcaggatttgggacacaatcgagcggtttttctggatttggaagcggcacgggaggcttcagtttcggttccaataacagcagtgtgcagggctttggcggatggcgctcttag

SEQ ID NO: 283978 - DNA, 6601 bp, Artificial Sequence
  derived and/or modified sequence
ctgcgcgccgctggcgctgaggggaggaagtttgctgtcgagcggcctgggttccgtgggcaaggccgtgggaggcagcgttggctgcttcgacacactgagggcggcgcgatgggagacgagatggatgccatgattcccgagcgggagatgaaggattttcagtttagagcgctaaagaaggtgagaatctttgactcccctgaggaattgcccaaggaacgctcgagtctgcttgctgtgtccaacaaatatggtctggtcttcgctggtggagccagtggcttgcagatttttcctactaaaaatcttcttattcaaaataaacccggagatgatcccaacaaaatagttgataaagtccaaggcttgctagttcctatgaaattcccaatccatcacctggccttgagctgtgataacctcacactctctgcgtgcatgatgtccagtgaatatggttccattattgctttttttgatgttcgcacattctcaaatgaggctaaacagcaaaaacgcccatttgcctatcataagcttttgaaagatgcaggaggcatggtgattgatatgaagtggaaccccactgtcccctccatggtggcagtttgtctggctgatggtagtattgctgtcctgcaagtcacggaaacagtgaaagtatgtgcaactcttccttccacggtagcagtaacctctgtgtgctggagccccaaaggaaagcagctggcagtgggaaaacagaatggaactgtggtccagtatcttcctactttgcaggaaaaaaaagtcattccttgtcctccgttttatgagtcagatcatcctgtcagagttctggatgtgctgtggattggtacctacgtcttcgccatagtgtatgctgctgcagatgggaccctggaaacgtctccagatgtggtgatggctctactaccgaaaaaagaagaaaagcacccagagatatttgtgaactttatggagccctgttatggcagctgcacggagagacagcatcattactacctcagttacattgaggaatgggatttagtgctggcagcatctgcggcttcaacagaagttagtatccttgctcgacaaagtgatcagattaattgggaatcttggctactggaggattctagtcgagctgaattgcctgtgacagacaagagtgatgactccttgcccatgggagttgtcgtagactatacaaaccaagtggaaatcaccatcagtgatgaaaagactcttcctcctgctccagttctcatgttactttcaacagatggtgtgctttgtccattttatatgattaatcaaaatcctggggttaagtctctcatcaaaacaccagagcgactttcattagaaggagagcgacagcccaagtcaccaggaagtactcccactaccccaacctcctctcaagccccacagaaactggatgcttctgcagctgcagcccctgcctctctgccaccttcatcacctgctgctcccattgccactttttctttgcttcctgctggtggagcccccactgtgttctcctttggttcttcatctttgaagtcatctgctacggtcactggggagcccccttcatattccagtggctccgacagctccaaagcagccccaggccctggcccatcaaccttctcttttgttcccccttctaaagcctccctagcccccacccctgcagcgtctcctgtggctccatcagctgcttcattctcctttggatcatctggttttaagcctaccctggaaagcacaccagtgccaagtgtgtctgctccaaatatagcaatgaagccctccttcccaccctcaacctctgctgtcaaagtcaaccttagtgaaaagtttactgctgcagctacctctactcctgttagtagctcccagagcgcacccccgatgtcgccattctcttctgcctccaagccagctgcttctggaccactcagccaccccacacctctctcagcaccacctagttccgtgccattgaagtcctcagtcttgccctcaccatcagcaggacgatctgctcagggcagttcaagcccagtgccctcaatggtacagaaatcacccaggataacccctccagcggcaaagccaggctctccccaggcaaagtcacttcagcctgctgttgcagaaaagcagggacatcagtggaaagattcagatcctgtaatggctggaattggggaggagattgcacactttcagaaggagttggaagagttaaaagcccgaacttccaaagcctgtttccaagtgggcacttctgaggagatgaagatgctgcgaacagaatcagatgacttgcatacctttcttttggagattaaagagaccacagagtcgcttcatggagatataagtagcctgaaaacaactttacttgagggctttgctggtgttgaggaagccagagaacaaaatgaaagaaatcgtgactctggttatctgcatttgctttataaaagaccactggatcccaagagtgaagctcagcttcaggaaattcggcgccttcatcagtatgtgaaatttgctgtccaagatgtgaatgatgttctagacttggagtgggatcagcatctggaacaaaagaaaaaacaaaggcacctgcttgtgccagagcgagagacactgtttaacaccctagccaacaatcgggaaatcatcaaccaacagaggaagaggctgaatcacctggtggatagtcttcagcagctccgcctttacaaacagacttccctgtggagcctgtcctcggctgttccttcccagagcagcattcacagttttgacagtgacctggaaagcctgtgcaatgctttgttgaaaaccaccatagaatctcacaccaaatccttgcccaaagtaccagccaaactgtcccccatgaaacaggcacaactgagaaacttcttggccaagaggaagaccccaccagtgagatccactgctccagccagcctgtctcgatcagcctttctgtctcagagatattatgaagacttggatgaagtcagctcaacgtcatctgtctcccagtctctggagagtgaagatgcacggacgtcctgtaaagatgacgaggcagtggttcaggcccctcggcacgcccccgtggttcgcactccttccatccagcccagtctcttgccccatgcagcaccttttgctaaatctcacctggttcatggttcttcacctggtgtgatgggaacttcagtggctacatctgctagcaaaattattcctcaaggggccgatagcacaatgcttgccacgaaaaccgtgaaacatggtgcacctagtccttcccaccccatctcagccccgcaggcagctgccgcagcagcactcaggcggcagatggccagtcaggcaccagctgtaaacactttgactgaatcaacgttgaagaatgtccctcaagtggtaaatgtgcaggaattgaagaataaccctgcaaccccttctacagccatgggttcttcagtgccctactccacagccaaaacacctcacccagtgttgaccccagtggctgctaaccaagccaagcaggggtctctaataaattcccttaagccatctgggcctacaccagcatccggtcagttatcatctggtgacaaagcttcagggacagccaagatagaaacagctgtgacttcaaccccatctgcttctgggcagttcagcaagcctttctcattttctccatcagggactggctttaattttgggataatcacaccaacaccgtcttctaatttcactgctgcacaaggggcaacaccctccactaaagagtcaagccagccggacgcattctcatctggtgggggaagcaaaccttcttatgaggccattcctgaaagctcacctccctcaggaatcacatccgcatcaaacaccaccccaggagaacctgccgcatctagcagcagacctgtggcaccttctggaactgctctttccaccacctctagtaagctggaaaccccaccgtccaagctgggagagcttctgtttccaagttctttggctggagagactctgggaagtttttcaggactgcgggttggccaagcagatgattctacaaaaccaaccaataaggcttcatccacaagcctaactagtacccagccaaccaagacgtcaggcgtgccctcagggtttaattttactgcccccccggtgttagggaagcacacggagccccctgtgacatcctctgcaaccaccacctcagtagcaccaccagcagccaccagcacttcctcaactgccgtttttggcagtctgccagtcaccagtgcaggatcctctggggtcatcagttttggtgggacatctctaagtgctggcaagactagtttttcatttggaagccaacagaccaatagcacagtgcccccatctgccccaccaccaactacagctgccactccccttccaacatcattccccacattgtcatttggtagcctcctgagttcagcaactaccccctccctgcctatgtccgctggcagaagcacagaagaggccacttcatcagctttgcctgagaagccaggtgacagtgaggtctcagcatcagcagcctcacttctagaggagcaacagtcagcccagcttccccaggctcctccgcaaacttctgactctgttaaaaaagaacctgttcttgcccagcctgcagtcagcaactctggcactgcagcatctagtactagtcttgtagcactttctgcagaggctaccccagccaccacgggggtccctgatgccaggacggaggcagtaccacctgcttcctccttttctgtgcctgggcagactgctgtcacagcagctgctatctcaagtgcaggccctgtggccgtcgaaacatcaagtacccccatagcctccagcaccacgtccattgttgctcccggcccatctgcagaggcagcagcatttggtaccgtcacttctggctcatccgtctttgctcagcctcctgctgccagttctagctcagctttcaaccagctcaccaacaacacagccactgccccctctgccacgcccgtgtttgggcaagtggcagccagcaccgcaccaagtctgtttgggcagcagactggtagcacagccagcacagcagctgccacaccacaggtcagcagctcagggtttagcagcccagcttttggtaccacagccccaggggtctttggacagacaaccttcgggcaggcctcagtctttgggcagtcggcgagcagtgctgcaagtgtcttttccttcagtcagcctgggttcagttccgtgcctgccttcggtcagcctgcttcctccactcccacatccaccagtggaagtgtctttggtgccgcctcaagtaccagtagctccagttccttctcatttggacagtcttctcccaacacaggaggggggctgtttggccaaagcaacgctcctgcttttgggcagagtcctggctttggacagggaggctctgtctttggtggtacctcagctgccaccacaacagcagcaacctctgggttcagcttttgccaagcttcaggttttgggtctagtaatactggttctgtgtttggtcaagcagccagtactggtggaatagtctttggccagcaatcatcctcttccagtggtagcgtgtttgggtctggaaacactggaagagggggaggtttcttcagtggccttggaggaaaacccagtcaggatgcagccaacaaaaacccattcagctcggccagtgggggctttggatccacagctacctcaaatacctctaacctatttggaaacagtggggccaagacatttggtggatttgccagctcgtcgtttggagagcagaaacccactggcactttcagctctggaggaggaagtgtggcatcccaaggctttgggttttcctctccaaacaaaacaggtggcttcggtgctgctccagtgtttggcagccctcctacttttgggggatcccctgggtttggaggggtgccagcattcggttcagccccagcctttacaagccctctgggctcgacgggaggcaaagtgttcggagagggcactgcagctgccagcgcaggaggattcgggtttgggagcagcagcaacaccacatccttcggcacgctcgcgagtcagaatgcccccactttcggatcactgtcccaacagacttctggttttgggacccagagtagcggattctctggttttggatcaggcacaggagggttcagctttgggtcaaataactcgtctgtccagggttttggtggctggcgaagctgagggcgtgtcagcaggcctttcgatccctgggaccaaccgcatcctcagcttcttccccgagaaatgctggagcaggctgttcagaccgacgttgccatcaaaacacatacacccagaaagaaacaacagaaaccaaaactcacaaggcgcatgattacttgttttatatttcatgttgggttttccctcccactattaaacagtctgtttccgt

SEQ ID NO: 283979 - DNA, 5269 bp, Artificial Sequence
  derived and/or modified sequence
ggcgctgaggggaggaagtttgctgtcgagcggcctgggttccgtgggcaaggccgtgggaggcagcgttggctgcttcgacacactaccccaacctcctctcaagccccacagaaactggatgcttctgcagctgcagcccctgcctctctgccaccttcatcacctgctgctcccattgccactttttctttgcttcctgctggtggagcccccactgtgttctcctttggttcttcatctttgaagtcatctgctacggtcactggggagcccccttcatattccagtggctccgacagctccaaagcagccccaggccctggcccatcaaccttctcttttgttcccccttctaaagcctccctagcccccacccctgcagcgtctcctgtggctccatcagctgcttcattctcctttggatcatctggttttaagcctaccctggaaagcacaccagtgccaagtgtgtctgctccaaatatagcaatgaagccctccttcccaccctcaacctctgctgtcaaagtcaaccttagtgaaaagtttactgctgcagctacctctactcctgttagtagctcccagagcgcacccccgatgtcgccattctcttctgcctccaagccagctgcttctggaccactcagccaccccacacctctctcagcaccacctagttccgtgccattgaagtcctcagtcttgccctcaccatcagcaggacgatctgctcagggcagttcaagcccagtgccctcaatggtacagaaatcacccaggataacccctccagcggcaaagccaggctctccccaggcaaagtcacttcagcctgctgttgcagaaaagcagggacatcagtggaaagattcagatcctgtaatggctggaattggggaggagattgcacactttcagaaggagttggaagagttaaaagcccgaacttccaaagcctgtttccaagtgggcacttctgaggagatgaagatgctgcgaacagaatcagatgacttgcatacctttcttttggagattaaagagaccacagagtcgcttcatggagatataagtagcctgaaaacaactttacttgagggctttgctggtgttgaggaagccagagaacaaaatgaaagaaatcgtgactctggttatctgcatttgctttataaaagaccactggatcccaagagtgaagctcagcttcaggaaattcggcgccttcatcagtatgtgaaatttgctgtccaagatgtgaatgatgttctagacttggagtgggatcagcatctggaacaaaagaaaaaacaaaggcacctgcttgtgccagagcgagagacactgtttaacaccctagccaacaatcgggaaatcatcaaccaacagaggaagaggctgaatcacctggtggatagtcttcagcagctccgcctttacaaacagacttccctgtggagcctgtcctcggctgttccttcccagagcagcattcacagttttgacagtgacctggaaagcctgtgcaatgctttgttgaaaaccaccatagaatctcacaccaaatccttgcccaaagtaccagccaaactgtcccccatgaaacaggcacaactgagaaacttcttggccaagaggaagaccccaccagtgagatccactgctccagccagcctgtctcgatcagcctttctgtctcagagatattatgaagacttggatgaagtcagctcaacgtcatctgtctcccagtctctggagagtgaagatgcacggacgtcctgtaaagatgacgaggcagtggttcaggcccctcggcacgcccccgtggttcgcactccttccatccagcccagtctcttgccccatgcagcaccttttgctaaatctcacctggttcatggttcttcacctggtgtgatgggaacttcagtggctacatctgctagcaaaattattcctcaaggggccgatagcacaatgcttgccacgaaaaccgtgaaacatggtgcacctagtccttcccaccccatctcagccccgcaggcagctgccgcagcagcactcaggcggcagatggccagtcaggcaccagctgtaaacactttgactgaatcaacgttgaagaatgtccctcaagtggtaaatgtgcaggaattgaagaataaccctgcaaccccttctacagccatgggttcttcagtgccctactccacagccaaaacacctcacccagtgttgaccccagtggctgctaaccaagccaagcaggggtctctaataaattcccttaagccatctgggcctacaccagcatccggtcagttatcatctggtgacaaagcttcagggacagccaagatagaaacagctgtgacttcaaccccatctgcttctgggcagttcagcaagcctttctcattttctccatcagggactggctttaattttgggataatcacaccaacaccgtcttctaatttcactgctgcacaaggggcaacaccctccactaaagagtcaagccagccggacgcattctcatctggtgggggaagcaaaccttcttatgaggccattcctgaaagctcacctccctcaggaatcacatccgcatcaaacaccaccccaggagaacctgccgcatctagcagcagacctgtggcaccttctggaactgctctttccaccacctctagtaagctggaaaccccaccgtccaagctgggagagcttctgtttccaagttctttggctggagagactctgggaagtttttcaggactgcgggttggccaagcagatgattctacaaaaccaaccaataaggcttcatccacaagcctaactagtacccagccaaccaagacgtcaggcgtgccctcagggtttaattttactgcccccccggtgttagggaagcacacggagccccctgtgacatcctctgcaaccaccacctcagtagcaccaccagcagccaccagcacttcctcaactgccgtttttggcagtctgccagtcaccagtgcaggatcctctggggtcatcagttttggtgggacatctctaagtgctggcaagactagtttttcatttggaagccaacagaccaatagcacagtgcccccatctgccccaccaccaactacagctgccactccccttccaacatcattccccacattgtcatttggtagcctcctgagttcagcaactaccccctccctgcctatgtccgctggcagaagcacagaagaggccacttcatcagctttgcctgagaagccaggtgacagtgaggtctcagcatcagcagcctcacttctagaggagcaacagtcagcccagcttccccaggctcctccgcaaacttctgactctgttaaaaaagaacctgttcttgcccagcctgcagtcagcaactctggcactgcagcatctagtactagtcttgtagcactttctgcagaggctaccccagccaccacgggggtccctgatgccaggacggaggcagtaccacctgcttcctccttttctgtgcctgggcagactgctgtcacagcagctgctatctcaagtgcaggccctgtggccgtcgaaacatcaagtacccccatagcctccagcaccacgtccattgttgctcccggcccatctgcagaggcagcagcatttggtaccgtcacttctggctcatccgtctttgctcagcctcctgctgccagttctagctcagctttcaaccagctcaccaacaacacagccactgccccctctgccacgcccgtgtttgggcaagtggcagccagcaccgcaccaagtctgtttgggcagcagactggtagcacagccagcacagcagctgccacaccacaggtcagcagctcagggtttagcagcccagcttttggtaccacagccccaggggtctttggacagacaaccttcgggcaggcctcagtctttgggcagtcggcgagcagtgctgcaagtgtcttttccttcagtcagcctgggttcagttccgtgcctgccttcggtcagcctgcttcctccactcccacatccaccagtggaagtgtctttggtgccgcctcaagtaccagtagctccagttccttctcatttggacagtcttctcccaacacaggaggggggctgtttggccaaagcaacgctcctgcttttgggcagagtcctggctttggacagggaggctctgtctttggtggtacctcagctgccaccacaacagcagcaacctctgggttcagcttttgccaagcttcaggttttgggtctagtaatactggttctgtgtttggtcaagcagccagtactggtggaatagtctttggccagcaatcatcctcttccagtggtagcgtgtttgggtctggaaacactggaagagggggaggtttcttcagtggccttggaggaaaacccagtcaggatgcagccaacaaaaacccattcagctcggccagtgggggctttggatccacagctacctcaaatacctctaacctatttggaaacagtggggccaagacatttggtggatttgccagctcgtcgtttggagagcagaaacccactggcactttcagctctggaggaggaagtgtggcatcccaaggctttgggttttcctctccaaacaaaacaggtggcttcggtgctgctccagtgtttggcagccctcctacttttgggggatcccctgggtttggaggggtgccagcattcggttcagccccagcctttacaagccctctgggctcgacgggaggcaaagtgttcggagagggcactgcagctgccagcgcaggaggattcgggtttgggagcagcagcaacaccacatccttcggcacgctcgcgagtcagaatgcccccactttcggatcactgtcccaacagacttctggttttgggacccagagtagcggattctctggttttggatcaggcacaggagggttcagctttgggtcaaataactcgtctgtccagggttttggtggctggcgaagctgagggcgtgtcagcaggcctttcgatccctgggaccaaccgcatcctcagcttcttccccgagaaatgctggagcaggctgttcagaccgacgttgccatcaaaacacatacacccagaaagaaacaacagaaaccaaaactcacaaggcgcatgattacttgttttatatttcatgttgggttttccctcccactattaaacagtctgtttccgt

SEQ ID NO: 283980 - DNA, 6275 bp, Artificial Sequence
  derived and/or modified sequence
atgggggatgagatggatgccatgattccggaacgggaaatgaaggattttcaattccgggctctgaagaaagtgaggatttttgattccccggaggaacttcctaaagagcgttctagtctcctcgccgttagcaacaagtatggactggtttttgctgggggagcctctggcttgcaaatttttccgactaagaacctgctcatccaaaacaagccaggcgatgatcctaacaagattgtggataaagtgcaaggcctactggttccaatgaaatttccgatccaccatctggccttgtcttgcgacaaccttactttgtcagcctgcatgatgagcagcgaatatggttctatcattgcattttttgatgtgcggactttttcaaatgaggcaaagcagcagaaacgcccttttgcttatcacaagctgctgaaggatgccggaggcatggtgatcgacatgaagtggaatcccactgtgcctagcatggtggccgtgtgtctagcagatggaagcatcgctgttctccaagttacggagacggtgaaggtatgtgccacccttcctagcactgtcgccgtgacatctgtgtgttggtcacccaaggggaaacagctagccgtgggaaagcagaatggtactgtggtccagtatctccctaccctacaagagaaaaaagttattccatgcccaccattttacgaaagtgatcatccagtcagagtattggatgtgttatggattggcacctatgtctttgcaattgtctatgccgctgccgatggaacccttgaaaccagcccagacgtggtgatggcgctgttgccaaagaaggaggagaaacatccagaaatcttcgttaatttcatggaaccttgttatggctcttgcactgagcgccagcaccattactaccttagctatattgaagaatgggacctagtgctggcagcgtccgccgcaagcacggaggtgtctatcttggctcggcagagcgaccaaataaactgggagagttggctgctggaggactccagcagagctgagctgccagtcaccgacaagagcgacgactccttgccaatgggcgtggtcgttgactatacaaatcaggtggaaattactatcagtgatgagaagacactcccacctgccccagtgttaatgttactcagcaccgatggagtactctgccctttttacatgatcaaccagaaccccggtgtgaaatcgttaattaagactcctgagcggctttccttagagggcgaacgtcagcccaagagtccaggatccacacctacaacacccacatcctcccaggcaccgcaaaaactggacgcttcagcggcagcggcacctgctagtctgccacccagctccccagccgctcccatcgccacgttcagcctgctgcccgctggaggtgccccaacggtgtttagtttcggaagcagctctttgaaatcttcggctacagtcaccggagagccgccaagttacagttctggaagtgatagtagcaaggcagcccctgggcctggccctagcacatttagcttcgtgccaccttcaaaggcttcactggctccgacaccagcagcctctccggtagctccgtcagctgctagtttctctttcgggagctctggattcaaacctacactggagtccactccggtaccctcagtgtccgctcccaacatcgccatgaagccatcattccctccaagcaccagtgccgttaaagtgaacctaagtgagaagtttaccgcagctgctacatctacccccgtgtcttccagtcagtcagctccaccaatgtcaccctttagttccgccagcaagcctgccgcttccggcccactctctcacccaacccctttgtccgcgccaccttctagcgtgcctttaaaaagttctgttttgccctccccctcagccggacgatctgctcagggatctagttccccggtcccttctatggtccagaagagtccacgcatcactccaccagctgccaaacctggttctcctcaggctaagtccctgcagccagctgtggctgaaaagcagggtcaccagtggaaggacagcgaccctgtgatggcaggtatcggggaggagatcgcccacttccagaaggaactcgaggagctgaaggcacgaacatccaaggcctgtttccaggtagggaccagcgaggagatgaagatgctgcgcacagaaagcgatgaccttcataccttcctgttagaaattaaggaaacaaccgaaagcctgcatggcgatattagctccctgaaaacaaccctcctcgaggggtttgcgggagtggaagaggccagagagcaaaatgaacgcaatcgagatagcgggtacctccatctgctctataagcgccctctcgacccaaagagcgaagcccagctccaagagatccggagactgcatcagtacgtgaaattcgccgttcaggacgtgaacgacgtgctggacttagaatgggaccaacatctcgagcagaagaaaaagcaacgtcacttgttggttcccgagcgcgaaaccttgttcaacactttggctaacaacagagagataatcaatcagcaaaggaaacgcctgaatcacctcgttgactccttacagcagctgaggctctacaagcagacaagcttgtggagcctttcctccgcggtgccctctcagtcttctattcatagcttcgactccgacctggagtccctgtgcaatgccctcctgaagacaacaatcgagagccacaccaagtctcttcccaaagtacccgcaaagttgtcccctatgaagcaggctcagctcaggaacttccttgctaaaaggaagacgccacccgtccgctccacagccccagcgtccttatccagaagtgctttcctgtcccagcgatactacgaagatctggacgaagtgtcaagtacttcatctgttagtcaaagcctggaatccgaggatgcccgaacatcatgtaaggacgacgaagccgtcgttcaggcccctaggcacgcaccagttgtcaggaccccctctatccagccatctctcctgccacatgcagcaccctttgctaagtcgcacctagtgcatggatcctcacctggcgtcatgggcacaagtgtcgctacaagtgcttcaaaaattatcccgcaaggagccgattctacgatgttagccaccaaaaccgtgaagcatggtgccccaagcccctcccatccgatcagtgcacctcaggccgctgccgcagcggctctacggaggcaaatggcctcacaggccccagcagttaacacactcactgaatcaactctgaaaaatgttccgcaagtggtaaatgtgcaggaattgaaaaataatcccgcaaccccatccacagccatgggctcaagcgtgccttacagcaccgcaaagaccccccatccagttcttacacccgtggccgctaatcaagcaaagcaaggttccctcatcaattcccttaaaccaagtggtcctacacctgctagcggccagctgtctagtggagataaagcaagcggcaccgccaaaatcgagaccgccgtcacctctaccccttcagcctccgggcagttcagtaaaccattctcattttcaccaagcgggactgggtttaattttggaatcatcacgccgacccctagtagtaacttcacagccgcacagggagcgacacccagtaccaaggagtcatctcagccggacgctttcagtagcgggggtggatctaaacctagctatgaagccatacccgagtcctctccaccatctgggatcacatccgcaagcaacaccactcctggagagcctgccgctagctcatcccgacctgttgcaccctccgggacagctctatctaccacatcctcgaagcttgagacaccaccgagcaagttgggtgaactcctcttcccttcatccctggctggtgaaactctgggttccttctccgggttaagggtagggcaggccgacgattctacaaaaccgaccaataaggctagctccacatccctgacttccacccaacccactaagacttcaggggtgccttctggctttaactttactgcgccacccgtactaggcaagcacactgaaccacccgtcacgagtagcgccaccaccacatcagtggctccgcctgccgcaaccagcacttcctctacggcggtgttcggatcattgcccgtgacaagcgctggatctagcggtgtaatcagttttgggggaacaagtcttagcgctggtaaaacctcttttagtttcgggtcacaacagactaattccacagtaccaccgagcgcgcctccgcctacaactgcggctacacccctgccgacctcttttcccaccttgtcttttgggagcctcctatcatccgccaccacaccttcgctcccaatgtcagccggacggagcaccgaggaggcgaccagctcagctcttcctgaaaaacccggagattccgaggtgtcggcttctgcagctagcctgctggaagagcaacaatctgctcagctgccacaggcaccgcctcagacatccgattctgtcaagaaggagccagttctcgcacagccagccgtgagtaattccgggaccgcagcctcttctactagcttggtcgccttgagcgccgaagcgacacccgcaactacaggggttcctgacgcacgcaccgaggcagtgccacccgcaagcagtttctctgttccgggtcagaccgccgttacagcggctgctatctcctccgccggtcccgtggcggtggaaacgtcttctactcccatagccagcagcaccaccagcatcgtggcccctggcccatcagcagaagctgcggcttttggcacagtgacatctgggagctctgtcttcgcgcagccacctgccgcaagtagctcaagcgccttcaatcagttgaccaacaataccgccaccgcaccaagtgctactccagtattcggccaggtggcagcaagcaccgcaccctcacttttcggacaacagaccggatccactgcttccaccgcagctgctactccccaggtgtcctccagcgggttctcatctcccgcatttgggaccacagcgccaggtgtatttgggcaaaccaccttcgggcaggcctccgtgttcgggcagagcgcctcctccgcagcctccgtattcagcttttcccagcccggattcagctcagtcccggctttcggacaacctgcttcctccactccgacctcaacaagtggctccgtttttggcgctgctagctccacttctagctctagcagtttttccttcggccagagttctcccaacacaggcggagggctgttcggacagtctaatgctccggcattcggtcagtcgcccggttttggccagggaggctccgtttttggcggaaccagcgctgccaccaccactgctgcaacatctgggttcagtttctgccaggcatcgggctttgggagcagtaacacaggcagcgtgttcggacaagcagccagtaccggcggtattgttttcgggcagcagtctagtagttcctccggaagtgtgtttggtagtggcaataccgggagaggaggagggtttttcagtggactgggaggcaaaccttctcaggatgccgctaacaagaacccttttagcagcgccagtggcggttttggctctacagccaccagtaacacctcaaacttgttcggaaacagcggagccaagacatttggtgggtttgcttcttctagttttggagagcagaagccgacaggaacattttcctcaggcggaggctcagtagcaagtcaggggttcggcttcagctccccgaacaagacgggaggcttcggagcagcgccagtgtttgggagcccacctactttcgggggttccccaggcttcggcggagttcctgcatttggatctgctcccgcatttaccagtcccctggggtccaccggaggcaaagtgttcggtgaggggaccgcagccgctagcgccggtgggttcggcttcggctcctcgtcaaataccacatccttcggaaccctcgccagccaaaatgctccaacgtttgggagcctgagccaacagaccagcggattcgggacccagagttccgggttcagcgggtttggaagcggcacagggggattctccttcggaagtaacaattctagcgtgcagggattcggcggttggaggagtta

SEQ ID NO: 283981 - DNA, 5055 bp, Artificial Sequence
  derived and/or modified sequence
ggggcagaaggcaggaaattcgctgtcgagaggcctggttttcggggacagggcagaggtaggcagaggtggctgttgaggcacactacccccacttcaagccaagcgcctcagaaactcgacgcttccgccgctgcagcgccagcctccctgccaccgtcgtctcctgcagcgcctatcgccactttcagcctgctccctgcaggcggtgctcccacagtctttagtttcgggtcctcctctctcaaaagctcggctacagtgaccggcgaacctccgagttacagtagtggaagcgactctagtaaggccgcaccaggccctgggccaagcaccttcagctttgttccaccgagcaaggcttccctagcacctacacctgccgctagtccagtcgccccatctgcagcttcattctccttcggatccagtggcttcaaacctactctcgaaagcacgcctgtgccatccgtgtccgcaccaaacattgcgatgaagccaagctttccaccttccacttccgccgtgaaggtcaacctctctgaaaagttcacagccgctgcaacttctacccctgtatcatcttcacaatccgctcctccgatgagtccgttctcctctgcttccaaacccgctgcaagcgggccactgagccaccctactcctttgtcggccccaccctctagcgtgcctctcaaatccagcgtcctgccctccccatctgctggaagatcagctcaaggctcgagttcaccggtgccctccatggtacagaagtccccgaggatcacaccccctgccgcaaaaccaggctccccgcaggcaaaatccttacagcctgcagtcgccgaaaagcaaggccatcaatggaaagacagtgatcctgttatggctggcattggggaagagattgcccatttccagaaagaactggaggagcttaaagccaggacctccaaggcttgcttccaggtcggaaccagcgaggagatgaaaatgctgaggactgagtcggacgatctgcacactttcctgctcgaaattaaggagaccaccgagtccctgcatggcgacatctcgagtctgaaaacaacactgttagaggggtttgccggagtggaagaggcccgagagcagaacgagagaaatcgcgactcgggatacctccatctgttatataaaagacctctggatcctaaatctgaagctcaattgcaagaaataagacgactgcatcagtacgtgaagttcgcagtacaggacgttaatgacgtcttagaccttgagtgggaccagcacctggagcagaaaaagaagcaaaggcaccttttagtgccggagagagaaaccctgtttaataccttggcaaataatcgtgaaataataaatcagcagcgcaagcggttgaaccatttagttgacagcctacagcagttgcggctctacaaacagacttcactgtggagcctgtcatcagccgtaccctctcagtcttcaatccacagctttgactcagatctggaatccctgtgtaacgctctgctgaagaccaccatcgagtcacacactaagtcccttcccaaggttcctgctaagctgtcgcccatgaagcaagcccagctacggaacttcttggctaaacggaagacaccaccggttcgaagcactgccccagcctctcttagtaggagcgcatttttgtcccagcggtactacgaagacctggatgaggtgagctctacttcaagcgtctcacaaagcctagagagtgaggatgcgagaacttcttgcaaagatgacgaggccgttgtccaagctccccgacacgccccagtagtgaggacacccagtattcagcccagcctgttgcctcatgcagcccctttcgccaagagtcacttagtgcacgggtcaagtccaggagtgatggggacctccgtcgctacatctgccagcaaaatcattccccagggagctgattcaaccatgctcgccaccaagacagtgaagcacggtgcgccttcccctagccaccccatctcagctccccaggcagccgcagctgcggctctacgtaggcaaatggcctcccaggcacccgcagttaacacgctgacagaatctactctaaagaatgtgccacaagtcgtgaacgtgcaggagctgaagaacaatcctgcaactccttcgaccgcaatgggctcctcagttccgtactccacagcaaagacaccacatccagtcctgacccctgttgccgcaaatcaggctaagcagggttcactaattaactctcttaagccctcagggcctactcctgcgagtggacagttgagttccggagacaaggcgagcggcaccgccaagattgaaactgcagtcacctctactccatccgctagcgggcagttcagcaagcctttctcattctctcctagtggaacggggttcaacttcggaatcatcacccccaccccctcttctaacttcacggcagctcaaggcgctacaccgagcactaaggaatcctcacagcctgatgcgttctcatctgggggagggagcaagccttcttatgaagccatccccgagagcagcccgccttctggaattacttcagcttccaacacgacccctggggagccggcagctagcagttcgaggccagtggctcccagcggcaccgcgctaagcaccacaagctccaaactcgaaactccgccatcaaaattaggagaactgctcttcccgagctcgctggccggagaaacactggggagcttctccggcctccgagtggggcaggccgatgactctaccaagcctactaataaagcttccagcacctctttgacctcgacacagcccacgaagacatctggtgtgccctccgggttcaattttactgccccacctgttctgggaaagcatacagagcccccagtgacaagctctgcgacaactaccagcgttgctccacccgcagcgaccagtacaagcagtacagccgtttttggaagcctgccagttacaagcgccggaagctccggagttatcagtttcgggggaacctctctcagtgctggcaaaaccagcttctccttcgggagccaacaaacaaactcaacagtcccgccatccgcacctccaccaacaacagctgccactcctctgcctacaagtttcccgaccctgtcttttgggtctttactctcctctgccactacccccagtttacccatgagtgccggacggtcaacggaggaggctacctcgagcgcgctcccggaaaaacctggggactcagaggtcagtgcatctgccgcaagtctgctggaggaacagcagagcgcccaactgcctcaagctcctccccagactagcgatagcgtaaagaaagagcccgtgcttgctcagcctgccgtgtcgaattcggggaccgcagcctccagtacttcactggtcgcactttccgccgaggccacccctgcgaccacaggggtgcccgatgccagaactgaggctgtgcctccagcgagcagcttctcagtgcctggccagactgccgttactgccgcagccatcagcagcgccggacccgtcgcggtcgaaaccagctccacccccattgcatcatccacaacctcaatcgtcgcgccaggtccctctgccgaagctgctgcttttggcacagttacttctggaagctcagtgttcgcacagccccctgccgcttcctcatcttccgcttttaaccagttgaccaacaataccgcaacagccccttctgccacccccgtattcggccaggtagccgctagcactgcgccttccttgttcggccaacaaactggctccaccgctagtaccgcggctgctaccccgcaggtaagtagcagtggattctcttctcccgcattcggcactactgccccaggagtgtttggccagactacgttcggacaggcttccgtattcggtcaatccgccagctctgccgcttccgtgttcagctttagccagcctgggttcagttccgtcccagccttcggccagcctgcctccagcacacctactagcactagcggcagtgtttttggtgccgcaagctcaacctctagttccagttccttttcttttgggcagtcttcaccaaatacaggaggtggactcttcgggcaatccaacgctccagccttcgggcagagtccaggctttggccaaggaggctccgtgttcgggggtacctccgctgcaacaaccaccgccgctacaagcgggttctcattttgtcaggccagcggattcgggagttcgaacaccgggagtgtgtttggacaggccgctagcaccggtggcattgtttttggccaacagtcctcctcgtcatcagggagtgtgttcgggagcgggaacactggtcgcggagggggattcttctctggtttggggggaaagccctcacaggacgctgccaacaaaaacccatttagtagcgccagcgggggtttcggctctaccgcgactagtaacacctctaatctcttcggaaacagtggcgctaaaacattcggaggcttcgctagcagctcctttggagaacagaagcctaccggcacattttcatccgggggaggatccgtggcctcccagggatttgggttctccagtcccaacaaaaccggaggcttcggagccgctcctgtgtttggctcccctcccacttttggtggatcccccggatttgggggagttccagccttcggttctgctcccgctttcacctctcctttgggatccacgggcggaaaggtgtttggcgagggaaccgcagcagcctcagccggaggatttggatttggttccagctcaaacacgacctcgttcgggacactcgcctcccagaatgctccaaccttcggctcactgtcccagcagactagcggcttcggtactcagagcagtggtttcagtggattcggcagcggaactggtggcttttcctttggcagtaataattcttctgttcaaggatttggaggctggcggtcctag

SEQ ID NO: 283982 - DNA, 6276 bp, Artificial Sequence
  derived and/or modified sequence
atgggcgacgagatggacgccatgatccccgagagagagatgaaggacttccagttcagagccctgaagaaggtgagaatcttcgacagccccgaggagctgcccaaggagagaagcagcctgctggccgtgagcaacaagtacggcctggtgttcgccggcggcgccagcggcctgcagatcttccccaccaagaacctgctgatccagaacaagcccggcgacgaccccaacaagatcgtggacaaggtgcagggcctgctggtgcccatgaagttccccatccaccacctggccctgagctgcgacaacctgaccctgagcgcctgcatgatgagcagcgagtacggcagcatcatcgccttcttcgacgtgagaaccttcagcaacgaggccaagcagcagaagagacccttcgcctaccacaagctgctgaaggacgccggcggcatggtgatcgacatgaagtggaaccccaccgtgcccagcatggtggccgtgtgcctggccgacggcagcatcgccgtgctgcaggtgaccgagaccgtgaaggtgtgcgccaccctgcccagcaccgtggccgtgaccagcgtgtgctggagccccaagggcaagcagctggccgtgggcaagcagaacggcaccgtggtgcagtacctgcccaccctgcaggagaagaaggtgatcccctgcccccccttctacgagagcgaccaccccgtgagagtgctggacgtgctgtggatcggcacctacgtgttcgccatcgtgtacgccgccgccgacggcaccctggagaccagccccgacgtggtgatggccctgctgcccaagaaggaggagaagcaccccgagatcttcgtgaacttcatggagccctgctacggcagctgcaccgagagacagcaccactactacctgagctacatcgaggagtgggacctggtgctggccgccagcgccgccagcaccgaggtgagcatcctggccagacagagcgaccagatcaactgggagagctggctgctggaggacagcagcagagccgagctgcccgtgaccgacaagagcgacgacagcctgcccatgggcgtggtggtggactacaccaaccaggtggagatcaccatcagcgacgagaagaccctgccccccgcccccgtgctgatgctgctgagcaccgacggcgtgctgtgccccttctacatgatcaaccagaaccccggcgtgaagagcctgatcaagacccccgagagactgagcctggagggcgagagacagcccaagagccccggcagcacccccaccacccccaccagcagccaggccccccagaagctggacgccagcgccgccgccgcccccgccagcctgccccccagcagccccgccgcccccatcgccaccttcagcctgctgcccgccggcggcgcccccaccgtgttcagcttcggcagcagcagcctgaagagcagcgccaccgtgaccggcgagccccccagctacagcagcggcagcgacagcagcaaggccgcccccggccccggccccagcaccttcagcttcgtgccccccagcaaggccagcctggcccccacccccgccgccagccccgtggcccccagcgccgccagcttcagcttcggcagcagcggcttcaagcccaccctggagagcacccccgtgcccagcgtgagcgcccccaacatcgccatgaagcccagcttcccccccagcaccagcgccgtgaaggtgaacctgagcgagaagttcaccgccgccgccaccagcacccccgtgagcagcagccagagcgccccccccatgagccccttcagcagcgccagcaagcccgccgccagcggccccctgagccaccccacccccctgagcgccccccccagcagcgtgcccctgaagagcagcgtgctgcccagccccagcgccggcagaagcgcccagggcagcagcagccccgtgcccagcatggtgcagaagagccccagaatcaccccccccgccgccaagcccggcagcccccaggccaagagcctgcagcccgccgtggccgagaagcagggccaccagtggaaggacagcgaccccgtgatggccggcatcggcgaggagatcgcccacttccagaaggagctggaggagctgaaggccagaaccagcaaggcctgcttccaggtgggcaccagcgaggagatgaagatgctgagaaccgagagcgacgacctgcacaccttcctgctggagatcaaggagaccaccgagagcctgcacggcgacatcagcagcctgaagaccaccctgctggagggcttcgccggcgtggaggaggccagagagcagaacgagagaaacagagacagcggctacctgcacctgctgtacaagagacccctggaccccaagagcgaggcccagctgcaggagatcagaagactgcaccagtacgtgaagttcgccgtgcaggacgtgaacgacgtgctggacctggagtgggaccagcacctggagcagaagaagaagcagagacacctgctggtgcccgagagagagaccctgttcaacaccctggccaacaacagagagatcatcaaccagcagagaaagagactgaaccacctggtggacagcctgcagcagctgagactgtacaagcagaccagcctgtggagcctgagcagcgccgtgcccagccagagcagcatccacagcttcgacagcgacctggagagcctgtgcaacgccctgctgaagaccaccatcgagagccacaccaagagcctgcccaaggtgcccgccaagctgagccccatgaagcaggcccagctgagaaacttcctggccaagagaaagaccccccccgtgagaagcaccgcccccgccagcctgagcagaagcgccttcctgagccagagatactacgaggacctggacgaggtgagcagcaccagcagcgtgagccagagcctggagagcgaggacgccagaaccagctgcaaggacgacgaggccgtggtgcaggcccccagacacgcccccgtggtgagaacccccagcatccagcccagcctgctgccccacgccgcccccttcgccaagagccacctggtgcacggcagcagccccggcgtgatgggcaccagcgtggccaccagcgccagcaagatcatcccccagggcgccgacagcaccatgctggccaccaagaccgtgaagcacggcgcccccagccccagccaccccatcagcgccccccaggccgccgccgccgccgccctgagaagacagatggccagccaggcccccgccgtgaacaccctgaccgagagcaccctgaagaacgtgccccaggtggtgaacgtgcaggagctgaagaacaaccccgccacccccagcaccgccatgggcagcagcgtgccctacagcaccgccaagaccccccaccccgtgctgacccccgtggccgccaaccaggccaagcagggcagcctgatcaacagcctgaagcccagcggccccacccccgccagcggccagctgagcagcggcgacaaggccagcggcaccgccaagatcgagaccgccgtgaccagcacccccagcgccagcggccagttcagcaagcccttcagcttcagccccagcggcaccggcttcaacttcggcatcatcacccccacccccagcagcaacttcaccgccgcccagggcgccacccccagcaccaaggagagcagccagcccgacgccttcagcagcggcggcggcagcaagcccagctacgaggccatccccgagagcagcccccccagcggcatcaccagcgccagcaacaccacccccggcgagcccgccgccagcagcagcagacccgtggcccccagcggcaccgccctgagcaccaccagcagcaagctggagaccccccccagcaagctgggcgagctgctgttccccagcagcctggccggcgagaccctgggcagcttcagcggcctgagagtgggccaggccgacgacagcaccaagcccaccaacaaggccagcagcaccagcctgaccagcacccagcccaccaagaccagcggcgtgcccagcggcttcaacttcaccgccccccccgtgctgggcaagcacaccgagccccccgtgaccagcagcgccaccaccaccagcgtggccccccccgccgccaccagcaccagcagcaccgccgtgttcggcagcctgcccgtgaccagcgccggcagcagcggcgtgatcagcttcggcggcaccagcctgagcgccggcaagaccagcttcagcttcggcagccagcagaccaacagcaccgtgccccccagcgcccccccccccaccaccgccgccacccccctgcccaccagcttccccaccctgagcttcggcagcctgctgagcagcgccaccacccccagcctgcccatgagcgccggcagaagcaccgaggaggccaccagcagcgccctgcccgagaagcccggcgacagcgaggtgagcgccagcgccgccagcctgctggaggagcagcagagcgcccagctgccccaggcccccccccagaccagcgacagcgtgaagaaggagcccgtgctggcccagcccgccgtgagcaacagcggcaccgccgccagcagcaccagcctggtggccctgagcgccgaggccacccccgccaccaccggcgtgcccgacgccagaaccgaggccgtgccccccgccagcagcttcagcgtgcccggccagaccgccgtgaccgccgccgccatcagcagcgccggccccgtggccgtggagaccagcagcacccccatcgccagcagcaccaccagcatcgtggcccccggccccagcgccgaggccgccgccttcggcaccgtgaccagcggcagcagcgtgttcgcccagccccccgccgccagcagcagcagcgccttcaaccagctgaccaacaacaccgccaccgcccccagcgccacccccgtgttcggccaggtggccgccagcaccgcccccagcctgttcggccagcagaccggcagcaccgccagcaccgccgccgccaccccccaggtgagcagcagcggcttcagcagccccgccttcggcaccaccgcccccggcgtgttcggccagaccaccttcggccaggccagcgtgttcggccagagcgccagcagcgccgccagcgtgttcagcttcagccagcccggcttcagcagcgtgcccgccttcggccagcccgccagcagcacccccaccagcaccagcggcagcgtgttcggcgccgccagcagcaccagcagcagcagcagcttcagcttcggccagagcagccccaacaccggcggcggcctgttcggccagagcaacgcccccgccttcggccagagccccggcttcggccagggcggcagcgtgttcggcggcaccagcgccgccaccaccaccgccgccaccagcggcttcagcttctgccaggccagcggcttcggcagcagcaacaccggcagcgtgttcggccaggccgccagcaccggcggcatcgtgttcggccagcagagcagcagcagcagcggcagcgtgttcggcagcggcaacaccggcagaggcggcggcttcttcagcggcctgggcggcaagcccagccaggacgccgccaacaagaaccccttcagcagcgccagcggcggcttcggcagcaccgccaccagcaacaccagcaacctgttcggcaacagcggcgccaagaccttcggcggcttcgccagcagcagcttcggcgagcagaagcccaccggcaccttcagcagcggcggcggcagcgtggccagccagggcttcggcttcagcagccccaacaagaccggcggcttcggcgccgcccccgtgttcggcagcccccccaccttcggcggcagccccggcttcggcggcgtgcccgccttcggcagcgcccccgccttcaccagccccctgggcagcaccggcggcaaggtgttcggcgagggcaccgccgccgccagcgccggcggcttcggcttcggcagcagcagcaacaccaccagcttcggcaccctggccagccagaacgcccccaccttcggcagcctgagccagcagaccagcggcttcggcacccagagcagcggcttcagcggcttcggcagcggcaccggcggcttcagcttcggcagcaacaacagcagcgtgcagggcttcggcggctggagaagctag

SEQ ID NO: 283983 - DNA, 5055 bp, Artificial Sequence
  derived and/or modified sequence
ggcgccgagggcagaaagttcgccgtggagagacccggcttcagaggccagggcagaggcagacagagatggctgctgagacacaccacccccaccagcagccaggccccccagaagctggacgccagcgccgccgccgcccccgccagcctgccccccagcagccccgccgcccccatcgccaccttcagcctgctgcccgccggcggcgcccccaccgtgttcagcttcggcagcagcagcctgaagagcagcgccaccgtgaccggcgagccccccagctacagcagcggcagcgacagcagcaaggccgcccccggccccggccccagcaccttcagcttcgtgccccccagcaaggccagcctggcccccacccccgccgccagccccgtggcccccagcgccgccagcttcagcttcggcagcagcggcttcaagcccaccctggagagcacccccgtgcccagcgtgagcgcccccaacatcgccatgaagcccagcttcccccccagcaccagcgccgtgaaggtgaacctgagcgagaagttcaccgccgccgccaccagcacccccgtgagcagcagccagagcgccccccccatgagccccttcagcagcgccagcaagcccgccgccagcggccccctgagccaccccacccccctgagcgccccccccagcagcgtgcccctgaagagcagcgtgctgcccagccccagcgccggcagaagcgcccagggcagcagcagccccgtgcccagcatggtgcagaagagccccagaatcaccccccccgccgccaagcccggcagcccccaggccaagagcctgcagcccgccgtggccgagaagcagggccaccagtggaaggacagcgaccccgtgatggccggcatcggcgaggagatcgcccacttccagaaggagctggaggagctgaaggccagaaccagcaaggcctgcttccaggtgggcaccagcgaggagatgaagatgctgagaaccgagagcgacgacctgcacaccttcctgctggagatcaaggagaccaccgagagcctgcacggcgacatcagcagcctgaagaccaccctgctggagggcttcgccggcgtggaggaggccagagagcagaacgagagaaacagagacagcggctacctgcacctgctgtacaagagacccctggaccccaagagcgaggcccagctgcaggagatcagaagactgcaccagtacgtgaagttcgccgtgcaggacgtgaacgacgtgctggacctggagtgggaccagcacctggagcagaagaagaagcagagacacctgctggtgcccgagagagagaccctgttcaacaccctggccaacaacagagagatcatcaaccagcagagaaagagactgaaccacctggtggacagcctgcagcagctgagactgtacaagcagaccagcctgtggagcctgagcagcgccgtgcccagccagagcagcatccacagcttcgacagcgacctggagagcctgtgcaacgccctgctgaagaccaccatcgagagccacaccaagagcctgcccaaggtgcccgccaagctgagccccatgaagcaggcccagctgagaaacttcctggccaagagaaagaccccccccgtgagaagcaccgcccccgccagcctgagcagaagcgccttcctgagccagagatactacgaggacctggacgaggtgagcagcaccagcagcgtgagccagagcctggagagcgaggacgccagaaccagctgcaaggacgacgaggccgtggtgcaggcccccagacacgcccccgtggtgagaacccccagcatccagcccagcctgctgccccacgccgcccccttcgccaagagccacctggtgcacggcagcagccccggcgtgatgggcaccagcgtggccaccagcgccagcaagatcatcccccagggcgccgacagcaccatgctggccaccaagaccgtgaagcacggcgcccccagccccagccaccccatcagcgccccccaggccgccgccgccgccgccctgagaagacagatggccagccaggcccccgccgtgaacaccctgaccgagagcaccctgaagaacgtgccccaggtggtgaacgtgcaggagctgaagaacaaccccgccacccccagcaccgccatgggcagcagcgtgccctacagcaccgccaagaccccccaccccgtgctgacccccgtggccgccaaccaggccaagcagggcagcctgatcaacagcctgaagcccagcggccccacccccgccagcggccagctgagcagcggcgacaaggccagcggcaccgccaagatcgagaccgccgtgaccagcacccccagcgccagcggccagttcagcaagcccttcagcttcagccccagcggcaccggcttcaacttcggcatcatcacccccacccccagcagcaacttcaccgccgcccagggcgccacccccagcaccaaggagagcagccagcccgacgccttcagcagcggcggcggcagcaagcccagctacgaggccatccccgagagcagcccccccagcggcatcaccagcgccagcaacaccacccccggcgagcccgccgccagcagcagcagacccgtggcccccagcggcaccgccctgagcaccaccagcagcaagctggagaccccccccagcaagctgggcgagctgctgttccccagcagcctggccggcgagaccctgggcagcttcagcggcctgagagtgggccaggccgacgacagcaccaagcccaccaacaaggccagcagcaccagcctgaccagcacccagcccaccaagaccagcggcgtgcccagcggcttcaacttcaccgccccccccgtgctgggcaagcacaccgagccccccgtgaccagcagcgccaccaccaccagcgtggccccccccgccgccaccagcaccagcagcaccgccgtgttcggcagcctgcccgtgaccagcgccggcagcagcggcgtgatcagcttcggcggcaccagcctgagcgccggcaagaccagcttcagcttcggcagccagcagaccaacagcaccgtgccccccagcgcccccccccccaccaccgccgccacccccctgcccaccagcttccccaccctgagcttcggcagcctgctgagcagcgccaccacccccagcctgcccatgagcgccggcagaagcaccgaggaggccaccagcagcgccctgcccgagaagcccggcgacagcgaggtgagcgccagcgccgccagcctgctggaggagcagcagagcgcccagctgccccaggcccccccccagaccagcgacagcgtgaagaaggagcccgtgctggcccagcccgccgtgagcaacagcggcaccgccgccagcagcaccagcctggtggccctgagcgccgaggccacccccgccaccaccggcgtgcccgacgccagaaccgaggccgtgccccccgccagcagcttcagcgtgcccggccagaccgccgtgaccgccgccgccatcagcagcgccggccccgtggccgtggagaccagcagcacccccatcgccagcagcaccaccagcatcgtggcccccggccccagcgccgaggccgccgccttcggcaccgtgaccagcggcagcagcgtgttcgcccagccccccgccgccagcagcagcagcgccttcaaccagctgaccaacaacaccgccaccgcccccagcgccacccccgtgttcggccaggtggccgccagcaccgcccccagcctgttcggccagcagaccggcagcaccgccagcaccgccgccgccaccccccaggtgagcagcagcggcttcagcagccccgccttcggcaccaccgcccccggcgtgttcggccagaccaccttcggccaggccagcgtgttcggccagagcgccagcagcgccgccagcgtgttcagcttcagccagcccggcttcagcagcgtgcccgccttcggccagcccgccagcagcacccccaccagcaccagcggcagcgtgttcggcgccgccagcagcaccagcagcagcagcagcttcagcttcggccagagcagccccaacaccggcggcggcctgttcggccagagcaacgcccccgccttcggccagagccccggcttcggccagggcggcagcgtgttcggcggcaccagcgccgccaccaccaccgccgccaccagcggcttcagcttctgccaggccagcggcttcggcagcagcaacaccggcagcgtgttcggccaggccgccagcaccggcggcatcgtgttcggccagcagagcagcagcagcagcggcagcgtgttcggcagcggcaacaccggcagaggcggcggcttcttcagcggcctgggcggcaagcccagccaggacgccgccaacaagaaccccttcagcagcgccagcggcggcttcggcagcaccgccaccagcaacaccagcaacctgttcggcaacagcggcgccaagaccttcggcggcttcgccagcagcagcttcggcgagcagaagcccaccggcaccttcagcagcggcggcggcagcgtggccagccagggcttcggcttcagcagccccaacaagaccggcggcttcggcgccgcccccgtgttcggcagcccccccaccttcggcggcagccccggcttcggcggcgtgcccgccttcggcagcgcccccgccttcaccagccccctgggcagcaccggcggcaaggtgttcggcgagggcaccgccgccgccagcgccggcggcttcggcttcggcagcagcagcaacaccaccagcttcggcaccctggccagccagaacgcccccaccttcggcagcctgagccagcagaccagcggcttcggcacccagagcagcggcttcagcggcttcggcagcggcaccggcggcttcagcttcggcagcaacaacagcagcgtgcagggcttcggcggctggagaagctag

SEQ ID NO: 283984 - protein, 78 aa, Artificial Sequence
  derived and/or modified sequence
GEGTAAASAGGFGFGSSSNTTSFGTLASQNAPTFGSLSQQTSGFGTQSSGFSGFGSGTGGFSFGSNNSSVQGFGGWRS

SEQ ID NO: 283985 - protein, 1519 aa, Artificial Sequence
  derived and/or modified sequence
MKPSFPPSTSAVKVNLSEKFTAAATSTPVSSSQSAPPMSPFSSASKPAASGPLSHPTPLSAPPSSVPLKSSVLPSPSGRSAQGSSSPVPSMVQKSPRITPPAAKPGSPQAKSLQPAVAEKQGHQWKDSDPVMAGIGEEIAHFQKELEELKARTSKACFQVGTSEEMKMLRTESDDLHTFLLEIKETTESLHGDISSLKTTLLEGFAGVEEAREQNERNRDSGYLHLLYKRPLDPKSEAQLQEIRRLHQYVKFAVQDVNDVLDLEWDQHLEQKKKQRHLLVPERETLFNTLANNREIINQQRKRLNHLVDSLQQLRLYKQTSLWSLSSAVPSQSSIHSFDSDLESLCNALLKTTIESHTKSLPKVPAKLSPMKQAQLRNFLAKRKTPPVRSTAPASLSRSAFLSQRYYEDLDEVSSTSSVSQSLESEDARTSCKDDEAVVQAPRHAPVVRTPSIQPSLLPHAAPFAKSHLVHGSSPGVMGTSVATSASKIIPQGADSTMLATKTVKHGAPSPSHPISAPQAAAAAALRRQMASQAPAVNTLTESTLKNVPQVVNVQELKNNPATPSTAMGSSVPYSTAKTPHPVLTPVAANQAKQGSLINSLKPSGPTPASGQLSSGDKASGTAKIETAVTSTPSASGQFSKPFSFSPSGTGFNFGIITPTPSSNFTAAQGATPSTKESSQPDAFSSGGGSKPSYEAIPESSPPSGITSASNTTPGEPAASSSRPVAPSGTALSTTSSKLETPPSKLGELLFPSSLAGETLGSFSGLRVGQADDSTKPTNKASSTSLTSTQPTKTSGVPSGFNFTAPPVLGKHTEPPVTSSATTTSVAPPAATSTSSTAVFGSLPVTSAGSSGVISFGGTSLSAGKTSFSFGSQQTNSTVPPSAPPPTTAATPLPTSFPTLSFGSLLSSATTPSLPMSAGRSTEEATSSALPEKPGDSEVSASAASLLEEQQSAQLPQAPPQTSDSVKKEPVLAQPAVSNSGTAASSTSLVALSAEATPATTGVPDARTEAVPPASSFSVPGQTAVTAAAISSAGPVAVETSSTPIASSTTSIVAPGPSAEAAAFGTVTSGSSVFAQPPAASSSSAFNQLTNNTATAPSATPVFGQVAASTAPSLFGQQTGSTASTAAATPQVSSSGFSSPAFGTTAPGVFGQTTFGQASVFGQSASSAASVFSFSQPGFSSVPAFGQPASSTPTSTSGSVFGAASSTSSSSSFSFGQSSPNTGGGLFGQSNAPAFGQSPGFGQGGSVFGGTSAATTTAATSGFSFCQASGFGSSNTGSVFGQAASTGGIVFGQQSSSSSGSVFGSGNTGRGGGFFSGLGGKPSQDAANKNPFSSASGGFGSTATSNTSNLFGNSGAKTFGGFASSSFGEQKPTGTFSSGGGSVASQGFGFSSPNKTGGFGAAPVFGSPPTFGGSPGFGGVPAFGSAPAFTSPLGSTGGKVFGEGTAAASAGGFGFGSSSNTTSFGTLASQNAPTFGSLSQQTSGFGTQSSGFSGFGSGTGGFSFGSNNSSVQGFGGWRS

SEQ ID NO: 283986 - DNA, 456 bp, Artificial Sequence
  derived and/or modified sequence
atgcccgccagccagagcagagccagagccagagacagaaacaacgtgctgaacagagccgagttcctgagcctgaaccagccccccaagggcggccccgagcccagaagcagcggcagaaaggccagcggccccagcgcccagcccccccccgccggcgacggcgccagagagagaagacagagccagcagctgcccgaggaggactgcatgcagctgaaccccagcttcaagggcatcgccttcaacagcctgctggccatcgacatctgcatgagcaagagactgggcgtgtgcgccggcagagccgccagctgggccagcgccagaagcatggtgaagctgatcggcatcaccggccacggcatcccctggatcggcggcaccatcctgtgcctggtgaagagcagcaccctggccggccaggaggtgctgatgaacctgctgctggactag

SEQ ID NO: 283987 - DNA, 456 bp, Artificial Sequence
  derived and/or modified sequence
atgccggctagccaaagccgagcccgggcaagagacaggaacaatgttctgaatagggctgaatttctcagtctgaaccaacccccaaaagggggaccggaacctaggtcgtcgggccgcaaggcctctgggccctctgctcagccaccgccagcgggggatggggccagggaaaggagacagagtcagcaactgcctgaagaggactgcatgcagttaaatccttccttcaaaggtatcgcctttaattcccttctggccatcgacatctgcatgtcgaaacgactgggggtctgcgcgggcagagccgccagttgggccagcgctcgctccatggttaagttgattggcatcacaggacacggaatcccctggatcggaggaactatcctttgtctggtgaagagctctacgcttgccggacaggaagtgctcatgaacctcttgttggactag

SEQ ID NO: 283988 - DNA, 456 bp, Artificial Sequence
  derived and/or modified sequence
atgcctgccagccagagccgggcccgggcccgggacagaaataatgtgctgaacagagctgagttcctgagcctgaaccagccccccaagggcggccctgagcccaggagcagcggcaggaaggccagcggccccagcgcccagcccccacctgctggagatggagcccgggagcggcggcagagccagcagctgcctgaggaggactgcatgcagctgaaccccagcttcaagggcatcgccttcaacagcctgctggccatcgacatctgcatgagcaagaggctgggcgtgtgtgccggccgggccgcctcctgggccagcgcccgctccatggtgaagctgattggcatcactggacatggcatcccctggattggaggcaccatcctgtgcctggtgaagagcagcaccctggccggccaggaggtgctgatgaacctgctgctggactag

SEQ ID NO: 283989 - DNA, 456 bp, Artificial Sequence
  derived and/or modified sequence
atgcccgccagccagagccgggcccgggcccgggaccggaacaacgtgttgaaccgggccgaatttctctcacttaatcaaccgccaaagggcggccctgaaccccgttcctccggccgcaaggcctcaggcccaagcgctcagccccctcctgccggagacggcgcccgggaaagacggcaatcgcagcagctgcctgaggaggactgcatgcagctgaatcccagttttaagggcattgcttttaattcactcctggctatcgacatctgcatgtcaaagcgtctgggcgtttgcgcgggacgggctgccagctgggcatccgccaggagcatggtgaaactgatagggataacaggacacggtattccctggatcggcgggacaattttgtgcctcgtgaagagtagcactcttgccggacaagaagtccttatgaaccttctcctggactag

SEQ ID NO: 283990 - DNA, 972 bp, Artificial Sequence
  derived and/or modified sequence
ccccttggagctgggtggcagaggagataaacagccatgtgcaactctccacactatatttaacagctgcggcggagaaggcagggaggcagccacggtggcggctctgggggcagctcttgtcttcggggagaaggcccttggagccgggctggcatcggccttctcggggtgagcgaggtcaccatgccagcttcccagagccgggcccgtgcccgggaccgcaacaacgtcctcaaccgggctgagttcctgtccctgaaccagccccccaaggggggcccggagccccgcagctcgggcagaaaggcctcgggcccatcagcacagcccccacctgctggtgacggggccagagagcgacgccagtcacagcagctgccagaggaggactgcatgcagctgaacccctccttcaagggcatcgccttcaactccctgctggccatcgatatctgtatgtccaagcggctgggggtgtgcgctggccgggcggcgtcctgggccagtgcccgctccatggtcaagctcatcggcatcacgggccacggcatcccctggatcggaggcaccatcctctgcctggtgaagagcagcacactggccggccaggaggtgctcatgaatctgctcctggattagcaccgccctgtgccaggtgccacgtggggcccatgtggaggcaagccattccctccacccagaggtgatgcccagcccccgtccggcccacccttcgggcaccaccaggtccccaaggtgccccaggaagcttccaccctccacgccaggcccgcatcgatttccttgtctttcccggtgtggccatcatttgagggacatgtgaggtggaggtctcaggcaaggcaaacattaacaaggggtctcagttccaaaagggcattgggttggaccacggagaacatcagttccagaggaagttacaataaaaacacgtatctccctgctcta

SEQ ID NO: 283991 - DNA, 456 bp, Artificial Sequence
  derived and/or modified sequence
atgcccgctagccagagtcgggctagggctcgcgacaggaacaatgttcttaatagggcggagtttctcagtcttaatcagcccccaaagggtggaccggaaccacgctcttccggcaggaaggccagtggaccgtccgctcagcctcccccagctggcgacggagccagggagaggcggcagagtcagcagctgccggaagaggactgcatgcaactgaacccttcctttaaaggcattgcctttaacagcctgctcgctatcgacatctgtatgagcaagagactcggagtctgtgccggtcgtgccgctagctgggcctccgcgaggtctatggtcaagcttattgggatcaccgggcatggaatcccttggattggaggcactatattatgtctggttaaatccagcacacttgcagggcaggaagttctgatgaacctgctgctggattag

SEQ ID NO: 283992 - protein, 951 aa, Artificial Sequence
  derived and/or modified sequence
MDGRWQCSCWAWFLLVLAVVAGDTVSTGSTDNSPTSNSLEGGTDATAFWWGEWTKWTACSRSCGGGVTSQERHCLQQRRKSVPGPGNRTCTGTSKRYQLCRVQECPPDGRSFREEQCVSFNSHVYNGRTHQWKPLYPDDYVHISSKPCDLHCTTVDGQRQLMVPARDGTSCKLTDLRGVCVSGKCEPIGCDGVLFSTHTLDKCGICQGDGSSCTHVTGNYRKGNAHLGYSLVTHIPAGARDIQIVERKKSADVLALADEAGYYFFNGNYKVDSPKNFNIAGTVVKYRRPMDVYETGIEYIVAQGPTNQGLNVMVWNQNGKSPSITFEYTLLQPPHESRPQPIYYGFSESAESQGLDGAGLMGFVPHNGSLYGQASSERLGLDNRLFGHPGLDMELGPSQGQETNEVCEQAGGGACEGPPRGKGFRDRNVTGTPLTGDKDDEEVDTHFASQEFFSANAISDQLLGAGSDLKDFTLNETVNSIFAQGAPRSSLAESFFVDYEENEGAGPYLLNGSYLELSSDRVANSSSEAPFPNVSTSLLTSAGNRTHKARTRPKARKQGVSPADMYRWKLSSHEPCSATCTTGVMSAYAMCVRYDGVEVDDSYCDALTRPEPVHEFCAGRECQPRWETSSWSECSRTCGEGYQFRVVRCWKMLSPGFDSSVYSDLCEAAEAVRPEERKTCRNPACGPQWEMSEWSECTAKCGERSVVTRDIRCSEDEKLCDPNTRPVGEKNCTGPPCDRQWTVSDWGPCSGSCGQGRTIRHVYCKTSDGRVVPESQCQMETKPLAIHPCGDKNCPAHWLAQDWERCNTTCGRGVKKRLVLCMELANGKPQTRSGPECGLAKKPPEESTCFERPCFKWYTSPWSECTKTCGVGVRMRDVKCYQGTDIVRGCDPLVKPVGRQACDLQPCPTEPPDDSCQDQPGTNCALAIKVNLCGHWYYSKACCRSCRPPHS

SEQ ID NO: 283993 - protein, 1060 aa, Artificial Sequence
  derived and/or modified sequence
MLFEVGEGGGAGEEGKGRGRPGRSLCTHAAPARTAHLAPSALRSARPFLWEDNLLTRSQGLPDNHDQLVPDNLEAWALAGPRGLFPKRTLVIWKRIGAGLVVTVALLPRMDGRWQCSCWAWFLLVLAVVAGDTVSTGSTDNSPTSNSLEGGTDATAFWWGEWTKWTACSRSCGGGVTSQERHCLQQRRKSVPGPGNRTCTGTSKRYQLCRVQECPPDGRSFREEQCVSFNSHVYNGRTHQWKPLYPDDYVHISSKPCDLHCTTVDGQRQLMVPARDGTSCKLTDLRGVCVSGKCEPIGCDGVLFSTHTLDKCGICQGDGSSCTHVTGNYRKGNAHLGYSLVTHIPAGARDIQIVERKKSADVLALADEAGYYFFNGNYKVDSPKNFNIAGTVVKYRRPMDVYETGIEYIVAQGPTNQGLNVMVWNQNGKSPSITFEYTLLQPPHESRPQPIYYGFSESAESQGLDGAGLMGFVPHNGSLYGQASSERLGLDNRLFGHPGLDMELGPSQGQETNEVCEQAGGGACEGPPRGKGFRDRNVTGTPLTGDKDDEEVDTHFASQEFFSANAISDQLLGAGSDLKDFTLNETVNSIFAQGAPRSSLAESFFVDYEENEGAGPYLLNGSYLELSSDRVANSSSEAPFPNVSTSLLTSAGNRTHKARTRPKARKQGVSPADMYRWKLSSHEPCSATCTTGVMSAYAMCVRYDGVEVDDSYCDALTRPEPVHEFCAGRECQPRWETSSWSECSRTCGEGYQFRVVRCWKMLSPGFDSSVYSDLCEAAEAVRPEERKTCRNPACGPQWEMSEWSECTAKCGERSVVTRDIRCSEDEKLCDPNTRPVGEKNCTGPPCDRQWTVSDWGPCSGSCGQGRTIRHVYCKTSDGRVVPESQCQMETKPLAIHPCGDKNCPAHWLAQDWERCNTTCGRGVKKRLVLCMELANGKPQTRSGPECGLAKKPPEESTCFERPCFKWYTSPWSECTKTCGVGVRMRDVKCYQGTDIVRGCDPLVKPVGRQACDLQPCPTEPPDDSCQDQPGTNCALAIKVNLCGHWYYSKACCRSCRPPHS

SEQ ID NO: 283994 - DNA, 4068 bp, Artificial Sequence
  derived and/or modified sequence
cactggcggagaaaatccccttcttttttttctctctctttttttctttttgagacggaatctcactctttcacccagactggagggcagcggcgagatctcggctcactgcaacctccacctcccaggttcaagcaattctcctgcctcagccttccgagtagctgggattacaggtgcccgccaccacgcccagctaatttttgtatttttagtagagacaggattttaccatgttggccatgctggtctcaaactcctgacctcgtgtgatccccctgcttcagcctctcaaactgctgggattataggcatgagccactgcgcctggccaacaatccccttctaaaggcaggtggtgtctccagcaccagggccatacggctgcaacacccctacaagtgccgggtctgccagacaaccacgaccaactagtcccagataaccttgaggcctgggcactggctgggccccgagggctcttcccaaagcgtaccctggtcatctggaagaggatcggagctggcctggtggtgacagtggccttgcttcctaggatggatggcagatggcaatgttcctgctgggcctggttcctgctggttctggcagttgtagctggggacacagtgtcaaccgggtccacggacaacagcccaacatccaatagcctggaggggggcaccgacgccacggccttctggtggggggagtggaccaagtggacggcgtgttcccgcagttgcgggggtggggtgacatcccaggagcggcactgcctgcagcagaggaggaagtccgtcccgggccccgggaacaggacctgcacgggcacgtccaagcggtaccagctctgcagagtgcaggagtgtccgccggacgggaggagcttccgcgaggagcagtgcgtctccttcaactcccacgtgtacaacgggcggacgcaccagtggaagcctctgtacccggatgactatgtccacatctccagcaaaccgtgtgacctgcactgtaccaccgtggacggccagcggcagctcatggtccccgcccgcgacggcacatcctgcaagctcactgacctgcgaggggtttgcgtgtctggaaaatgtgagcccatcggctgtgacggggtgcttttctccacccacacactggacaagtgtggcatctgccagggggacggtagcagctgcacccacgtgacgggcaactatcgcaaggggaatgcccaccttggttactctctggtgacccacatcccggctggtgcccgagacatccagattgtagagaggaagaagtccgctgacgtgctagctcttgcagacgaagctggctactacttcttcaacggcaactacaaggtggacagccccaagaacttcaacatcgcaggcacggtggtcaagtacaggcggcccatggatgtctatgagaccggaatcgagtacatcgtggcacaggggcccaccaaccagggcctgaatgtcatggtgtggaaccagaacggcaaaagcccctccatcaccttcgagtacacgctgctgcagccgccacacgagagccgcccccagcccatctactatggcttctccgagagcgctgagagccagggcctggacggggccgggctgatgggcttcgtcccgcacaacggctccctctacggccaggcctcctcagagcggctgggcctggacaaccggctgttcggccacccgggcctggacatggagctgggccccagccagggccaggagaccaacgaggtgtgcgagcaggccggcggcggggcctgcgaggggccccccaggggcaagggcttccgagaccgcaacgtcacggggactcctctcaccggggacaaggatgacgaagaggttgacacccacttcgcctcccaggagttcttctcggctaacgccatctctgaccagctgctgggcgcaggctctgacttgaaggacttcaccctcaatgagactgtgaacagcatctttgcacagggcgccccaaggagctccctggccgagagcttcttcgtggattatgaggagaacgagggggctggcccttacctgctcaacgggtcctacctggagctgagcagcgacagggttgccaacagctcctccgaggccccattccccaacgttagcaccagcctgctcacctcggccgggaacaggactcacaaggccaggaccaggcccaaggcgcgcaagcaaggcgtgagtcccgcggacatgtaccggtggaagctctcgtcccacgagccctgcagtgccacctgcaccacaggggtcatgtctgcgtacgccatgtgtgtccgctatgatggcgtcgaggtggatgacagctactgtgacgccctgacccgtcccgagcctgtccacgagttctgcgctgggagggagtgccagcccaggtgggagacgagcagctggagcgagtgttcgcgcacctgcggagagggctaccagttccgcgtcgtgcgctgctggaagatgctctcgcccggcttcgacagctccgtgtacagcgacctgtgcgaggcagccgaggccgtgcggcccgaggaacgcaagacctgccggaaccccgcctgcgggccccagtgggagatgtcggagtggtccgagtgcactgccaagtgtggggagcgcagtgtggtgaccagggacatccgctgctcggaggatgagaagctgtgtgaccccaacaccaggcctgtaggggagaagaactgcacgggcccgccctgtgaccggcagtggaccgtctccgactggggaccgtgcagtggaagctgcgggcaaggccgcaccatcaggcacgtgtactgcaagaccagcgacggacgggtagtacctgagtcccagtgccagatggagaccaagcctctggccatccacccctgtggggacaaaaactgtcccgcccactggctggcccaggactgggagcggtgcaacaccacctgcgggcgcggggtcaagaagcggctggtgctctgcatggagctggccaacgggaagccgcagacgcgcagtggccccgagtgcgggctcgccaagaagcctcccgaggagagcacgtgtttcgagaggccctgcttcaagtggtacaccagcccctggtcagagtgcaccaagacctgcggggtgggcgtgaggatgcgagacgtcaagtgctaccaggggaccgacatcgtccgtggttgcgatccgttggtgaagcccgttggcagacaggcctgtgatctgcagccctgccccacggagcccccagatgacagctgccaggaccagccaggcaccaactgtgccctggccatcaaagtgaacctctgcgggcactggtactacagcaaggcgtgctgccgctcctgcaggcccccccactcctaggcccggcagctgcagccccttccagatgaagaccaagcgcccctcctggggctgctgcagcttctggggcctccacagacccccctcctgcggggcacgctggcctaagagacgtggcactgagcctcggctgtcgagaggggacttcccacggcccgtggacctttgtgctcctggggcagagcctccggcacccagtggcctcccccagacagagccacccctgccgtgggaacctgtccgtgttcctgcgtggatcctgtgtttgtggctcccactccccagccccccagcagcccccagccgaggggcccagggcccacagccagcggtggaggtgtcttgctccgggcccgtagcccacgccctctctgggtggcagggccttctgaaggaaacttgcaggcgagcccaacgtggtggggggccttcctccctcagaggccatggggtgagaggggctcaggcagccaaggaggcccaggcgtgctccctcttatggagcccctcccatggagctctcttcccgccgcactttctaccccgggcagaggcgcttgcccacgggacgtttggggatggacctcggcccccgcccctgcagtcagcgtcagtgctcatctacgttaataaagtggtcctatttatggcggca

SEQ ID NO: 283995 - DNA, 3725 bp, Artificial Sequence
  derived and/or modified sequence
cgccgtctgccctccgcagcgctcgcccctttctctgggaggacaacctgctgacccgaagccagggtctgccagacaaccacgaccaactagtcccagataaccttgaggcctgggcactggctgggccccgagggctcttcccaaagcgtaccctggtcatctggaagaggatcggagctggcctggtggtgacagtggccttgcttcctaggatggatggcagatggcaatgttcctgctgggcctggttcctgctggttctggcagttgtagctggggacacagtgtcaaccgggtccacggacaacagcccaacatccaatagcctggaggggggcaccgacgccacggccttctggtggggggagtggaccaagtggacggcgtgttcccgcagttgcgggggtggggtgacatcccaggagcggcactgcctgcagcagaggaggaagtccgtcccgggccccgggaacaggacctgcacgggcacgtccaagcggtaccagctctgcagagtgcaggagtgtccgccggacgggaggagcttccgcgaggagcagtgcgtctccttcaactcccacgtgtacaacgggcggacgcaccagtggaagcctctgtacccggatgactatgtccacatctccagcaaaccgtgtgacctgcactgtaccaccgtggacggccagcggcagctcatggtccccgcccgcgacggcacatcctgcaagctcactgacctgcgaggggtttgcgtgtctggaaaatgtgagcccatcggctgtgacggggtgcttttctccacccacacactggacaagtgtggcatctgccagggggacggtagcagctgcacccacgtgacgggcaactatcgcaaggggaatgcccaccttggttactctctggtgacccacatcccggctggtgcccgagacatccagattgtagagaggaagaagtccgctgacgtgctagctcttgcagacgaagctggctactacttcttcaacggcaactacaaggtggacagccccaagaacttcaacatcgcaggcacggtggtcaagtacaggcggcccatggatgtctatgagaccggaatcgagtacatcgtggcacaggggcccaccaaccagggcctgaatgtcatggtgtggaaccagaacggcaaaagcccctccatcaccttcgagtacacgctgctgcagccgccacacgagagccgcccccagcccatctactatggcttctccgagagcgctgagagccagggcctggacggggccgggctgatgggcttcgtcccgcacaacggctccctctacggccaggcctcctcagagcggctgggcctggacaaccggctgttcggccacccgggcctggacatggagctgggccccagccagggccaggagaccaacgaggtgtgcgagcaggccggcggcggggcctgcgaggggccccccaggggcaagggcttccgagaccgcaacgtcacggggactcctctcaccggggacaaggatgacgaagaggttgacacccacttcgcctcccaggagttcttctcggctaacgccatctctgaccagctgctgggcgcaggctctgacttgaaggacttcaccctcaatgagactgtgaacagcatctttgcacagggcgccccaaggagctccctggccgagagcttcttcgtggattatgaggagaacgagggggctggcccttacctgctcaacgggtcctacctggagctgagcagcgacagggttgccaacagctcctccgaggccccattccccaacgttagcaccagcctgctcacctcggccgggaacaggactcacaaggccaggaccaggcccaaggcgcgcaagcaaggcgtgagtcccgcggacatgtaccggtggaagctctcgtcccacgagccctgcagtgccacctgcaccacaggggtcatgtctgcgtacgccatgtgtgtccgctatgatggcgtcgaggtggatgacagctactgtgacgccctgacccgtcccgagcctgtccacgagttctgcgctgggagggagtgccagcccaggtgggagacgagcagctggagcgagtgttcgcgcacctgcggagagggctaccagttccgcgtcgtgcgctgctggaagatgctctcgcccggcttcgacagctccgtgtacagcgacctgtgcgaggcagccgaggccgtgcggcccgaggaacgcaagacctgccggaaccccgcctgcgggccccagtgggagatgtcggagtggtccgagtgcactgccaagtgtggggagcgcagtgtggtgaccagggacatccgctgctcggaggatgagaagctgtgtgaccccaacaccaggcctgtaggggagaagaactgcacgggcccgccctgtgaccggcagtggaccgtctccgactggggaccgtgcagtggaagctgcgggcaaggccgcaccatcaggcacgtgtactgcaagaccagcgacggacgggtagtacctgagtcccagtgccagatggagaccaagcctctggccatccacccctgtggggacaaaaactgtcccgcccactggctggcccaggactgggagcggtgcaacaccacctgcgggcgcggggtcaagaagcggctggtgctctgcatggagctggccaacgggaagccgcagacgcgcagtggccccgagtgcgggctcgccaagaagcctcccgaggagagcacgtgtttcgagaggccctgcttcaagtggtacaccagcccctggtcagagtgcaccaagacctgcggggtgggcgtgaggatgcgagacgtcaagtgctaccaggggaccgacatcgtccgtggttgcgatccgttggtgaagcccgttggcagacaggcctgtgatctgcagccctgccccacggagcccccagatgacagctgccaggaccagccaggcaccaactgtgccctggccatcaaagtgaacctctgcgggcactggtactacagcaaggcgtgctgccgctcctgcaggcccccccactcctaggcccggcagctgcagccccttccagatgaagaccaagcgcccctcctggggctgctgcagcttctggggcctccacagacccccctcctgcggggcacgctggcctaagagacgtggcactgagcctcggctgtcgagaggggacttcccacggcccgtggacctttgtgctcctggggcagagcctccggcacccagtggcctcccccagacagagccacccctgccgtgggaacctgtccgtgttcctgcgtggatcctgtgtttgtggctcccactccccagccccccagcagcccccagccgaggggcccagggcccacagccagcggtggaggtgtcttgctccgggcccgtagcccacgccctctctgggtggcagggccttctgaaggaaacttgcaggcgagcccaacgtggtggggggccttcctccctcagaggccatggggtgagaggggctcaggcagccaaggaggcccaggcgtgctccctcttatggagcccctcccatggagctctcttcccgccgcactttctaccccgggcagaggcgcttgcccacgggacgtttggggatggacctcggcccccgcccctgcagtcagcgtcagtgctcatctacgttaataaagtggtcctatttatggcggc

SEQ ID NO: 283996 - DNA, 4270 bp, Artificial Sequence
  derived and/or modified sequence
acgggacacctcatacatcccagaccccattctcaggagccccagggacagggcccgctctggaggcagaagccggacaggcggggctggggctttgccaccgccagcctccccggtaacctcaggccagcggctgctccgtctggacacccgacatgtggcccccagttctggacccgggaagaaggcctccctgctcgccgctcctgggccgccgccgccggcagcagccaacaggcagctgggccggcctggccgggctccagaggcgcagagcgggttaaagtgtgcgccaggccggccggcgcgggcgggggagcggcctggtgggaagtgtgagtgttcctccccgtctgcctgacagctataaaggcggccgccggcgcagagccgccactgggctgcgcccctcccgggaaccccctctcttggatgctctttgaagtgggagagggaggcggcgcgggggaggaggggaaggggagagggaggccgggccgcagcctctgcactcacgccgcccccgcacgcacagcgcacctggcgccgtctgccctccgcagcgctcgcccctttctctgggaggacaacctgctgacccgaagccagggtctgccagacaaccacgaccaactagtcccagataaccttgaggcctgggcactggctgggccccgagggctcttcccaaagcgtaccctggtcatctggaagaggatcggagctggcctggtggtgacagtggccttgcttcctaggatggatggcagatggcaatgttcctgctgggcctggttcctgctggttctggcagttgtagctggggacacagtgtcaaccgggtccacggacaacagcccaacatccaatagcctggaggggggcaccgacgccacggccttctggtggggggagtggaccaagtggacggcgtgttcccgcagttgcgggggtggggtgacatcccaggagcggcactgcctgcagcagaggaggaagtccgtcccgggccccgggaacaggacctgcacgggcacgtccaagcggtaccagctctgcagagtgcaggagtgtccgccggacgggaggagcttccgcgaggagcagtgcgtctccttcaactcccacgtgtacaacgggcggacgcaccagtggaagcctctgtacccggatgactatgtccacatctccagcaaaccgtgtgacctgcactgtaccaccgtggacggccagcggcagctcatggtccccgcccgcgacggcacatcctgcaagctcactgacctgcgaggggtttgcgtgtctggaaaatgtgagcccatcggctgtgacggggtgcttttctccacccacacactggacaagtgtggcatctgccagggggacggtagcagctgcacccacgtgacgggcaactatcgcaaggggaatgcccaccttggttactctctggtgacccacatcccggctggtgcccgagacatccagattgtagagaggaagaagtccgctgacgtgctagctcttgcagacgaagctggctactacttcttcaacggcaactacaaggtggacagccccaagaacttcaacatcgcaggcacggtggtcaagtacaggcggcccatggatgtctatgagaccggaatcgagtacatcgtggcacaggggcccaccaaccagggcctgaatgtcatggtgtggaaccagaacggcaaaagcccctccatcaccttcgagtacacgctgctgcagccgccacacgagagccgcccccagcccatctactatggcttctccgagagcgctgagagccagggcctggacggggccgggctgatgggcttcgtcccgcacaacggctccctctacggccaggcctcctcagagcggctgggcctggacaaccggctgttcggccacccgggcctggacatggagctgggccccagccagggccaggagaccaacgaggtgtgcgagcaggccggcggcggggcctgcgaggggccccccaggggcaagggcttccgagaccgcaacgtcacggggactcctctcaccggggacaaggatgacgaagaggttgacacccacttcgcctcccaggagttcttctcggctaacgccatctctgaccagctgctgggcgcaggctctgacttgaaggacttcaccctcaatgagactgtgaacagcatctttgcacagggcgccccaaggagctccctggccgagagcttcttcgtggattatgaggagaacgagggggctggcccttacctgctcaacgggtcctacctggagctgagcagcgacagggttgccaacagctcctccgaggccccattccccaacgttagcaccagcctgctcacctcggccgggaacaggactcacaaggccaggaccaggcccaaggcgcgcaagcaaggcgtgagtcccgcggacatgtaccggtggaagctctcgtcccacgagccctgcagtgccacctgcaccacaggggtcatgtctgcgtacgccatgtgtgtccgctatgatggcgtcgaggtggatgacagctactgtgacgccctgacccgtcccgagcctgtccacgagttctgcgctgggagggagtgccagcccaggtgggagacgagcagctggagcgagtgttcgcgcacctgcggagagggctaccagttccgcgtcgtgcgctgctggaagatgctctcgcccggcttcgacagctccgtgtacagcgacctgtgcgaggcagccgaggccgtgcggcccgaggaacgcaagacctgccggaaccccgcctgcgggccccagtgggagatgtcggagtggtccgagtgcactgccaagtgtggggagcgcagtgtggtgaccagggacatccgctgctcggaggatgagaagctgtgtgaccccaacaccaggcctgtaggggagaagaactgcacgggcccgccctgtgaccggcagtggaccgtctccgactggggaccgtgcagtggaagctgcgggcaaggccgcaccatcaggcacgtgtactgcaagaccagcgacggacgggtagtacctgagtcccagtgccagatggagaccaagcctctggccatccacccctgtggggacaaaaactgtcccgcccactggctggcccaggactgggagcggtgcaacaccacctgcgggcgcggggtcaagaagcggctggtgctctgcatggagctggccaacgggaagccgcagacgcgcagtggccccgagtgcgggctcgccaagaagcctcccgaggagagcacgtgtttcgagaggccctgcttcaagtggtacaccagcccctggtcagagtgcaccaagacctgcggggtgggcgtgaggatgcgagacgtcaagtgctaccaggggaccgacatcgtccgtggttgcgatccgttggtgaagcccgttggcagacaggcctgtgatctgcagccctgccccacggagcccccagatgacagctgccaggaccagccaggcaccaactgtgccctggccatcaaagtgaacctctgcgggcactggtactacagcaaggcgtgctgccgctcctgcaggcccccccactcctaggcccggcagctgcagccccttccagatgaagaccaagcgcccctcctggggctgctgcagcttctggggcctccacagacccccctcctgcggggcacgctggcctaagagacgtggcactgagcctcggctgtcgagaggggacttcccacggcccgtggacctttgtgctcctggggcagagcctccggcacccagtggcctcccccagacagagccacccctgccgtgggaacctgtccgtgttcctgcgtggatcctgtgtttgtggctcccactccccagccccccagcagcccccagccgaggggcccagggcccacagccagcggtggaggtgtcttgctccgggcccgtagcccacgccctctctgggtggcagggccttctgaaggaaacttgcaggcgagcccaacgtggtggggggccttcctccctcagaggccatggggtgagaggggctcaggcagccaaggaggcccaggcgtgctccctcttatggagcccctcccatggagctctcttcccgccgcactttctaccccgggcagaggcgcttgcccacgggacgtttggggatggacctcggcccccgcccctgcagtcagcgtcagtgctcatctacgttaataaagtggtcctatttatggcggca

SEQ ID NO: 283997 - DNA, 3183 bp, Artificial Sequence
  derived and/or modified sequence
atgctgtttgaagtcggcgaaggcggcggggcaggcgaagaaggaaagggcaggggtcgcccaggacgctcactttgcacccacgccgcccccgcgcgcactgcacacctggcgccatcggcactgcggagcgcgcggcccttcctgtgggaggataacctcctgacccgttcccagggactgcctgacaatcatgatcaacttgtacctgataacctggaggcctgggcacttgctggccctcgggggttgtttcccaaaagaacacttgtgatctggaagcgtataggggccggcctagttgttactgtggcgctacttccaagaatggacggccggtggcaatgtagttgttgggcatggtttttactggttcttgccgtcgtcgctggagacaccgtgtcaacaggctctaccgacaatagtccaaccagtaactcgctggagggcggtacagacgctactgccttttggtggggggagtggacaaaatggactgcctgttctcgttcctgtggtggaggggtcacctcccaggagcggcattgtctgcagcagcggaggaagagcgtgccgggaccagggaataggacttgcaccggcaccagcaagagataccagttgtgcagagtgcaggagtgccctcccgatgggaggtcgttccgcgaggagcagtgcgttagtttcaacagccatgtgtacaacgggaggacacaccaatggaagccactctaccccgatgattatgttcatatatcatccaagccttgcgatctgcactgcactacagtggatggacagcgtcagctgatggtgccggctagagacggtacctcctgtaagctgacagacctgcgaggggtgtgtgtgtccggcaagtgtgaacccataggatgcgatggcgtcctgttttccactcataccttagataagtgcggcatctgccagggtgatggtagttcctgcacccacgtgaccgggaattaccggaagggtaatgcacacctggggtattccctggtgacgcatatacccgcgggagctcgggacatccaaattgtcgaaaggaaaaagagcgcggacgtcctcgctctggccgatgaagctggttactacttctttaatggaaattataaggtggattcccccaagaactttaatatcgcgggtacagttgtcaagtatcggcggcccatggatgtttacgagaccggtattgagtatatcgttgcgcaaggcccaactaatcagggcctgaacgttatggtctggaaccagaacggcaaaagcccctctatcactttcgagtacaccctgttgcaaccaccgcacgaatctagaccacagccaatctattatggcttcagcgaatctgccgagagtcaggggcttgacggtgctgggctgatgggctttgtacctcacaatggctccctctatggacaagcaagctctgagagactgggcctagacaaccgcctatttggtcaccctggcttggacatggagcttggaccctcccaaggccaggagacaaatgaggtttgtgaacaagcaggtggcggcgcttgtgaagggcccccccgtgggaaggggttccgtgaccggaacgttaccggaacgccactgacaggggataaagacgatgaggaggtggacacccacttcgcctcccaggagtttttctccgctaatgccatcagcgaccagctgcttggtgctggctccgatttaaaggatttcaccctgaacgaaaccgtgaatagtatctttgcacagggcgcgcctcgctcctctttggctgagagcttcttcgtcgattatgaagagaacgaaggcgccgggccctatttgctaaacggaagttatctggagctcagcagtgaccgcgtggcaaactcttcctcagaagcaccattccctaatgtgagcacgagcttgctcacatcagccggaaatcggacccacaaggctcgtacaaggcctaaagctcgcaagcagggagtgtcaccagcagatatgtaccgatggaagctctccagtcatgaaccatgctctgcaacttgcacgacaggcgtgatgagcgcctatgctatgtgcgtccggtacgatggagttgaggttgatgacagctattgtgacgctctgactaggcccgagcctgtgcatgaattctgcgcaggcagggaatgtcagccacgctgggaaacttctagctggagtgaatgctcgaggacatgcggtgaaggataccagttcagggtggtgcgttgctggaaaatgttgtcaccaggtttcgacagcagtgtgtacagcgatctttgtgaggcggcggaggcggtgaggcccgaggaacgcaagacatgcaggaaccccgcctgtgggccccagtgggaaatgtctgagtggtccgaatgcaccgccaagtgtggggagcggagcgtggttaccagagacattcgctgtagtgaggacgagaagctgtgcgacccaaacacccggcctgtaggcgagaaaaattgcaccgggccgccctgcgacaggcagtggacggtcagcgactggggaccctgtagcgggtcatgtggacagggccggactattcgccatgtgtactgcaagacctctgatggacgtgttgtccccgagtcccagtgtcagatggaaactaagcctctggccattcatccttgcggcgacaagaattgccccgcccattggctggctcaggattgggaacgttgcaacactacttgcggccgtggtgttaaaaaaagattggtgctctgcatggagctcgcgaacgggaagccacaaacacgctcagggcccgagtgcggcttggccaagaagccacccgaagaatccacctgctttgaacggccctgctttaaatggtatacatccccttggagcgagtgtactaaaacctgcggcgtcggcgtcaggatgagagatgttaaatgctaccaagggacagacatcgtgagggggtgcgaccctttagtcaagccggtaggcaggcaggcctgtgatctgcagccctgtcccacagaaccacccgacgattcatgtcaggaccagccaggcacgaactgcgcccttgccatcaaagtgaacctatgtggacactggtattattccaaagcttgctgtcgaagttgccggccaccacacagctag

SEQ ID NO: 283998 - DNA, 3183 bp, Artificial Sequence
  derived and/or modified sequence
atgctgtttgaggtgggggagggcggcggggccggggaggagggcaagggccggggccggcccggccgcagcctgtgcacccatgctgccccagccaggacagcccacctggcccccagcgccctgcggagcgcccggcccttcctgtgggaggacaacctgctgaccaggagccagggcctgcctgacaaccacgaccagctggtgcctgacaacctggaggcctgggccctggccggcccccggggcctcttccccaagaggaccctggtgatctggaagagaattggagctggcctggtggtgacagtggccctgctgcccaggatggatggccgctggcagtgcagctgctgggcctggttcctgctggtgctggccgtggtggccggggacacagtgtccacaggcagcacagacaacagccccaccagcaacagcctggagggcggcacagatgccacagccttctggtggggcgagtggaccaagtggacagcctgcagccgcagctgtggcggcggcgtgaccagccaggagcggcactgcctgcagcagaggaggaagtctgtgcccggccctggcaacagaacctgcaccggcaccagcaagcgctaccagctgtgccgggtgcaggagtgccccccagatggccgctccttccgggaggagcagtgtgtgtccttcaacagccacgtgtacaatggaagaacccaccagtggaagcccctgtacccagatgattatgtgcacatcagcagcaagccctgtgacctgcactgcaccaccgtggatggccagaggcagctgatggtgcctgccagagatggcaccagctgcaagctgacagacctgcggggcgtgtgtgtgtctggaaaatgtgagcccatcggctgtgatggagtgctcttcagcacccacaccctggacaagtgtggcatctgccagggagatggcagcagctgcacccacgtgacaggcaactacagaaaaggaaatgcccacctgggctacagcctggtgacccacatcccagctggggcccgggacatccagatcgtggagaggaagaagtctgcagatgtgctggccctggctgatgaagctggctactacttcttcaatggaaactacaaggtggacagccccaagaacttcaacattgctggcaccgtggtgaagtaccgccggcccatggatgtgtatgagaccggcatcgagtacatcgtggcccagggccccaccaaccagggcctgaatgtgatggtgtggaaccagaatggcaagagccccagcatcacctttgagtacaccctgctgcagccccctcatgagagccggccccagcccatctactacggcttcagcgagagcgctgagagccagggcctggatggagctggcctgatgggctttgtgccccacaacggcagcctgtatggccaggccagcagcgagcggctgggcctggacaaccggctgtttggccaccctggcctggacatggagctgggccccagccagggccaggagaccaatgaggtgtgtgagcaggccggcggcggggcctgtgagggccccccccggggcaagggcttccgggacagaaatgtgacaggcacccccctgaccggggacaaggatgatgaggaggtggacacccactttgccagccaggagttcttcagcgccaatgccatcagtgaccagctgctgggcgccggcagtgacctgaaggacttcaccctgaatgagaccgtgaacagcatctttgcccagggcgcccccaggagcagcctggccgagagcttctttgtggactatgaggagaatgaaggagctggcccctacctgctgaatggcagctacctggagctgagcagtgacagagtggccaacagcagcagcgaggcccccttccccaacgtgtccaccagcctgctgaccagcgctggcaacagaacccacaaggcccggacccggcccaaggccaggaagcagggcgtgtccccagctgacatgtaccgctggaagctgagcagccatgagccctgcagcgccacctgcaccactggagtgatgtctgcctatgccatgtgtgtgcgctatgatggagtggaggtggatgacagctactgtgatgccctgaccaggcctgagcctgtgcatgagttctgtgccggccgggagtgccagccccgctgggagaccagctcctggagcgagtgcagcaggacctgtggggagggctaccagttccgggtggtgcgctgctggaagatgctgagccctggctttgacagctctgtgtacagcgacctgtgtgaggccgctgaggccgtgcggcctgaggagaggaagacctgcaggaacccagcctgtggcccccagtgggagatgtctgagtggagcgaatgtacagccaagtgtggggagaggtctgtggtgacccgggacatccgctgcagtgaagatgagaagctgtgtgaccccaacaccaggcctgtgggggagaagaactgcaccggccccccctgtgaccggcagtggacagtgtctgactggggcccctgcagcggcagctgtggccagggccgcaccatccgccacgtgtactgcaagaccagtgatggccgggtggtgcctgagagccagtgccagatggagaccaagcccctggccatccacccctgtggggacaagaactgcccagcccactggctggcccaggactgggagcgctgcaacaccacctgtggccggggcgtgaagaagaggctggtgctgtgcatggagctggccaacgggaagccccagaccaggagcggcccagaatgtggcctggccaagaagcccccagaggagagcacctgctttgagcggccctgcttcaagtggtacaccagcccctggagcgaatgtaccaagacctgtggggtgggcgtgaggatgagagatgtgaagtgctaccagggcacagacatcgtgcggggctgtgaccccctggtgaagcctgtgggccggcaggcctgtgacctgcagccctgccccacagagcccccagatgacagctgccaggaccagcccggcaccaactgtgccctggccatcaaggtgaacctgtgtggccactggtactacagcaaggcctgctgccgcagctgcaggcctccccacagctag

SEQ ID NO: 283999 - DNA, 3183 bp, Artificial Sequence
  derived and/or modified sequence
atgctgttcgaggtgggcgagggcggcggcgccggcgaggagggcaagggacggggcaggcccggcaggtctttgtgtacacatgccgccccagctcggacagctcacctggctccatccgctctaaggtctgcgagacctttcctttgggaggataatctcctgacccgtagtcagggcttaccggacaaccatgatcaactggtgccagacaatctggaagcatgggccctcgcaggccctagaggccttttccccaaacgcaccctggtgatttggaaaagaatcggggccggactcgtcgttaccgtagcattgctccctagaatggacggcagatggcagtgttcctgttgggcatggtttctcctggtgctggcggtggtggcaggcgatacagtcagtactgggagcactgacaacagtcccacctccaactcactcgagggcgggaccgatgctacagccttttggtggggggagtggactaagtggactgcatgctcacgcagttgtgggggcggcgtgacaagccaagaaaggcactgtcttcagcaacgtcgaaagtccgtacccggccctggaaataggacttgtacagggacatctaagcggtaccaactgtgcagggtgcaggaatgccctccagacggaaggagctttcgagaagagcagtgtgtttctttcaattcccatgtgtataatgggagaacacaccagtggaagccactgtatcccgatgactatgttcacatttccagcaagccctgcgatctgcactgtacaaccgtcgatggccagcggcagctgatggtcccggcaagggatggcacttcatgcaaacttaccgatctgcggggagtgtgcgtgtctgggaagtgcgagcctatcggctgcgacggggtgctcttctccacacataccctggacaagtgcggtatatgccagggggacggttcctcctgtacacacgtcaccggaaattacagaaagggcaatgctcatctgggctattctttggtgactcacatcccagctggggcccgcgatattcagattgtggaaagaaagaaaagcgccgatgttctggccctagctgacgaggccggctattacttttttaacgggaattacaaggtggactcacccaagaattttaacatagcagggaccgtggttaagtacagacgtcctatggatgtctacgagactggcattgaatatattgtggctcagggcccaaccaatcaagggctcaacgtgatggtctggaatcagaacggcaaaagtccatcaataacattcgaatacacacttctccagccccctcacgagagccgcccacagcccatctactacggcttttcggagtcagctgagtcacaggggctggacggcgcagggcttatgggctttgtgcctcacaacggtagcctgtatggccaggcctcatctgaacgactggggcttgataaccggctgtttggccaccccggcctcgatatggagctaggtcccagtcagggacaggagaccaacgaggtctgcgaacaggcaggaggcggagcatgcgaaggaccgccgagagggaagggcttcagggataggaatgtgactggaaccccactcacgggcgataaggacgacgaagaggtcgatacccacttcgcgtcacaagagttcttctcagctaacgccattagcgaccaactgttgggagcgggctccgaccttaaggatttcacacttaatgagacagttaattcgatctttgctcaaggcgccccaaggagcagcctggccgaatctttcttcgtggattatgaagaaaacgagggagccggcccctaccttctaaatggttcatatctcgagttatcgtctgatcgagtagccaactcttccagtgaggctccttttcccaatgtgagcactagcctgctgacatcagccggtaatcggacacacaaggcacgcacgcgtcctaaagccaggaagcagggagtctctcccgctgatatgtataggtggaagctgtcatctcacgagccatgcagtgctacatgtaccactggcgttatgtctgcctacgccatgtgtgtgcggtacgacggcgttgaggtggatgatagctattgtgacgcactaacaaggcccgaacccgtgcacgagttttgcgccggacgcgagtgtcaacccagatgggaaacctcctcctggagcgagtgttctcgtacttgtggtgagggctaccagttcagagtagtcaggtgctggaaaatgttgtcccccggcttcgactctagcgtctattccgatctctgtgaggccgcagaagcagtacgtcctgaagagcgtaaaacctgtcgtaaccctgcatgtgggccccaatgggagatgtccgagtggtccgagtgtaccgccaaatgtggcgaacggtccgtggttactcgcgacattcgttgcagtgaagacgaaaagctttgcgacccaaacacgcggcccgtgggagagaagaactgtactggacccccatgcgatagacagtggacggtttccgactggggcccatgcagtggtagttgcggccaagggaggacaataaggcatgtctattgcaaaacaagtgacggccgtgttgttccagaaagccagtgccagatggagaccaagccactggccatccacccctgtggagacaagaattgtccagctcattggttggcccaggactgggaacgttgtaacacgacctgcggccgcggtgtgaagaagcgcctggtcttgtgcatggagctggctaacggcaagccacagacaaggtcagggccagaatgtggactggcgaaaaagcccccagaagaatctacatgctttgaaagaccttgtttcaagtggtacactagtccctggagcgaatgcaccaaaacgtgtggcgtaggtgtgagaatgcgcgatgtaaagtgctatcaaggcacggatatcgtcaggggctgcgaccccctggtgaagcccgttggccggcaggcttgtgacctgcagccctgtccaactgagccccccgacgacagctgccaggaccagcccggtacaaactgcgccttagcaattaaagtcaacctgtgtggtcactggtattactctaaggcgtgttgtagaagctgtcggccgcctcacagttag

SEQ ID NO: 284000 - DNA, 3183 bp, Artificial Sequence
  derived and/or modified sequence
atgctgtttgaggtgggagaaggcggaggggctggggaggaggggaagggcagaggccgacccggtcgatcgctatgtacacacgcagccccagctagaacagctcacttggccccaagtgctctgcgaagcgccaggcctttcctgtgggaagataacctgttgaccagatcacagggcttaccagacaatcacgaccaacttgtgcccgacaatctcgaagcttgggcattggcagggcctcgtggattgtttcccaagcgaacattagttatatggaagcgtatcggcgcaggactcgttgtgacagtagccctgctgcctaggatggatggcaggtggcagtgtagctgctgggcatggtttttgcttgtgctggctgtcgttgctggtgatacggtgtccacgggcagtaccgacaattcccctaccagtaattccctggaaggcggaactgatgcaactgccttctggtggggggagtggactaagtggaccgcatgttcaagatcctgtggcggaggcgtgacctcacaggagcggcactgtctgcaacaaaggcgaaagtccgtaccagggcctggaaaccgtacctgcaccggaacaagtaagagatatcagctatgtagggtccaggaatgccctcctgacggtcggtcttttcgcgaagaacagtgcgtatcatttaattcccacgtgtataatgggaggacccaccagtggaagcctttatatcctgatgactacgtgcatatttcttcgaagccttgcgacctccattgtaccacagtggacggccagcgtcagttgatggttcccgctagagacggcacctcctgcaaattgacagacttacgtggtgtctgcgttagcggaaagtgcgagcccattggttgcgacggcgttttgttttccacgcacaccctggataaatgcggaatctgccagggtgacggctctagctgcacccacgtgactggaaactatagaaaaggcaacgctcatctggggtacagcctggtaacacatattcccgctggagctcgcgacatccaaatagtcgagcgaaaaaagtctgcagacgtgctggcccttgcagatgaggccggatactattttttcaacgggaactacaaggttgactctcctaagaacttcaacattgctgggaccgtggttaaatacagaaggccgatggacgtgtatgagactgggatcgagtatatcgtcgctcaggggccaaccaaccaagggctcaatgtgatggtgtggaatcaaaatgggaagtccccctcaattacattcgagtataccctcctgcagccaccccacgaaagccgcccacagccgatctactacggctttagcgaatccgctgagagtcagggactcgacggcgcaggattaatgggtttcgtgcctcacaacggatctctctatgggcaggcttcaagtgaaaggctgggtctggataatcggttatttgggcacccaggtctggacatggagttgggtccatcgcagggtcaggagaccaacgaagtatgcgagcaggccggtggcggagcctgcgaaggccctcccaggggaaaagggttcagggacaggaacgtcaccggcacacccctgacaggcgataaagacgatgaagaagtcgatacccactttgccagccaggagtttttttcagccaatgctatcagtgaccagcttcttggggctgggtcagatctgaaggactttacgcttaatgagacagtcaattctatttttgctcagggggcacccagatcatccctggccgagagctttttcgtcgattatgaagaaaacgaaggggctggtccatacctgctgaatggcagttacctggaattgagcagcgaccgtgtcgctaattcttcaagtgaggcacccttccccaatgtgtctacctctctcctgacctcagccggaaaccggacacacaaggcacggacaagaccaaaagcccgaaagcaaggcgtgtccccggctgatatgtaccgatggaagctgagctcacatgagccttgttcagctacatgtaccacaggtgtaatgtctgcatatgctatgtgtgtgaggtacgacggtgtggaagtggatgacagttactgtgatgccctcactcggccagagcccgtccacgaattctgcgcgggacgtgaatgccagccgagatgggaaacctcctcatggtctgagtgcagccgcacttgcggcgaaggataccagttcagagtcgtgcgctgctggaaaatgttgagccctggcttcgactcatccgtttactcagatctctgtgaggcagccgaggctgtgcgtccagaggaaagaaagacctgccgaaaccctgcctgcggccctcagtgggagatgtccgaatggagcgagtgtacagccaagtgtggagaacgtagtgttgttacccgcgacattcgttgtagtgaggacgaaaagttgtgtgaccctaatacccgccctgttggggaaaaaaattgtactggacccccttgtgataggcaatggaccgtatcagattggggtccctgcagcggctcttgtgggcaggggcgtaccatccgtcacgtgtactgcaaaacatctgatggtcgggtggtcccggagtcccagtgtcagatggaaactaagccgctggcgattcatccctgcggcgacaagaactgccccgctcactggctcgcccaggattgggaacgctgtaacacaacatgtggcaggggcgtgaagaaacgcctggtgctctgcatggagctagctaatgggaagccccagactcgctctggccctgaatgtggtctcgctaagaaaccgcctgaagagagtacttgtttcgagcggccatgcttcaagtggtacaccagtccctggtcagagtgcactaagacttgtggcgttggcgtgcgtatgcgggacgtcaaatgttatcagggtaccgacattgttcggggttgcgacccactagtaaagccagtgggacgccaggcatgtgacctccaaccctgccccaccgaaccgcctgatgattcctgtcaggatcagcccggtaccaactgcgcattggcaatcaaagtgaacctgtgcggtcactggtactatagcaaggcatgttgcagatcatgtcgtcccccacattcatag

SEQ ID NO: 284001 - DNA, 3183 bp, Artificial Sequence
  derived and/or modified sequence
atgctgttcgaggtgggcgagggcggcggcgccggcgaggagggcaagggcagaggcagacccggcagaagcctgtgcacccacgccgcccccgccagaaccgcccacctggcccccagcgccctgagaagcgccagacccttcctgtgggaggacaacctgctgaccagaagccagggcctgcccgacaaccacgaccagctggtgcccgacaacctggaggcctgggccctggccggccccagaggcctgttccccaagagaaccctggtgatctggaagagaatcggcgccggcctggtggtgaccgtggccctgctgcccagaatggacggcagatggcagtgcagctgctgggcctggttcctgctggtgctggccgtggtggccggcgacaccgtgagcaccggcagcaccgacaacagccccaccagcaacagcctggagggcggcaccgacgccaccgccttctggtggggcgagtggaccaagtggaccgcctgcagcagaagctgcggcggcggcgtgaccagccaggagagacactgcctgcagcagagaagaaagagcgtgcccggccccggcaacagaacctgcaccggcaccagcaagagataccagctgtgcagagtgcaggagtgcccccccgacggcagaagcttcagagaggagcagtgcgtgagcttcaacagccacgtgtacaacggcagaacccaccagtggaagcccctgtaccccgacgactacgtgcacatcagcagcaagccctgcgacctgcactgcaccaccgtggacggccagagacagctgatggtgcccgccagagacggcaccagctgcaagctgaccgacctgagaggcgtgtgcgtgagcggcaagtgcgagcccatcggctgcgacggcgtgctgttcagcacccacaccctggacaagtgcggcatctgccagggcgacggcagcagctgcacccacgtgaccggcaactacagaaagggcaacgcccacctgggctacagcctggtgacccacatccccgccggcgccagagacatccagatcgtggagagaaagaagagcgccgacgtgctggccctggccgacgaggccggctactacttcttcaacggcaactacaaggtggacagccccaagaacttcaacatcgccggcaccgtggtgaagtacagaagacccatggacgtgtacgagaccggcatcgagtacatcgtggcccagggccccaccaaccagggcctgaacgtgatggtgtggaaccagaacggcaagagccccagcatcaccttcgagtacaccctgctgcagcccccccacgagagcagaccccagcccatctactacggcttcagcgagagcgccgagagccagggcctggacggcgccggcctgatgggcttcgtgccccacaacggcagcctgtacggccaggccagcagcgagagactgggcctggacaacagactgttcggccaccccggcctggacatggagctgggccccagccagggccaggagaccaacgaggtgtgcgagcaggccggcggcggcgcctgcgagggcccccccagaggcaagggcttcagagacagaaacgtgaccggcacccccctgaccggcgacaaggacgacgaggaggtggacacccacttcgccagccaggagttcttcagcgccaacgccatcagcgaccagctgctgggcgccggcagcgacctgaaggacttcaccctgaacgagaccgtgaacagcatcttcgcccagggcgcccccagaagcagcctggccgagagcttcttcgtggactacgaggagaacgagggcgccggcccctacctgctgaacggcagctacctggagctgagcagcgacagagtggccaacagcagcagcgaggcccccttccccaacgtgagcaccagcctgctgaccagcgccggcaacagaacccacaaggccagaaccagacccaaggccagaaagcagggcgtgagccccgccgacatgtacagatggaagctgagcagccacgagccctgcagcgccacctgcaccaccggcgtgatgagcgcctacgccatgtgcgtgagatacgacggcgtggaggtggacgacagctactgcgacgccctgaccagacccgagcccgtgcacgagttctgcgccggcagagagtgccagcccagatgggagaccagcagctggagcgagtgcagcagaacctgcggcgagggctaccagttcagagtggtgagatgctggaagatgctgagccccggcttcgacagcagcgtgtacagcgacctgtgcgaggccgccgaggccgtgagacccgaggagagaaagacctgcagaaaccccgcctgcggcccccagtgggagatgagcgagtggagcgagtgcaccgccaagtgcggcgagagaagcgtggtgaccagagacatcagatgcagcgaggacgagaagctgtgcgaccccaacaccagacccgtgggcgagaagaactgcaccggccccccctgcgacagacagtggaccgtgagcgactggggcccctgcagcggcagctgcggccagggcagaaccatcagacacgtgtactgcaagaccagcgacggcagagtggtgcccgagagccagtgccagatggagaccaagcccctggccatccacccctgcggcgacaagaactgccccgcccactggctggcccaggactgggagagatgcaacaccacctgcggcagaggcgtgaagaagagactggtgctgtgcatggagctggccaacggcaagccccagaccagaagcggccccgagtgcggcctggccaagaagccccccgaggagagcacctgcttcgagagaccctgcttcaagtggtacaccagcccctggagcgagtgcaccaagacctgcggcgtgggcgtgagaatgagagacgtgaagtgctaccagggcaccgacatcgtgagaggctgcgaccccctggtgaagcccgtgggcagacaggcctgcgacctgcagccctgccccaccgagccccccgacgacagctgccaggaccagcccggcaccaactgcgccctggccatcaaggtgaacctgtgcggccactggtactacagcaaggcctgctgcagaagctgcagacccccccacagctag

SEQ ID NO: 284002 - protein, 387 aa, Artificial Sequence
  derived and/or modified sequence
MYRWKLSSHEPCSATCTTGVMSAYAMCVRYDGVEVDDSYCDALTRPEPVHEFCAGRECQPRWETSSWSECSRTCGEGYQFRVVRCWKMLSPGFDSSVYSDLCEAAEAVRPEERKTCRNPACGPQWEMSEWSECTAKCGERSVVTRDIRCSEDEKLCDPNTRPVGEKNCTGPPCDRQWTVSDWGPCSGSCGQGRTIRHVYCKTSDGRVVPESQCQMETKPLAIHPCGDKNCPAHWLAQDWERCNTTCGRGVKKRLVLCMELANGKPQTRSGPECGLAKKPPEESTCFERPCFKWYTSPWSECTKTCGVGVRMRDVKCYQGTDIVRGCDPLVKPVGRQACDLQPCPTEPPDDSCQDQPGTNCALAIKVNLCGHWYYSKACCRSCRPPHS

SEQ ID NO: 284003 - DNA, 2629 bp, Artificial Sequence
  derived and/or modified sequence
attgcttagaggcggctacctggagccggaagcgcggctgcagcagggcgaggctccaggtggggtcggttccgcatccagcctagcgtgtccacgatgcggctgggctccgggactttcgctacctgttgcgtagcgatcgaggtgctagggatcgcggtcttccttcggggattcttcccggctcccgttcgttcctctgccagagcggaacacggagcggagcccccagcgcccgaaccctcggctggtacggacccctccccggcgtctccgctcccctgaccccacatcccctagaagaccttttttctgagcctcgctgctcggatttcttctcggcgctccccggtggtctcttccattatggtccccacctcagaaattttttttaaccgctccagcgtctcttttctgtattcttacaactttgtggcaaccacctctactggccccacttcgaccttccttcctgatcaccacaaagagccagttctaactggaccacgctgccaccacctctcttcagtaaagttgttattgttctgatagatgccttgagagatgattttgtgtttgggtcaaagggtgtgaaatttatgccctacacaacttaccttgtggaaaaaggagcatctcacagttttgtggctgaagcaaagccacctacagttactatgcctcgaatcaaggcattgatgacggggagccttcctggctttgtcgacgtcatcaggaacctcaattctcctgcactgctggaagacagtgtgataagacaagcaaaagcagctggaaaaagaatagtcttttatggagatgaaacctgggttaaattattcccaaagcattttgtggaatatgatggaacaacctcatttttcgtgtcagattacacagaggtggataataatgtcacgaggcatttggataaagtattaaaaagaggagattgggacatattaatcctccactacctggggctggaccacattggccacatttcagggcccaacagccccctgattgggcagaagctgagcgagatggacagcgtgctgatgaagatccacacctcactgcagtcgaaggagagagagacgcctttacccaatttgctggttctttgtggtgaccatggcatgtctgaaacaggaagtcacggggcctcctccaccgaggaggtgaatacacctctgattttaatcagttctgcgtttgaaaggaaacccggtgatatccgacatccaaagcacgtccaacagacggatgtggctgcgacactggcgatagcacttggcttaccgattccaaaagacagtgtagggagcctcctattcccagttgtggaaggaagaccaatgagagagcagttgagatttttacatttgaatacagtgcagcttagtaaactgttgcaagagaatgtgccgtcatatgaaaaaggttctcaccctgctcctgctcagcgtcccacaggcactgcgcagaaaggctgagctggaagtcccactgtcatctcctgggttttctctgctcttttatttggtgatcctggttctttcggccgttcacgtcattgtgtgcacctcagctgaaagttcgtgctacttctgtggcctctcgtggctggcggcaggtggggtgatggtgctggcctcggcgctgctgtgtgtgattgtgtctgttctgaccaacgtgctcgtgggtggaaacaccccaaggaaggtacgtacggctggttcctgggagtgtgacgtagtccttctgctcaggttgttcttgttatttcaggctgcctttcgtttaccagactctggttgaacacctggtgtgtgccacgtgctggcagtgccctggacagggggcctcagggaaggacgtggagcagccttatcccaggcctctgggtgtcccgacacaggtgttcacatctgtgctgtcaggtcagatgcctcagttcttggaaagctaggttcctgcgactgttaccaaggtgattgtaaagagctggcggtcacagaggaacaagcccccccgctgagggggtgtgtgaatcggacagcctcccagcagaggtgtgggagctgcagctgagggaagaagagacaatcggcctggacactcaggagggtcaaaaggagacttggtcgcaccactcatcctgccacccccagaatgcatcctgcctcatcaggtccagatttctttccaaggcggacgttttctgttggaattcttagtccttggcctcggacaccttcattcgttagctggggagtggtggtgaggcagtgaggaagaggcggatggtcacactcagatccacagagcccaggatcaagggacccactgcagtggcagcaggactgttgggcccccaccccaaccctgcgcagccctcatcccctcttggcttgagccgtcagaggccctgtgctgagtgtctgaccgagacactcacagctttgtcatcagggcacaggcttcctcggagccaggatgatctgtgccacgcttgcacctcgggcccatctgggctcatgctctctctcctgctattgaattagtacctagctgcacgcagtatgtagttaccaaaagaataaacggcaataattgagtcctc

SEQ ID NO: 284004 - protein, 265 aa, Artificial Sequence
  derived and/or modified sequence
MTFLIVTVAWAAHTRLFQVVGKTDDTLALLNLACMMTITFLPYTFSLMVTFPDVPLGIFLFCVCVIAIGVVQALIVGYAFHFPHLLSPQIQRSAHRALYRRHVLGIVLQGPALCFAAAIFSLFFVPLSYLLMVTVILLPYVSKVTGWCRDRLLGHREPSAHPVEVFSFDLHEPLSKERVEAFSDGVYAIVATLLILDICAPHRFAAPPAPFGWLLLPSSVCSSAASSASSSVRARVSSQSSRFWFLWGFFFFFLRQSCCVAQAGV

SEQ ID NO: 284005 - protein, 134 aa, Artificial Sequence
  derived and/or modified sequence
MSQPRTPEQALDTPGDCPPGRRDEDAGEGIQCSQRMLSFSDALLSIIATVMILPVTHTEISPEQQFDRSVQRLLATRIAVYLMTFLIVTVAWAAHTRLFQVVGKTDDTLALLNLACMMTITFLPYTFSLMVTFP

SEQ ID NO: 284006 - DNA, 798 bp, Artificial Sequence
  derived and/or modified sequence
atgaccttcctgatcgtgaccgtggcctgggccgcccacaccagactgttccaggtggtgggcaagaccgacgacaccctggccctgctgaacctggcctgcatgatgaccatcaccttcctgccctacaccttcagcctgatggtgaccttccccgacgtgcccctgggcatcttcctgttctgcgtgtgcgtgatcgccatcggcgtggtgcaggccctgatcgtgggctacgccttccacttcccccacctgctgagcccccagatccagagaagcgcccacagagccctgtacagaagacacgtgctgggcatcgtgctgcagggccccgccctgtgcttcgccgccgccatcttcagcctgttcttcgtgcccctgagctacctgctgatggtgaccgtgatcctgctgccctacgtgagcaaggtgaccggctggtgcagagacagactgctgggccacagagagcccagcgcccaccccgtggaggtgttcagcttcgacctgcacgagcccctgagcaaggagagagtggaggccttcagcgacggcgtgtacgccatcgtggccaccctgctgatcctggacatctgcgccccccacagattcgccgccccccccgcccccttcggctggctgctgctgcccagcagcgtgtgcagcagcgccgccagcagcgccagcagcagcgtgagagccagagtgagcagccagagcagcagattctggttcctgtggggcttcttcttcttcttcctgagacagagctgctgcgtggcccaggccggcgtgtag

SEQ ID NO: 284007 - DNA, 405 bp, Artificial Sequence
  derived and/or modified sequence
atgagccagcccagaacccccgagcaggccctggacacccccggcgactgcccccccggcagaagagacgaggacgccggcgagggcatccagtgcagccagagaatgctgagcttcagcgacgccctgctgagcatcatcgccaccgtgatgatcctgcccgtgacccacaccgagatcagccccgagcagcagttcgacagaagcgtgcagagactgctggccaccagaatcgccgtgtacctgatgaccttcctgatcgtgaccgtggcctgggccgcccacaccagactgttccaggtggtgggcaagaccgacgacaccctggccctgctgaacctggcctgcatgatgaccatcaccttcctgccctacaccttcagcctgatggtgaccttcccctag

SEQ ID NO: 284008 - DNA, 798 bp, Artificial Sequence
  derived and/or modified sequence
atgacattcctcatcgtgaccgtggcatgggctgcgcacacacggctgtttcaggttgttgggaagacagatgacaccctagccctcctcaatctggcgtgcatgatgacaataactttcctcccatatacctttagcttgatggtcacattccccgacgtgccactgggcatcttccttttctgcgtgtgtgtaattgccatcggagtggtgcaggcccttatagtggggtacgcctttcactttccccatctgctttccccccagatccaaaggagtgctcacagggcgctgtaccggcggcatgtgctgggaattgtcctgcagggaccagccctttgtttcgctgctgcaatcttcagcctcttctttgtgcctttgagctaccttctgatggtcaccgtgattctgctgccctatgtgagcaaggtgaccggctggtgcagggatagactgctgggacatcgggagcccagcgcccacccggtggaggtgttctctttcgaccttcatgaacccctttcaaaggagcgggtagaggctttcagtgatggcgtgtatgcgatcgtggctacactgctgatcctggacatctgcgctcctcacagatttgccgccccccctgctccgttcggatggcttctgcttccatcaagcgtttgctcctcggccgctagctccgcttcttcctccgtacgtgcacgtgtgtcctcacagtctagccggttctggttcctatggggttttttcttcttcttcctgaggcagagttgttgcgtagcccaggccggggtctag

SEQ ID NO: 284009 - DNA, 405 bp, Artificial Sequence
  derived and/or modified sequence
atgagccaacctagaacaccagagcaggcactagatacccccggggactgcccccccgggcggagagacgaggacgccggggagggtattcaatgttcccagcggatgctgtctttcagtgatgcactcctctctatcatcgccactgtaatgattctgccggtgacacacactgagatatcacccgaacagcaatttgatcgcagtgtccagcgccttctggccacgcgaatcgccgtttaccttatgaccttcctgattgtgaccgttgcctgggctgcacacaccaggctcttccaggttgtgggcaaaaccgacgatactctcgcactcctcaacctggcttgtatgatgactatcactttcctcccctacacattttccctgatggtgacatttccctag

SEQ ID NO: 284010 - DNA, 798 bp, Artificial Sequence
  derived and/or modified sequence
atgaccttcctgattgtgacagtggcctgggccgcccacaccaggctcttccaggtggtgggcaagacagatgacaccctggccctgctgaacctggcctgcatgatgaccatcaccttcctgccctacaccttcagcctgatggtgaccttcccagatgtgcccctgggcatcttcctgttctgtgtgtgtgtgattgccatcggcgtggtgcaggccctgattgtgggctacgccttccacttcccccacctgctgagcccccagatccagaggtctgcccaccgggccctgtaccgccgccacgtgctgggcatcgtgctgcagggccctgccctgtgctttgctgctgccatcttcagcctcttctttgtgcccctgagctacctgctgatggtgaccgtcatcctgctgccctacgtgtccaaggtgacaggctggtgccgggaccggctgctgggccaccgggagcccagcgcccaccctgtggaggtgttctcctttgacctgcacgagcccctgagcaaggagcgggtggaggccttcagtgatggagtgtatgccatcgtggccaccctgctgatcctggacatctgtgccccccacagatttgctgcccccccagcccccttcggctggctgctgctgcccagctctgtgtgcagcagcgctgccagcagcgccagcagctctgtgcgggcccgggtgagcagccagagcagccgcttctggttcctgtggggcttcttcttcttcttcctgcggcagagctgctgcgtggcccaggccggcgtgtag

SEQ ID NO: 284011 - DNA, 405 bp, Artificial Sequence
  derived and/or modified sequence
atgagccagcccaggaccccagagcaggccctggacacccctggggactgccccccaggaagaagagatgaagatgctggggagggcatccagtgcagccagaggatgctgtccttcagtgatgccctgctgagcatcatcgccaccgtgatgatcctgcctgtgacccacacagagatcagccctgagcagcagtttgacagatctgtgcagaggctgctggccaccagaattgctgtgtacctgatgaccttcctgattgtgacagtggcctgggccgcccacaccaggctcttccaggtggtgggcaagacagatgacaccctggccctgctgaacctggcctgcatgatgaccatcaccttcctgccctacaccttcagcctgatggtgaccttcccctag

SEQ ID NO: 284012 - DNA, 798 bp, Artificial Sequence
  derived and/or modified sequence
atgaccttcctgatcgtgaccgtggcctgggccgcccacacccggctgtttcaggttgtaggaaagaccgacgataccctagctctgcttaatctggcctgtatgatgactattacgtttctcccgtatacattttccttgatggtgaccttccctgatgttccgctcgggatctttttattttgtgtctgcgtgatcgcaattggggttgtgcaggccctaattgtagggtatgcgtttcacttcccacatttgttgagccctcagattcagaggtccgcccaccgggcattgtatcggagacatgtcctggggatcgtgcttcaagggcccgccctgtgctttgccgccgccattttctcattgttctttgtgccgctttcctacctcctcatggtgacggttatcctgctgccttacgtttcaaaagtgacgggctggtgcagagaccgactactcggacacagggaaccttcagcccaccctgtggaggtatttagttttgacctacacgagccactgagcaaggaacgagtggaggccttcagtgacggagtttatgcaattgtggccactctcctcatactcgacatttgtgcaccgcacagattcgcggctccgcctgcccccttcggctggctgcttctgccatccagtgtttgctccagtgctgcaagttccgcctcttctagtgttagggcccgggtatcttcacagagctcccgattttggtttctttggggctttttcttctttttcctcaggcagtcgtgctgtgtggcccaagccggagtgtag

SEQ ID NO: 284013 - DNA, 405 bp, Artificial Sequence
  derived and/or modified sequence
atgagccagccccggacccccgagcaggccctggacacccccggcgactgcccccccggccggagggatgaagacgcgggggaggggatccaatgctcacagagaatgttatcattctcagacgccctgctgtctattattgcaactgtgatgatcttacctgttacgcacacggaaatctctccagagcagcagtttgaccgttccgtgcagagactactggccactcggatagccgtataccttatgacatttctgatcgtgactgttgcctgggctgcccacaccaggctgtttcaagtcgtgggtaaaactgacgacacgctggccttgctcaacctagcatgcatgatgacgataaccttcctgccatatacattttccctgatggtaacctttccatag

SEQ ID NO: 284014 - DNA, 798 bp, Artificial Sequence
  derived and/or modified sequence
atgacatttctgatcgtgacagtcgcatgggccgcacacactagactgttccaagtggtgggcaagacggatgacactctcgccctgctcaatctagcttgtatgatgaccattactttcctcccatatactttctcactcatggttacctttccagatgtgcctttgggcatcttccttttttgcgtgtgtgtaatcgcaatcggtgtggtgcaggcccttatcgtgggatacgcattccattttccccatctgctttcccctcagattcaacggagcgcccatagggccctctatagaaggcatgtgctcggcatcgtcctacagggccctgcattgtgctttgcagcagctatttttagcctttttttcgttccattgtcctatctcctgatggtgaccgtgatacttctaccatacgtgagcaaggtgaccggttggtgtcgcgaccgactcctgggtcacagagaacccagcgcccacccagtggaggtattcagcttcgatctacacgagcccctgtcaaaggagcgtgtggaagccttctctgacggagtttacgccatcgtggctacccttctgatactggacatctgcgcaccccatcgattcgctgctcctccggctccattcggctggctgctgctcccaagttcagtctgctcttcagccgcaagcagtgcgagtagcagcgtgcgagcacgtgtgagttctcagtcttctcggttctggtttctgtggggatttttcttcttctttcttagacaatcatgttgtgtcgcccaggccggagtttag

SEQ ID NO: 284015 - DNA, 405 bp, Artificial Sequence
  derived and/or modified sequence
atgagccaacccaggacgcccgagcaggcccttgacactccaggggactgtccccctgggagacgcgatgaggatgcaggcgagggaattcagtgcagtcaacggatgttgtcgtttagcgatgccctgttgtctatcatagccaccgtgatgatacttccagtgactcatacagaaatctcacctgaacaacagtttgatagatctgttcaaagactgctggccacgagaattgccgtgtatctgatgacgttcctcatcgtgacagtagcctgggcagcccacaccaggctcttccaggtggtgggtaagacagatgacacattagctctgttgaacttagcgtgcatgatgacaatcaccttcctcccttatacgttctctctaatggtaaccttcccatag

SEQ ID NO: 284016 - DNA, 2012 bp, Artificial Sequence
  derived and/or modified sequence
atgaacttccggctgtcaagctcccggccgggctgactcaagcggaggcgcgcggaacagtcgccgaggcgattcccgcccaggctcctgtaaccgccaggcagcggccccgccatgtcccagccccggaccccagagcaggcactggatacaccgggggactgccccccaggcaggagagacgaggacgctggggaggggatccagtgctcccaacgcatgctcagcttcagtgacgccctgctgtccatcatcgccaccgtcatgatcctgcctgtgacccacacggagatctccccagaacaggtaacggggcaggctgtgctctgcgtggtgtggccctgcgaagatatagggtccccgaggctcgacctggcacagggtgctgaccctgcacgcctcgaagcttctgaggcttaggaggcagaggcgggaggcgggggcctccttggaaagggagggagccaacaagtcctgctcagcctgtgctcaccccggcggaggtcctggcctcctgggagggtgggagactgggctcctagggctctgtttccgagttcagtggacaaaggcagcaccctggaagtgagccagaggacaggttggaagaggaaggttccgggcctgccccaaggacagaagtttcctctgcgggagggcagctgccccagcaggcaggccccttacgtagctgctctgagtaaacgcggccagcgccccgtctcagcggggacactcccaccccggctgctcctgcaggcctggagcagttcgacagaagtgtacagaggcttctggcaacacggattgccgtctacctgatgacctttctcatcgtgacagtggcctgggcagcacacacaaggttgttccaagttgttgggaaaacagacgacacacttgccctgctcaacctggcctgcatgatgaccatcaccttcctgccttacacgttttcgttaatggtgaccttccctgatgtgcctctgggcatcttcttgttctgtgtgtgtgtgatcgccattggggtcgtgcaggcactgattgtggggtacgcattccacttcccgcacctgctgagcccgcagatccagcgctctgcccacagggctctgtaccgacgacacgtcctgggcatcgtcctccaaggcccggccctgtgctttgcagcggccatcttctctctcttctttgtccccttgtcttacctgctgatggtgactgtcatcctcctcccctatgtcagcaaggtcaccggctggtgcagagacaggctcctgggccacagggagccctcggctcacccagtggaagtcttctcgtttgacctccacgagccactcagcaaggagcgcgtggaagccttcagcgacggagtctacgccatcgtggccacgcttctcatcctggacatctgtgccccccatcgcttcgcagcccctcctgctccctttggctggctgttgcttccttccagcgtctgctcctccgcggcctcatctgcctcttcgtctgttagagcgcgcgtctcgtctcagtcgtcacgtttttggtttttgtggggttttttttttttttttttgagacagtcctgctgtgtcgcccaggctggagtatagtggctcaagctcagctcactgcaacctccgcctcccaggttcaagcaattctcctgcctcagcctcccaagtagttgggattacaagcacccaccaccatgcccagctaactttttgcatttttaatagagatgaggtttcaccaagttggccaggctggtcttgaactcctgacctcaggtgatctgcccacctcggcctcccaaagtgctgggattacaggtgtaagccaccgtgcccggccatcgtaatgtttgaatttgcttttttacatcttccatccttttggagtgtcttgttccctcgtcatagttcagcactgtgaccaccttggggttagacactatggttttatatcctgtacttgatattctcgagtccaagtctcctgat

SEQ ID NO: 284017 - DNA, 619 bp, Artificial Sequence
  derived and/or modified sequence
cggccgggctgactcaagcggaggcgcgcggaacagtcgccgaggcgattcccgcccagctcccctgccctgagacagcctccggtgcttctgctgtgtcccaggaaacaagcctgaagcaagcactcaccatccctcaagaatgtgccctgacctaccttcctcaccacggtggcatcagggccaggctcctgtaaccgccaggcagcggccccgccatgtcccagccccggaccccagagcaggcactggatacaccgggggactgccccccaggcaggagagacgaggacgctggggaggggatccagtgctcccaacgcatgctcagcttcagtgacgccctgctgtccatcatcgccaccgtcatgatcctgcctgtgacccacacggagatctccccagaacagcagttcgacagaagtgtacagaggcttctggcaacacggattgccgtctacctgatgacctttctcatcgtgacagtggcctgggcagcacacacaaggttgttccaagttgttgggaaaacagacgacacacttgccctgctcaacctggcctgcatgatgaccatcaccttcctgccttacacgttttcgttaatggtgaccttccc

SEQ ID NO: 284018 - protein, 1402 aa, Artificial Sequence
  derived and/or modified sequence
MHQTLCLNPESLKMSACSDFVEHIWKPGSCKNCFCLRSDHQLVAGPPQPRAGSLPPPPRLPPRPENCRLEDEGVNSSPYSKPTIAVKPTMMSSEASDVWTEANLSAEVSQVIWRRAPGKLPLPKQEDAPVVYLGSFRGVQKPAGPSTSPDGNSRCPPAYTMVGLHNLEPRGERNIAFHPVSFPEEKAVHKEKPSFPYQDRPSTQESFRQKLAAFAGTTSGCHQGPGPLRESLPSEDDSDQRCSPSGDSEGGEYCSILDCCPGSPVAKAASQTAGSRGRHGGRDCSPTCWEQGKCSGPAEQEKRGPSFPKECCSQGPTAHPSCLGPKKLSLTSEAAISSDGLSCGSGSGSGASSPFVPHLESDYCSLMKEPAPEKQQDPGCPGVTPSRCLGLTGEPQPPAHPREATQPEPIYAESTKRKKAAPVPSKSQAKIEHAAAAQGQGQVCTGNAWAQKAASGWGRDSPDPTPQVSATITVMAAHPEEDHRTIYLSSPDSAVGVQWPRGPVSQNSEVGEEETSAGQGLSSRESHAHSASESKPKERPAIPPKLSKSSPVGSPVSPSAGGPPVSPLADLSDGSSGGSSIGPQPPSQGPADPAPSCRTNGVAISDPSRCPQPAASSASEQRRPRFQAGTWSRQCRIEEEEEVEQELLSHSWGRETKNGPTDHSNSTTWHRLHPTDGSSGQNSKVGTGMSKSASFAFEFPKDRSGIETFSPPPPPPKSRHLLKMNKSSSDLEKVSQGSAESLSPSFRGVHVSFTTGSTDSLASDSRTCSDGGPSSELAHSPTNSGKKLFAPVPFPSGSTEDVSPSGPQQPPPLPQKKIVSRAASSPDGFFWTQGSPKPGTASPKLNLSHSETNVHDESHFSYSLSPGNRHHPVFSSSDPLEKAFKGSGHWLPAAGLAGNRGGCGSPGLQCKGAPSASSSQLSVSSQASTGSTQLQLHGLLSNISSKEGTYAKLGGLYTQSLARLVAKCEDLFMGGQKKELHFNENNWSLFKLTCNKPCCDSGDAIYYCATCSEDPGSTYAVKICKAPEPKTVSYCSPSVPVHFNIQQDCGHFVASVPSSMLSSPDAPKDPVPALPTHPPAQEQDCVVVITREVPHQTASDFVRDSAASHQAEPEAYERRVCFLLLQLCNGLEHLKEHGIIHRDLCLENLLLVHCTLQAGPGPAPAPAPAPAAAAPPCSSAAPPAGGTLSPAAGPASPEGPREKQLPRLIISNFLKAKQKPGGTPNLQQKKSQARLAPEIVSASQYRKFDEFQTGILIYELLHQPNPFEVRAQLRERDYRQEDLPPLPALSLYSPGLQQLAHLLLEADPIKRIRIGEAKRVLQCLLWGPRRELVQQPGTSEEALCGTLHNWIDMKRALMMMKFAEKAVDRRRGVELEDWLCCQYLASAEPGALLQSLKLLQLL

SEQ ID NO: 284019 - DNA, 4209 bp, Artificial Sequence
  derived and/or modified sequence
atgcaccagaccctgtgcctgaaccccgagagcctgaagatgagcgcctgcagcgacttcgtggagcacatctggaagcccggcagctgcaagaactgcttctgcctgagaagcgaccaccagctggtggccggccccccccagcccagagccggcagcctgccccccccccccagactgccccccagacccgagaactgcagactggaggacgagggcgtgaacagcagcccctacagcaagcccaccatcgccgtgaagcccaccatgatgagcagcgaggccagcgacgtgtggaccgaggccaacctgagcgccgaggtgagccaggtgatctggagaagagcccccggcaagctgcccctgcccaagcaggaggacgcccccgtggtgtacctgggcagcttcagaggcgtgcagaagcccgccggccccagcaccagccccgacggcaacagcagatgcccccccgcctacaccatggtgggcctgcacaacctggagcccagaggcgagagaaacatcgccttccaccccgtgagcttccccgaggagaaggccgtgcacaaggagaagcccagcttcccctaccaggacagacccagcacccaggagagcttcagacagaagctggccgccttcgccggcaccaccagcggctgccaccagggccccggccccctgagagagagcctgcccagcgaggacgacagcgaccagagatgcagccccagcggcgacagcgagggcggcgagtactgcagcatcctggactgctgccccggcagccccgtggccaaggccgccagccagaccgccggcagcagaggcagacacggcggcagagactgcagccccacctgctgggagcagggcaagtgcagcggccccgccgagcaggagaagagaggccccagcttccccaaggagtgctgcagccagggccccaccgcccaccccagctgcctgggccccaagaagctgagcctgaccagcgaggccgccatcagcagcgacggcctgagctgcggcagcggcagcggcagcggcgccagcagccccttcgtgccccacctggagagcgactactgcagcctgatgaaggagcccgcccccgagaagcagcaggaccccggctgccccggcgtgacccccagcagatgcctgggcctgaccggcgagccccagccccccgcccaccccagagaggccacccagcccgagcccatctacgccgagagcaccaagagaaagaaggccgcccccgtgcccagcaagagccaggccaagatcgagcacgccgccgccgcccagggccagggccaggtgtgcaccggcaacgcctgggcccagaaggccgccagcggctggggcagagacagccccgaccccaccccccaggtgagcgccaccatcaccgtgatggccgcccaccccgaggaggaccacagaaccatctacctgagcagccccgacagcgccgtgggcgtgcagtggcccagaggccccgtgagccagaacagcgaggtgggcgaggaggagaccagcgccggccagggcctgagcagcagagagagccacgcccacagcgccagcgagagcaagcccaaggagagacccgccatcccccccaagctgagcaagagcagccccgtgggcagccccgtgagccccagcgccggcggcccccccgtgagccccctggccgacctgagcgacggcagcagcggcggcagcagcatcggcccccagccccccagccagggccccgccgaccccgcccccagctgcagaaccaacggcgtggccatcagcgaccccagcagatgcccccagcccgccgccagcagcgccagcgagcagagaagacccagattccaggccggcacctggagcagacagtgcagaatcgaggaggaggaggaggtggagcaggagctgctgagccacagctggggcagagagaccaagaacggccccaccgaccacagcaacagcaccacctggcacagactgcaccccaccgacggcagcagcggccagaacagcaaggtgggcaccggcatgagcaagagcgccagcttcgccttcgagttccccaaggacagaagcggcatcgagaccttcagcccccccccccccccccccaagagcagacacctgctgaagatgaacaagagcagcagcgacctggagaaggtgagccagggcagcgccgagagcctgagccccagcttcagaggcgtgcacgtgagcttcaccaccggcagcaccgacagcctggccagcgacagcagaacctgcagcgacggcggccccagcagcgagctggcccacagccccaccaacagcggcaagaagctgttcgcccccgtgcccttccccagcggcagcaccgaggacgtgagccccagcggcccccagcagcccccccccctgccccagaagaagatcgtgagcagagccgccagcagccccgacggcttcttctggacccagggcagccccaagcccggcaccgccagccccaagctgaacctgagccacagcgagaccaacgtgcacgacgagagccacttcagctacagcctgagccccggcaacagacaccaccccgtgttcagcagcagcgaccccctggagaaggccttcaagggcagcggccactggctgcccgccgccggcctggccggcaacagaggcggctgcggcagccccggcctgcagtgcaagggcgcccccagcgccagcagcagccagctgagcgtgagcagccaggccagcaccggcagcacccagctgcagctgcacggcctgctgagcaacatcagcagcaaggagggcacctacgccaagctgggcggcctgtacacccagagcctggccagactggtggccaagtgcgaggacctgttcatgggcggccagaagaaggagctgcacttcaacgagaacaactggagcctgttcaagctgacctgcaacaagccctgctgcgacagcggcgacgccatctactactgcgccacctgcagcgaggaccccggcagcacctacgccgtgaagatctgcaaggcccccgagcccaagaccgtgagctactgcagccccagcgtgcccgtgcacttcaacatccagcaggactgcggccacttcgtggccagcgtgcccagcagcatgctgagcagccccgacgcccccaaggaccccgtgcccgccctgcccacccacccccccgcccaggagcaggactgcgtggtggtgatcaccagagaggtgccccaccagaccgccagcgacttcgtgagagacagcgccgccagccaccaggccgagcccgaggcctacgagagaagagtgtgcttcctgctgctgcagctgtgcaacggcctggagcacctgaaggagcacggcatcatccacagagacctgtgcctggagaacctgctgctggtgcactgcaccctgcaggccggccccggccccgcccccgcccccgcccccgcccccgccgccgccgcccccccctgcagcagcgccgccccccccgccggcggcaccctgagccccgccgccggccccgccagccccgagggccccagagagaagcagctgcccagactgatcatcagcaacttcctgaaggccaagcagaagcccggcggcacccccaacctgcagcagaagaagagccaggccagactggcccccgagatcgtgagcgccagccagtacagaaagttcgacgagttccagaccggcatcctgatctacgagctgctgcaccagcccaaccccttcgaggtgagagcccagctgagagagagagactacagacaggaggacctgccccccctgcccgccctgagcctgtacagccccggcctgcagcagctggcccacctgctgctggaggccgaccccatcaagagaatcagaatcggcgaggccaagagagtgctgcagtgcctgctgtggggccccagaagagagctggtgcagcagcccggcaccagcgaggaggccctgtgcggcaccctgcacaactggatcgacatgaagagagccctgatgatgatgaagttcgccgagaaggccgtggacagaagaagaggcgtggagctggaggactggctgtgctgccagtacctggccagcgccgagcccggcgccctgctgcagagcctgaagctgctgcagctgctgtag

SEQ ID NO: 284020 - DNA, 4209 bp, Artificial Sequence
  derived and/or modified sequence
atgcaccagaccctgtgtcttaacccagaatctctgaagatgtccgcatgcagtgacttcgtcgagcacatatggaagccaggaagctgcaagaactgtttttgccttcggagcgaccatcagctggtggctggacccccccagccacgcgccgggagcctgccccccccgcctagactccctcctcgaccggagaattgcaggctagaggacgaaggggtcaattcttctccctactccaaaccaacaatcgcagtgaaaccaacaatgatgagctctgaggcatctgatgtctggactgaggccaacctctcagctgaagtttcccaagtcatctggcgaagagcgcccggaaagctgccactgccaaaacaagaagacgcaccggtggtctacctgggcagctttaggggtgtgcagaagccagcggggcccagtacctccccagacggtaattcccgatgtcctcccgcctacacaatggtgggccttcacaatctcgagccccgcggggaacgcaatattgccttccacccagtctcttttcccgaggagaaagccgttcacaaagaaaagcccagcttcccttatcaggaccgtccctcaacccaagaatctttccgtcagaagctggctgcctttgctgggacaacttctggctgccaccaggggcctgggcccttgcgcgagtctttaccctctgaggacgattctgatcagcggtgttcgccctcgggcgatagcgaagggggcgaatactgcagtattctcgactgttgtcccggctcacctgtagccaaggccgcttctcagacagccgggtctcgcggtaggcacggcggccgcgactgtagtcctacatgttgggaacagggcaagtgcagcggtccagctgagcaggagaaacgtggcccatctttccccaaggagtgttgctcacaagggccaactgctcatccctcatgtctggggcctaagaaactgagcttgacttccgaggccgcgatatcctctgatggcctgagctgtgggtcaggctctggcagcggcgcctcgagtcctttcgttccccatcttgagagtgattattgctctctgatgaaggaacctgccccggagaagcagcaagatcctggctgtccgggggtaacccctagtaggtgccttgggctgacaggagaaccacagcctccagcgcaccctcgagaagccacacagccagagccaatctatgcagaaagtacaaagagaaaaaaggcagcccctgtaccatcaaaatcacaggctaagattgaacacgcggcagctgcacagggccaaggccaagtctgcaccgggaacgcctgggctcagaaagccgcttctggctggggccgggactcccctgacccaacaccgcaagtctcagcaactattacagttatggccgcgcacccggaagaggaccacaggactatctatcttagtagtccagactcagccgtgggcgtacagtggccgcgggggccagtttcgcagaatagcgaggtcggagaggaggagacatctgctggacagggactcagttctcgggagagccatgcccactctgcttcggaatccaagccaaaagaacgacccgctatcccccctaagctcagcaaaagctcacccgtgggaagtccagtctctcctagcgccggcggtcctcctgtttctcctctggccgatctaagcgacgggtcttcaggagggtcaagtataggtcctcagccaccatctcagggtccagccgatcccgccccaagctgccgcacaaatggcgtggccattagcgacccatctcgatgtccacagcccgcagcgtctagtgccagtgagcagcggcgtcctcgatttcaggcaggcacttggtcacggcaatgcaggatagaggaagaagaggaggtggagcaggagttgctctcccattcttggggacgggaaacaaagaacggacctaccgatcatagtaactcaactacttggcacaggctccaccccacggatggcagctccggtcagaattccaaagtagggacgggaatgtccaagtcggcaagctttgcctttgagtttcccaaggaccgttcaggcatcgagacattttcacccccaccacccccaccaaagtctagacacctcctgaagatgaacaagtcaagctctgatctagagaaggttagccagggatctgccgagtcacttagcccaagcttcaggggtgtccacgtatcttttacaacaggtagcactgacagcctagctagtgatagtcggacctgctctgacggtgggccctcctctgaacttgcacactcacccaccaattcgggaaaaaaactcttcgccccagtgcctttcccttctggcagtaccgaggacgtaagtccaagtggtccacagcagccccccccactccctcagaagaaaatagtttctcgggcagcttctagccctgatggatttttctggacgcaaggctctcctaaacctgggacagcctcacctaagcttaacctttcacacagtgagactaacgtgcacgacgaaagccacttcagctactcactcagccctggcaacaggcaccatcccgtttttagcagcagtgatcctctggaaaaggctttcaagggctcagggcactggctgcctgcagctggtctggcaggtaatagaggggggtgtggaagtcctgggctccagtgtaagggcgcgccctcagcttcttccagccagctcagtgtgtcatcacaggcctccacagggtcaacacagctgcagctacatggtctcttgagtaatattagttccaaggaagggacgtatgcgaagctggggggcttatatacccaatcacttgcacgcctagtggcgaagtgcgaggatttgttcatggggggacagaaaaaggaactgcactttaacgagaacaattggtccctctttaagctgacctgcaataagccatgctgcgatagcggcgacgctatttactactgtgccacatgtagcgaggatcccgggagcacttatgcagtgaaaatttgcaaagctccggaacccaagacggtgtcttactgctccccctccgtgccagtgcacttcaatattcagcaggactgtgggcacttcgtggccagcgtcccatcttctatgctgtctagcccagatgcacccaaggatcctgtccccgcgctgcctacacacccgccagcgcaggaacaggactgcgtagttgttattactcgcgaggtaccgcaccagactgcctcagacttcgtgcgcgatagtgctgcttctcaccaggctgagcccgaagcatacgagcgtcgagtttgtttcctcctgctgcagctttgtaatggcctggaacacctgaaagaacacggcataatccatcgtgacctgtgtctcgagaacctgcttctcgtacactgcactctgcaggccggcccaggccctgcacccgctccagcccccgcacccgccgccgccgcacctccatgtagctctgctgctccaccagctggcggaactctgagtccagcggccggccctgctagtcccgaagggccacgcgagaaacagctgccaagactgattatctcaaatttccttaaggctaagcagaagccaggcgggacccctaatcttcagcagaagaagtcccaggcaaggctagctccagagatcgtgtcagcttctcagtaccggaagttcgacgagtttcagacaggtattctgatttacgagctgctccaccagccaaatccattcgaggtgagggcacagctgagagaacgcgactatcgccaggaagacctcccacctctgcctgccttgagcctctatagcccggggctgcagcagttagcacatctcctgcttgaagctgacccaataaagcgcatcagaatcggcgaggcaaagcgtgtgctgcagtgcctactgtggggcccaaggcgcgagctcgtgcagcagccaggaaccagcgaagaagccctctgtggcacgctgcataattggatcgatatgaagcgcgccctgatgatgatgaagtttgccgagaaggcagtcgacagaagacgcggcgtcgagctggaagactggttatgctgccagtacttagcaagtgcagagccaggagccttgcttcagtccctcaaactgttacagctcctatag

SEQ ID NO: 284021 - DNA, 4209 bp, Artificial Sequence
  derived and/or modified sequence
atgcatcaaactttgtgcttaaaccccgaatcccttaaaatgtctgcttgctccgatttcgtcgaacacatctggaaaccagggagctgtaagaattgcttctgtctcaggtctgaccatcagctggttgcgggtcccccccaaccgagggccggatcactgccccccccacctagactccctccacgccccgagaactgcaggcttgaggatgagggtgtgaactcaagcccttattcgaagcccactatcgcagttaaaccaactatgatgtcttcagaggcatccgacgtttggacagaagccaatctttcagcggaagtgtcacaggtcatctggagacgggcgccaggcaaattaccactgcctaagcaggaggatgctcctgtggtctacctggggtccttcaggggggtccaaaagccagctggcccttcaacatctcccgatggcaattcacgctgcccaccggcttacaccatggttggcctacataatctggaacctagaggggagaggaatatcgcctttcacccggtgtccttccccgaggaaaaagcggtgcacaaggagaaaccttctttcccctatcaggaccggccatccactcaagagagctttcgccagaagctcgctgccttcgctggaacaacctccggctgtcatcagggacctggcccattgagagaatctttgcccagtgaggatgactcggaccagaggtgctctccaagcggggattccgagggaggcgagtattgcagcatcctggactgctgtcccggttctcccgtcgcaaaagcggcctctcagacggccggcagccgagggaggcatggcgggcgtgattgctccccaacgtgttgggaacaggggaaatgttctggaccagcagagcaggagaagcgggggccctcctttcccaaagagtgttgctcacaaggaccaaccgctcatccgagctgtctcggccctaagaaactctccttgacaagtgaagccgccatatcttctgacggattgtcatgcggatctggctcaggatctggcgccagtagtccctttgtgccccacctcgaaagcgattactgctctctcatgaaagagccggctcccgaaaaacagcaggacccgggatgcccaggcgtgactcccagcaggtgtctcggcctcacaggtgagcctcagccaccggcccatccgcgtgaggccacacagcctgaacccatctatgctgagagtactaaaagaaaaaaggctgctccagtcccctcaaaatcccaggccaagatagagcatgccgcggccgcgcaggggcagggtcaggtgtgcacgggcaacgcctgggctcaaaaagcagcttctggctggggaagagactcccctgatccgacaccacaggtctccgccacaattacagttatggctgcacatcctgaggaggaccatcggaccatctacctctcttctccagattcggccgtgggcgtccagtggcctcgggggcctgtgtctcagaatagcgaggtcggcgaagaagaaacttctgcaggccagggcttgtcgagcagggaatcccacgctcactccgcatccgaatccaagcccaaggaacgccctgcgatccctcccaagctctctaaaagttccccagtcgggtcacctgttagtccatccgccggtgggcccccggtgagtccattggctgatctgagcgacgggagtagcggaggatctagcatcgggccccagcctccgtcccaaggtcccgctgatcctgctccgtcttgcagaactaatggcgtagcaatcagtgatccctcacgttgtccacagcctgctgctagctcagctagcgaacaacggagaccgcggttccaagccggaacatggagtagacagtgcagaattgaggaagaagaagaggtcgaacaagagctcctcagccactcgtggggacgcgagactaaaaacggaccaacagatcactcaaactctaccacctggcacagactacacccgacggacggctcctcagggcagaactcaaaggtgggcacgggtatgagcaagagtgccagctttgcttttgagtttcctaaagatcgctctggaatcgagacattttcccctccccccccaccccccaagtccagacatcttctcaagatgaacaagagttccagtgatctggaaaaagtgtcacagggcagcgctgaaagcctgtcaccatcattccgcggggtccacgtgtcgttcactacgggcagtacagactccctggccagcgatagccgaacctgctcagatggtgggccttcctctgaacttgcccacagccctactaatagcgggaagaaactcttcgcccctgtcccctttccatccgggtccacggaggacgtgtcccctagcggacctcaacagccccccccactcccccagaaaaagatagtctcgagggcggcttcctcccccgacggattcttctggactcaggggtcccccaagcccgggaccgcctccccaaaattaaatttgtctcactctgaaacgaacgtgcatgatgaaagtcacttctcatattccctgagccccggcaatcggcaccacccagtgttcagttcctcagatccactcgaaaaggccttcaagggctcaggccactggctaccggccgctgggctggccggaaaccggggtggatgcggaagtccgggattgcagtgcaaaggggcgccttcagccagtagtagccagctcagtgtcagtagccaggccagcacaggctccacgcagctgcaactgcatggcctgttgtccaatattagcagcaaggagggaacatacgccaagctgggaggattatatactcaaagccttgcacggctggttgcaaagtgcgaggacctgttcatgggcgggcaaaaaaaagagctgcatttcaatgaaaacaactggagtctctttaagctgacgtgcaacaaaccatgctgcgattcaggggacgcaatctactactgcgccacctgctctgaagatccgggatccacctacgccgtgaagatctgtaaggctcccgagcctaagaccgtgtcgtattgtagtccttcagtccccgtccacttcaatatacagcaggattgtggccatttcgtcgcttctgtcccatctagtatgctaagctccccagatgcccctaaggatccagtccccgctcttcctacccacccacctgcccaggaacaggattgtgtggttgttatcacaagggaggtcccacaccagaccgcaagcgactttgtccgcgactccgccgcatctcatcaagcggagcccgaggcatacgagaggcgggtgtgctttctgctcttgcaactgtgtaacggtctggaacacctgaaagagcacgggattatccatcgggatctatgcctggagaacctcctgctggtacactgtaccttgcaagcagggcccggccccgcccccgcacctgcccctgcacctgctgctgcagcacccccttgctcaagtgccgcacctcccgccggaggaacattgtctcccgccgcaggccctgcaagtccagaagggccacgggaaaaacagctgcccagactcatcatctccaatttcctcaaggctaaacaaaagcccgggggcacaccgaatctgcaacagaaaaagagccaggcacggctggctccagaaatcgtcagcgcctcacagtaccggaaatttgatgagttccagactggcatattgatttatgagttgctgcaccaacctaacccattcgaggtccgggcacagcttcgggagcgcgactatcgacaagaggatctgcctccccttcccgctttgtccctctattccccagggcttcagcaattagcacatctccttttggaagctgaccctattaagagaatccgaataggcgaagccaagagagtcctccagtgcctcctgtggggacctcggcgcgagctcgtccagcagcctggaacatccgaggaagccctctgcgggacactccacaactggattgacatgaagcgtgctttgatgatgatgaagtttgccgagaaggccgtagaccggcgccggggagtggaattagaggactggctgtgttgtcagtacctcgcaagtgccgagcccggagcgctcctgcagagcctcaaacttttgcagctgctctag

SEQ ID NO: 284022 - DNA, 4209 bp, Artificial Sequence
  derived and/or modified sequence
atgcaccagaccctgtgcctgaaccctgagagcctgaagatgtctgcctgcagcgactttgtggagcacatctggaagccaggcagctgcaagaactgcttctgcctgcggagtgaccaccagctggtggccggccccccccagcccagggctggcagcctgcccccaccaccccggctgccccccaggcctgagaactgccgcctggaggatgaaggagtgaacagcagcccctacagcaagcccaccatcgctgtgaagcccaccatgatgagcagcgaggccagtgatgtgtggacagaggccaacctgtctgctgaggtgtcccaggtgatctggaggcgggcccctgggaagctgcccctgcccaagcaggaggatgcccctgtggtgtacctgggcagcttccggggcgtgcagaagccagctggccccagcaccagcccagatggcaacagccgctgccccccagcctacaccatggtgggcctgcacaacctggagcccagaggagagagaaatattgccttccaccctgtgtccttccctgaggagaaggctgtgcacaaggagaagcccagcttcccctaccaggaccggcccagcacccaggagagcttccggcagaagctggccgcctttgctggcaccaccagcggctgccaccagggccctggccccctgcgggagagcctgcccagtgaagatgacagcgaccagcgctgcagccccagcggggacagcgagggcggggagtactgcagcatcctggactgctgccccggcagccctgtggccaaggccgccagccagacagctggcagccggggcagacatggaggccgggactgcagccccacctgctgggagcagggcaaatgttctggccctgctgagcaggagaagaggggccccagcttccccaaggagtgctgcagccagggccccacagcccaccccagctgcctgggccccaagaagctgagcctgaccagcgaggccgccatcagcagtgatggcctgagctgtggcagcggcagcggcagcggggccagcagcccctttgtgccccacctggagagtgactactgcagcctgatgaaggagcccgcccctgagaagcagcaggaccccggctgccctggggtgacccccagccgctgcctgggcctgaccggggagccccagcccccagcccacccccgggaggccacccagcctgagcccatctatgcagagagcaccaagaggaagaaggccgcccctgtgcccagcaagagccaggccaagattgaacatgctgctgctgcccagggccagggccaggtgtgcacaggaaatgcctgggcccagaaggccgccagcggctggggccgggacagcccagaccccaccccccaggtgtctgccaccatcaccgtgatggccgcccaccctgaggaggaccacaggaccatctacctgagcagcccagattctgctgtgggcgtgcagtggccccggggccctgtgtcccagaacagcgaggtgggggaggaggagaccagcgctggccagggcctgagcagccgggagagccacgcccacagcgccagcgagagcaagcccaaggagaggcctgccatcccccccaagctgagcaagagcagccctgtgggcagccctgtgagccccagcgctgggggcccccctgtgagccccctggccgacctgagtgatggcagcagcggcggcagcagcatcggcccccagccccccagccagggccctgctgaccctgcccccagctgcaggaccaacggggtggccatcagtgaccccagccgctgcccccagcctgctgccagcagcgccagcgagcagaggcggccccgcttccaggccggcacctggagccggcagtgcagaattgaggaggaggaggaggtggagcaggagctgctgagccacagctggggccgggagaccaagaatggccccacagaccacagcaacagcaccacctggcaccggctgcaccccacagatggcagcagcggccagaacagcaaggtgggcaccggcatgagcaagagcgccagctttgcctttgagttccccaaggacaggagcggcatcgagaccttcagccccccacctcctccacccaagagccgccacctgctgaagatgaacaagagcagcagtgacctggagaaggtgtcccagggcagcgctgagagcctgagccccagcttccggggcgtgcacgtgtccttcaccaccggcagcacagacagcctggccagtgacagcaggacctgcagtgatggcggccccagcagcgagctggcccacagccccaccaacagcggcaagaagctgtttgcccctgtgcccttccccagcggcagcacagaagatgtgagccccagcggcccccagcagcccccacccctgccccagaagaagatcgtgtcccgggccgccagcagcccagatggcttcttctggacccagggcagccccaagccaggcacagccagccccaagctgaacctgagccacagcgagaccaacgtgcatgatgagagccacttctcctacagcctgagccctggcaacagacaccaccctgtgttcagcagcagtgaccccctggagaaggccttcaagggcagcggccactggctgcctgctgctggcctggccggcaacagaggaggctgcggcagccctggcctgcagtgcaagggggcccccagcgccagcagcagccagctgtctgtgagcagccaggccagcacaggcagcacccagctgcagctgcacggcctgctgagcaacatcagcagcaaggagggcacctacgccaagctgggcggcctgtacacccagagcctggcccggctggtggccaagtgtgaagatctcttcatgggcggccagaagaaggagctgcacttcaatgaaaacaactggagcctcttcaagctgacctgcaacaagccctgctgtgacagcggagatgccatctactactgtgccacctgcagtgaagatcctggcagcacctatgctgtgaagatctgcaaggcccctgagcccaagacagtgtcctactgcagccccagcgtgcctgtgcacttcaacatccagcaggactgtggccactttgtggcctctgtgcccagctccatgctgagcagcccagatgcccccaaggaccctgtgcctgccctgcccacccaccccccagcccaggagcaggactgtgtggtggtgatcacccgggaggtgccccaccagacagccagtgactttgtgcgggacagcgctgccagccaccaggccgagcctgaggcctatgaaagaagagtgtgcttcctgctgctgcagctgtgcaatggcctggagcacctgaaggagcacggcatcatccaccgggacctgtgcctggagaacctgctgctggtgcactgcaccctgcaggccggccctggccctgccccagccccagccccagccccagctgctgctgccccaccctgcagcagcgctgcccccccagctgggggcaccctgagccctgctgctggccctgccagccctgagggcccccgggagaagcagctgcccaggctcatcatcagcaacttcctgaaggccaagcagaagccaggcggcacccccaacctgcagcagaagaagagccaggcccggctggcccctgagatcgtgtctgccagccagtacaggaagtttgatgagttccagacaggcatcctgatctatgagctgctgcaccagcccaacccctttgaggtgcgggcccagctgcgggagcgggactaccggcaggaggacctgccccccctgcctgccctgagcctgtacagccctggcctgcagcagctggcccacctgctgctggaggccgaccccatcaagaggatccgcatcggggaggccaagagggtgctgcagtgcctgctgtggggcccccggcgggagctggtgcagcagcccggcaccagcgaggaggccctgtgtggcaccctgcacaactggattgacatgaagagggccctgatgatgatgaagtttgctgagaaggctgtggacagaagaagaggagtggagctggaggactggctgtgctgccagtacctggccagcgctgagcccggggccctgctgcagagcctgaagctgctgcagctgctgtag

SEQ ID NO: 284023 - DNA, 4209 bp, Artificial Sequence
  derived and/or modified sequence
atgcaccagaccctgtgcctgaaccccgagagcctgaagatgagcgcttgctccgactttgtggaacacatctggaagcctggctcatgcaagaactgtttctgtctgagatccgaccaccagctggttgccgggccgcctcagcctcgtgcaggctccctgcctccccctccccggctgccaccacgtcccgagaattgtcgtttggaggacgaaggggtcaactcaagcccctattctaaaccgaccattgccgtcaagcccaccatgatgtccagcgaagcatccgatgtttggactgaagccaacctgagcgcagaggtgtctcaggtgatttggagaagagcccccggcaaactccccttgcccaaacaagaagacgctcctgtggtgtatttggggtcatttcgcggagttcagaaaccagcaggtcccagcacaagccctgatgggaatagcagatgccctccagcctatacaatggtggggctacacaacctcgaacctcgaggtgagcgtaacatcgctttccacccagtgagcttcccagaagaaaaggccgtccacaaagagaagcccagcttcccttaccaggacagacccagtacccaagagagcttcaggcagaaactggccgccttcgccggtactacctcaggatgtcaccaggggcctggacctctcagggagtcgctcccttctgaggatgacagcgatcaaagatgctcccccagcggtgatagtgagggaggcgagtactgtagtatcctggattgctgcccaggtagccctgtggcaaaggcagcgagccaaaccgccgggtcacgaggccggcacggaggccgggattgctccccaacttgttgggaacaaggtaagtgctcaggccctgccgaacaagagaaacgtggcccgtcatttccgaaggagtgttgttcacagggtcccaccgctcacccatcctgcttgggtcctaagaagttatcgctcacttctgaggccgctatatcctccgacggcctgtcctgcggctccgggagcggctccggcgcctcgtcaccctttgtgccgcatttggagtccgattactgttcactcatgaaggagcctgcgccagaaaaacagcaggacccgggctgtccaggagtgacacccagtagatgcctggggctgacaggggaacctcagcccccggcccaccctagagaagcaacccagcctgaaccaatttacgcagaatctacgaaacggaaaaaggcggccccagtgccgtcgaagtctcaggctaaaattgagcacgccgcagcagcacagggacaaggtcaggtttgtaccggtaacgcgtgggctcagaaggcggcatctggctgggggagagactcaccggaccccacaccacaagtttcagccaccattaccgtgatggcagcccatcccgaagaagatcaccggactatctaccttagctcaccagacagcgcagtcggcgtgcagtggccccgaggacccgtgtcacagaattccgaggtcggcgaggaggagacaagcgctggtcaaggattgagctctcgagagtctcacgctcactcagcctcagaaagcaaacccaaggaacgaccagctatcccacccaagttgtcaaaaagcagccctgtcggcagtccagtgagccctagcgcgggggggcctccagtaagcccgctggccgacctttctgacgggagttccggtggttcctcaatcggcccacagccgccgagtcaaggccccgcagatccagcaccttcatgccggacaaatggcgtcgctatcagcgatccatctcgatgtccccagccagcggcttcatcagccagcgaacagcgcaggccgcgatttcaggccggaacttggtcacgtcaatgcaggattgaggaggaggaggaagtggagcaggagctcctctcccatagctggggcagggaaacgaaaaacggaccaaccgaccatagcaactccaccacctggcacagacttcaccccactgacggctctagcggacagaactcaaaagttggaactggaatgagcaaatctgcaagcttcgcgtttgaattccctaaagaccggtcgggcatcgagaccttttctcccccacctcccccccctaagagccggcacctgctgaagatgaacaaatctagttcagatctcgagaaggtgtctcagggatcggcagaatcattgtccccctccttccgtggggtgcacgtctctttcacgaccgggtccactgactccctagcgtcagattctaggacttgtagtgacggggggccctcttcagaactggcccactccccgactaattctgggaagaaactgtttgcaccggttccatttcctagtggatctacagaagacgtgtcaccttctggcccccagcaacccccaccgctcccgcagaaaaagattgtctcgagagccgcttcttcacctgatggattcttttggacccagggctcacctaagccgggcaccgcttcccctaagctgaacctgagccattcagagacgaatgtacatgacgagagccacttctcatactctctttctcctggcaaccgccatcatccggtctttagctcatctgaccccctggagaaggcctttaaggggagcgggcactggctcccggccgctgggcttgcaggtaaccgcgggggatgtggaagtcctggacttcagtgcaagggcgcgcccagcgcctcatcctcacagctatcagtgagtagccaggccagcaccggttcaacgcagctgcaactgcatggtctgttgtctaatattagtagcaaggaggggacatacgcaaaacttggcggactatacactcaatctctcgcccggctggtcgctaagtgtgaagacttatttatgggaggacagaagaaggagctgcactttaacgaaaacaactggagcctatttaaattgacttgtaacaaaccttgttgtgatagcggcgatgccatttattattgcgcaacctgttctgaagacccggggtctacttacgcagtgaaaatatgcaaggcccctgaacccaaaactgtgtcatattgctccccaagcgtgccggtgcacttcaacattcaacaggactgcgggcactttgttgcctccgtcccctcctcaatgctaagctcccctgacgcccctaaggatccagtgcccgcccttcctactcatccaccagcccaggagcaagactgtgtcgtggtgatcacacgtgaggtacctcatcaaacagcctccgatttcgttcgagattcggccgcaagccaccaggctgagcctgaggcatatgagcggagagtttgctttctacttctccagctgtgcaacggactcgaacatttgaaggaacacggaatcattcacagggatctatgtctggagaacctcctgctggttcactgcaccttgcaggcaggtccgggtcctgctccagccccagctcctgcacctgcagcagccgccccaccctgttcctccgcggcccccccggccggggggactctctctcccgccgccggacctgcttcacccgaaggcccaagggagaagcaacttccgcgcctgatcattagcaactttctgaaagcaaagcagaaacctggcggcactcctaaccttcaacagaagaagtcacaagctcgcctggcgcctgagatagtgtccgcatcacagtatcggaaattcgacgaattccaaaccggcattctgatatacgagctcctgcaccagccaaatcctttcgaggtgcgagcgcagctccgggagagagattatcggcaggaagacttaccgccgcttcctgctctgagcctttattccccgggtctgcagcagttagctcatctgcttctggaggccgatcctattaagcggatcaggatcggggaagctaaacgagtcttacagtgtctactgtggggccccagacgtgagctggttcagcagcccggtaccagtgaagaggccttatgtggcaccctgcacaattggattgatatgaaacgagccctcatgatgatgaagttcgccgagaaggccgtcgaccgacggcggggtgtggagctggaggattggctgtgctgtcagtaccttgcaagtgctgagccgggggctcttctgcagagcctgaagctgttacaattgctgtag

SEQ ID NO: 284024 - DNA, 4209 bp, Artificial Sequence
  derived and/or modified sequence
atgcaccagaccctgtgcctgaaccccgagagcctgaagatgagcgcatgcagcgactttgtcgagcacatctggaaaccaggctcctgtaagaactgcttttgtttgaggtccgaccaccagttggtggcaggacctcctcaaccaagagcaggaagtctgccccccccaccccggttgccaccaagacctgagaactgtcgacttgaggacgaaggagtgaacagtagcccctattcaaaaccgaccatcgcggtgaagccaaccatgatgagctccgaagcatccgacgtgtggacagaagctaatctctctgcagaggtttctcaagttatctggaggcgggcaccaggtaagctccccctgcccaagcaggaggacgccccagtcgtgtacctagggagcttccggggagtgcagaagcctgcagggccctccacatcacctgacgggaattcacggtgtcctcctgcatacactatggtcggtctacataatctggaaccccgcggcgaacggaacattgcatttcacccggtgtcttttcctgaggagaaggctgtgcacaaggaaaagccctctttcccataccaggaccgcccctctactcaggaaagcttccggcagaaactggccgcttttgccggaaccacgagcgggtgccatcagggacccggacctcttcgggagagcctcccttccgaggacgactctgaccagcgctgcagccccagcggcgattctgagggcggcgagtactgtagcatacttgactgttgccctggatcccctgtggcaaaggctgcaagccagacagccgggtctcgcggacgacacggcggacgtgattgttcccctacatgctgggaacagggcaagtgtagcggccccgctgagcaagaaaagagggggcccagctttcccaaggagtgctgcagccaaggccctactgcccatccttcttgcttaggccctaagaaattatcgctgacgagcgaagccgcgattagttccgacggactgtcttgtggatctggctctggctctggcgcctcttccccatttgtgccccatcttgagtccgattattgtagtctgatgaaggagcctgccccagaaaaacagcaagaccccgggtgccctggcgtgaccccctccagatgcctgggcctgactggtgagccccaacctccagcgcaccctagggaggcaacccaaccggagcctatctacgccgagtctaccaaacggaagaaagccgccccagtgcccagtaaatcccaagccaagatagagcatgccgccgcagcacaggggcaaggccaagtatgcaccggtaatgcttgggctcagaaggctgccagcggctgggggcgcgacagtccagatccgacccctcaagtgtcagccacaattacagtcatggccgcacaccccgaggaagatcacaggacgatatacctttctagccctgattccgcagtgggggtgcagtggcctagaggacctgtgtcacagaattccgaagttggcgaagaggaaacatccgccggacaaggactttctagtcgcgagagtcacgcgcattccgcttccgaatccaagccaaaggagcgtccagccataccccccaaactctccaagagtagcccagtaggctccccagtcagcccgagcgcaggcggaccaccggtctccccactggctgacttgtcagatggtagctcgggcggatcttcgatcgggcctcagccccccagccagggacccgccgaccccgccccctcttgcaggaccaatggcgtggcaatctctgatccgagcagatgccctcagcctgcagctagtagcgccagcgagcagcgacgaccccgtttccaggcaggcacctggagcaggcagtgccgaatagaggaggaggaagaggtggaacaggagctgctgtcacatagctggggacgagagaccaaaaacggccccaccgatcatagtaattcaaccacatggcataggctccacccgaccgacgggtctagcggacagaacagcaaagtgggcactggcatgagcaaaagcgcgtcttttgcctttgaattcccaaaagaccgatctggaattgaaacattctctcctccaccacctcctcccaagtcccggcatctgctgaaaatgaacaaatcgagctccgatttagaaaaggtcagccagggatccgcggagagtttatccccctccttcaggggcgtccatgtgtcatttactaccgggagcaccgatagcctagcaagcgattctagaacctgttccgacgggggacccagttccgaactcgctcattctccaactaattccggaaaaaagttgttcgcacccgtgccattccccagcggtagcaccgaagacgtgagcccatcaggccctcagcagccacccccactccctcagaaaaaaattgtgtctcgtgctgcatcgtcgcccgacggcttcttttggactcagggttctcctaagccaggcactgcctctccaaagctaaacctgtctcacagcgagactaatgttcacgacgagtcccacttcagctactcactgagccccggtaatcgtcaccatccggtgtttagctcaagcgaccctctggagaaagcttttaaagggtccggtcactggcttccagccgccggacttgcaggcaataggggtggctgcggctcccccgggctccagtgtaagggagcccctagcgcatcttctagccaactcagcgtttcctcacaggccagtacagggtctacacaattgcagctgcatggattactgtcaaatatttcctctaaggagggcacatacgccaaacttggaggcctgtacacccagagcttggccaggcttgtcgccaaatgcgaggacctgtttatgggcggtcagaaaaaggaactgcattttaacgaaaataactggtctctgtttaaacttacatgcaataaaccttgttgtgactctggagatgcaatttattactgcgccacatgttcagaggatccaggcagcacctacgccgtcaaaatatgcaaggctccagagcccaagacagtgagctattgttctccttctgtgcccgtccactttaacattcagcaagattgtgggcattttgtcgcgtctgtaccatctagtatgctctcttcccctgatgccccgaaagaccccgttccagccctgccaactcatccaccagctcaggagcaggattgtgttgtagttattacccgggaggtaccacaccagacggctagcgactttgtccgcgacagcgccgcttcccaccaggcagagcctgaggcatatgaaagacgggtctgctttcttctcctgcagctctgtaacggtttagagcatctaaaggaacacggcattatccacagggacctgtgtctggaaaatctccttttagtgcactgcaccctgcaggccggaccgggtcccgcacctgcccccgcgcccgcacccgccgcggcggcccctccatgtagctctgcagcgcctcccgccggggggaccctgagcccggctgccggtccagcctctccagaaggtccaagggaaaagcaactgccgaggctgattattagcaattttctgaaagccaagcagaagccgggcggtacaccaaacctgcagcagaaaaaaagccaagctaggttagcaccagaaatcgtctcggcctcacagtatcgtaagttcgatgaattccagacagggatccttatatacgagctcctgcatcaacccaacccttttgaggtccgagcccagcttagggagcgggattatagacaggaggatttgccccccctccccgccctgtccctgtactcacccggtctacagcagctcgctcaccttctactggaggcagatccgataaagaggatccgtatcggagaggccaaaagggtgcttcagtgtctcttgtggggaccacgacgtgaattagtacagcaacccggcacttccgaggaggccctgtgcggtaccctccacaactggatcgacatgaagcgagcgcttatgatgatgaagttcgctgagaaggcagtggacaggcgccgcggtgtcgaactagaagactggctctgttgtcaatacctcgcatcagcagaacctggcgcattgttgcagtcattgaaactgctgcaactgctctag

SEQ ID NO: 284025 - DNA, 4209 bp, Artificial Sequence
  derived and/or modified sequence
atgcatcagacactctgtctgaatcccgagtccctgaagatgtctgcatgttccgattttgtcgagcatatttggaagcccggttcatgtaagaattgtttctgtctgcgttctgatcatcaacttgtagcaggacccccacagccccgtgccggaagcctgcccccacctcccagactgccgccaaggcccgaaaattgtcgcttagaggatgagggagtcaactcttctccttactcaaagccaactatcgcggtcaaaccaacaatgatgagctcagaagctagcgatgtgtggacggaggctaatctgtctgctgaggtctcccaggttatctggcggcgtgccccaggcaagttaccacttccaaaacaggaagatgccccagtggtgtacctgggatcctttcggggagtgcagaagcctgccggacctagcacttctccggatggtaattctagatgtccgccagcttacacgatggtgggcctgcataacctcgagcccagaggagagaggaatatcgcttttcaccctgtaagcttccccgaggaaaaagctgttcataaggaaaagcccagcttcccctaccaggaccgcccatcaacacaggagtccttccggcaaaaattagcggcatttgctggaactaccagcggctgccaccagggtccgggtcccctgagagaaagcttaccatcagaggacgatagcgatcagcgatgctctccttcaggcgactccgaaggaggcgagtactgttcgatcctggattgctgtcccggatcccctgtggctaaagctgcttctcagaccgccggtagtcgtggtcgacacggaggcagggactgcagcccgacatgctgggaacagggcaagtgtagcggtcccgctgagcaggagaaacgcggaccctcttttcctaaggaatgctgctcccaagggccaaccgcacacccgtcctgtctggggcctaaaaagctgagcctgacttcagaagcagcaatctctagcgacgggctgtcatgcggatccggcagcggcagcggggctagttcaccatttgtgccccatctggagtctgactattgttcactaatgaaggaaccagcacccgagaaacagcaggatcccggatgtcctggcgtgacaccttcccggtgcttggggcttacaggagagccacagcctcccgctcacccccgagaggctactcaaccggaacctatctacgccgaaagtactaagaggaagaaagctgcaccagtgccctccaagtcccaggccaaaattgaacacgctgctgcagcacaagggcagggacaggtctgcacaggtaatgcctgggcccagaaagcagctagcggctggggcagggatagtcctgacccgaccccacaggtgagtgccactattaccgtcatggctgcccatcctgaagaggaccaccgcactatctacctgagtagtcccgatagtgcagtgggagtgcagtggccacggggacctgtgtctcagaattcggaggtcggagaggaagagacatcagcaggacaaggtttatctagccgcgagagccatgcacatagcgcgagcgagtctaaacctaaggagaggcctgcgatccccccaaagctgagtaaatcatctcccgtcggctcccccgtttcaccctcggccggagggcctcctgttagtcccttagccgacctgtcagacgggtcttcaggtgggtccagtataggccctcaaccaccgtcccagggaccagctgatccagctccatcatgtagaaccaatggcgtggctatctcagacccatcccggtgcccgcaacctgccgcttcttctgctagcgaacagcgcaggcccagatttcaggccggtacttggagtcgtcaatgtcggattgaagaagaggaggaagtcgagcaggaattactgagccatagttggggcagagagactaagaacgggcctacagatcactcgaattctactacgtggcacagactccatcccacagatggaagcagcggacaaaacagcaaggtcggaacggggatgagcaaaagtgcctcctttgctttcgaattcccaaaggatcgctcaggaatcgagacttttagcccccctccccctccacccaaaagccggcatctcttgaaaatgaataagtccagttctgacttagagaaggtgtcgcagggttctgccgagagcctcagccctagtttcagaggcgttcatgtcagcttcaccaccggctctactgattccttggctagcgattcgcgcacttgctcagacggaggaccgtcctctgaattggcacacagtccaaccaactctggcaagaagctgttcgcacccgttccttttccgagtgggtctaccgaggacgtgtccccctctggcccacagcagccccctccactcccacagaaaaaaattgttagtagagctgcatcctctccagatggttttttctggacgcaggggagtcctaagcccggtacagccagccctaagctgaaccttagccattctgagactaatgttcacgacgagtcacatttctcttactcactgtctcccggaaaccggcaccacccagttttcagctccagcgatcccctagagaaggccttcaaggggagcggacactggctacccgctgccggactagctgggaatagagggggttgtggtagccccggattgcaatgtaagggagccccatcggcctcatcaagccaactgagtgtttcatcccaggcatcaaccggaagcacacaactccagttacacggtttgctttcaaatatctccagtaaggaaggcacgtatgctaaactcggcggactatatacacagtcattggctaggttagtagcaaagtgcgaggatctgttcatggggggacagaaaaaggagttgcactttaacgagaataattggtctctatttaagctgacctgtaacaaaccttgctgcgacagcggtgatgccatttactattgtgctacatgtagtgaagaccccggatcaacatacgcggtcaagatttgcaaagcgcctgaacccaaaacggtgagttactgctctccatccgtccccgtgcatttcaatatccagcaagattgtggccattttgtagccagtgtaccgtcctctatgctctcctcaccagacgctccaaaagaccctgtcccagccctcccgacccaccctcctgcccaggaacaggactgtgtcgtcgttatcacgagggaggtcccccaccaaactgcaagcgactttgtcagggactcagccgcatctcaccaggctgagcccgaagcttatgagagaagggtttgttttttattgcttcaactgtgcaatggcctggagcacttgaaggaacatggcataatccatcgagacctgtgcctagagaacctactcctagtccattgtaccctacaggccggacccggacccgctcccgcaccagcgcctgctccagctgcagctgcgccaccatgttcatctgctgccccacccgctggagggaccctgagccctgccgcaggtcccgctagcccagagggaccccgagagaagcagctgcccagattaattatatctaatttcttaaaggccaagcaaaagccgggtggaacccctaatctccagcaaaagaagagccaggcgagactggcccctgaaatcgtgtctgcttcgcaataccgcaaatttgatgagtttcagacgggaatactcatctacgaattgcttcaccagccaaatcctttcgaagtccgcgcacagctcagggagcgggattatagacaggaagatctgcctccattgccggcactgtccctgtattccccagggctgcaacagctggcacatttgttgttagaggcagacccaattaagaggattcgcatcggagaggccaaaagagtactgcagtgcctgctgtgggggccacgaagggagctcgttcagcagcctggaacatccgaagaggccctatgcggtaccctgcacaattggatcgacatgaaaagagccctgatgatgatgaagttcgccgagaaagccgtggaccgacgcaggggggtggagcttgaggattggctctgctgtcagtatctcgcatctgctgagcctggcgcacttctccagagtctgaaactcctccagttgctctag

SEQ ID NO: 284026 - DNA, 4209 bp, Artificial Sequence
  derived and/or modified sequence
atgcatcagacactctgcctgaatcccgagagccttaaaatgtccgcttgtagcgactttgtagagcacatttggaagccaggaagctgcaaaaattgtttttgcttgcgctcagaccaccaactggtggctgggccaccccagccaagggccggatcccttccacccccacccagacttccaccaaggcccgagaactgtcggctggaggatgaaggtgtaaactcatccccttattcgaaaccaacaattgctgtaaagcccacaatgatgtcgtctgaggcttctgacgtgtggacagaggccaacttatcagctgaggtctctcaggtgatatggcggagggccccagggaaacttcctttgcccaaacaggaggatgcacctgtagtctacttggggagtttccggggagtgcagaagccagccggtccttcaacatctccagacgggaacagccggtgcccacctgcctatactatggtaggcctccacaacctagagcctcgtggagaaagaaatattgccttccacccagtcagtttccctgaggaaaaggccgtacataaggagaagccctcgtttccttatcaagaccgtccatccactcaagagtcgtttcggcagaagctagctgcattcgccggaactacaagcggatgtcatcaggggccaggaccactgagggaatccctaccttctgaagatgatagtgatcaaagatgtagcccctcaggggacagcgagggaggagagtactgttccatactggattgctgccccggtagccccgttgcaaaagctgcatcccaaaccgccggttcacgcggtcgacatggtgggagggactgcagcccaacctgctgggaacagggcaagtgctcagggccagctgaacaggagaaaaggggcccatcttttcccaaggagtgttgcagccagggacccacagcccacccctcctgcctgggcccaaagaagctgtccctgacttcagaggcagcaatttcctccgatggcctgtcttgcggttccggatccggctcaggcgcatcatctcccttcgttccccacctcgagagtgactattgttccctgatgaaagagcctgcccctgagaaacaacaggatcccggatgccccggagtaacaccctctcgttgcctgggtctgacgggagagccccagccccctgcacatcctcgcgaggcgacccagcctgaacccatttatgcagagtcaactaagcgcaagaaggctgccccagtcccttccaagtcacaggccaagatagagcatgcggcagcggcacagggacaaggacaagtttgtacagggaacgcctgggctcagaaagccgcaagtggctggggcagagactcacccgatccaaccccacaggtgagtgccacaatcaccgtgatggctgctcacccggaagaagaccacagaaccatctaccttagttctccagactctgcggtgggcgtgcagtggcctcgcggacctgtaagtcagaatagcgaagtgggagaggaagaaacgtcagccggacaaggcctgagcagtcgagaaagccacgcacacagcgcctctgagagcaaaccgaaagaacggcctgctatcccgccaaaactgagcaaatcttcacctgtgggatctcccgtatctccctctgcgggtgggcctcctgtgagtccactggcagatctgagcgatggtagcagcgggggatcctcgattggaccccaaccaccttcacagggcccagctgatccagctccatcgtgccgtactaacggagtggctatttccgaccccagccggtgcccccaacctgccgcttcttctgccagtgagcagcggcgacctcggttccaggccggtacatggagcaggcagtgtaggatagaggaagaagaagaggtcgaacaagagctcctcagccactcttggggcagggagaccaagaatgggcctaccgaccactcaaactccaccacatggcaccggctccaccccactgatggaagcagcggccagaacagcaaggtagggacaggtatgtcaaaaagtgcatctttcgccttcgaattcccgaaggacaggagcgggattgagactttcagcccccctccacctccaccaaagagcaggcatctgttgaaaatgaacaagagctcgtccgatctagagaaagttagccagggctccgcagagagccttagtccctcctttcggggtgtgcatgtgtcttttactactggctctacagattctctggcttccgactcgagaacatgttcggacggagggccatcctctgaattggcacactccccaactaactccgggaagaaattgttcgccccagtgccattcccttcgggttccactgaagacgtcagccctagcgggccacagcagccaccacctcttccacagaagaaaatagtgtccagagccgcaagttccccagatggtttcttttggactcagggtagccccaagcctggcacggcttcccctaagctcaacctgtcgcactccgagacaaatgttcatgacgaatcccacttcagttattccctgagcccgggaaatagacatcacccggtattttcctcatcagaccctctggaaaaagcgttcaaggggagtgggcactggctgcctgccgcagggctcgcaggtaacagaggcggttgtgggagccctggactgcagtgcaagggtgctccgagcgccagctctagtcaactttctgtgagctcgcaagctagcaccggctccactcagctccagttgcatggtttgctgtcaaacatctcttcaaaggaaggaacctatgccaaactgggaggactttatacccagtcccttgcccgtctagtggcaaagtgtgaagatttgttcatgggaggacagaaaaaggaactgcacttcaatgaaaataactggtcattattcaagctgacttgtaataaaccctgttgcgactccggcgacgctatatactactgcgccacgtgcagtgaggatccaggttccacctacgcggtcaaaatttgcaaggcaccagagcccaaaaccgtatcctattgctccccttcggtgcccgtgcatttcaacattcagcaggattgtggccacttcgtcgcctctgtaccatcatcgatgcttagctctcccgatgctccaaaagatccagttcctgcgcttccaactcacccgcctgctcaggagcaggactgtgtggtcgtgatcactagggaggtgcctcatcagacagccagcgacttcgtgcgggactccgctgcctctcatcaggctgaacccgaagcatatgagagacgagtgtgtttcctgctcctgcaactgtgcaacggcctggagcatctcaaggagcacggcattatccacagggacctgtgtctcgaaaacctgctccttgtgcattgcacactccaagccggaccaggccctgccccagccccagccccagcaccggctgccgctgcccctccttgcagtagtgctgctccccctgctggaggcaccttaagtccagctgctggaccagcgtctcctgaaggaccgagagaaaagcagctgcctaggttaatcatctccaatttcttgaaagctaagcaaaagcccggtggcacccctaatctgcagcaaaaaaaaagccaggctcgattggccccagagatcgtgagcgcaagtcagtatcggaaatttgacgaattccagaccgggatcctgatttatgaactcctgcaccaaccgaacccattcgaagtgagggcccagctgcgtgagagggattaccgacaggaggaccttcctcccctgcctgcgctttccctctactctccaggcctgcagcagctggcccacctactcctggaggctgacccaatcaagcgaatcaggatcggagaagctaagcgcgtactacaatgccttctgtggggcccacggagagagctcgtacagcagcccggaacaagtgaggaagctttgtgtggcactctccataattggatagacatgaagcgagcactgatgatgatgaaatttgccgagaaagctgttgatcgccgtcgtggcgtcgagctggaggattggttgtgctgtcaatatctggcctctgcagaaccaggagcgcttctgcagagtctgaaactacttcagctcctgtag

SEQ ID NO: 284027 - DNA, 4627 bp, Artificial Sequence
  derived and/or modified sequence
atgcaccagaccctctgcctgaaccccgagagcctgaaaatgtctgcgtgcagtgactttgtggagcacatctggaaacccgggtcctgcaagaactgcttctgcctgcggagcgaccaccagctggtggccggccctccccagcccagagcgggcagcctgccccctccaccgcgcctgcctcccaggcctgagaactgccgcctggaagatgaaggtgtgaacagctcaccttactccaagcccacaattgccgtgaagcccaccatgatgagctccgaggcctctgatgtgtggacagaggccaacctgagtgccgaagtctcgcaggtcatctggagacgagcccctggcaagctccccctcccgaagcaggaggatgcccccgtcgtctacctgggcagcttccgaggtgtacagaagcctgctggtccctctacctcccctgatggcaattctcgctgtcccccagcttacaccatggtcggcctgcacaaccttgagccccgcggcgagaggaacattgccttccacccggtgagcttcccggaggagaaggctgtgcacaaagaaaaaccctcatttccttaccaagaccggccctccacccaggagagcttccgccagaaactggctgcctttgctgggaccacatctggctgtcaccagggccctgggcccctgcgggaatccctgccctcggaggatgacagtgatcaaaggtgctcgccctccggggacagcgagggtggagagtactgctccatcctggactgctgccctgggagccctgttgccaaggctgcctcccagactgcaggttcccggggcaggcatggtggcagggactgctcacccacgtgctgggagcaggggaagtgttccgggcccgcagagcaggagaagcggggcccgagcttccccaaggagtgctgtagccagggccccactgcccacccatcctgcctgggccccaagaaactgtccctcacctcggaggctgccatttcttccgacggcctctcttgtggcagcggcagcggcagcggcgccagtagccccttcgtcccccacctcgagagtgattactgctccctcatgaaggaacctgccccagagaagcagcaggaccctggctgcccaggggtgacccctagcagatgccttgggctgacgggggagccccagcccccggcccacccccgggaggctacacagcctgaacccatctatgctgagagcaccaagaggaagaaggcagctccggtgccttccaagtcacaggccaagatagaacatgcagctgctgcccagggccaaggccaggtatgcacaggtaatgcctgggcccagaaagcagcatctggctggggccgggacagcccagacccaactccccaggtgtcagccaccatcacagtcatggcggcccacccggaagaggaccatcggacgatctacctgagcagccctgactctgcagtgggggtgcagtggccacgagggcctgtgagccagaactccgaggtaggtgaagaggagacttcggctgggcaggggctgagctccagggaaagccatgctcacagtgccagcgagagcaagcccaaggagaggcccgccattccccccaagttgtccaagagtagccctgtagggtccccggtgtcaccgtctgctggagggcccccagtgtcaccgctggctgaccttagtgatgggagctctggcggcagcagcattgggccccagcctccatcccaaggtcctgctgaccccgctccttcctgccggaccaacggtgtcgctatcagtgacccatccaggtgtccccagcctgccgcctcgtcagcctcggaacagaggcggcccaggttccaggcaggcacctggagtcgtcagtgccggatagaggaagaagaggaggtggagcaggaattgctgagtcacagctggggaagagagaccaaaaatggccccacggaccattcaaactccacgacctggcaccgtctccaccccacagatggctcctctgggcagaacagcaaagttgggaccgggatgagcaaatccgcctcttttgcctttgagttccccaaggacagaagtgggattgagacattctcacctcctcctccgcctccaaagtcgcggcaccttctaaaaatgaacaagagcagctctgatttggaaaaagtgagccagggctctgcagaaagcctcagcccatccttcaggggtgtccacgtcagcttcaccaccggctccacggacagcctggcctcagactctaggacctgcagcgatggaggtccctcgtctgagctggctcactcgcccaccaacagcgggaagaagctctttgctcccgttccgtttccttcaggctccactgaggacgtgtcccccagtggcccccagcagccccctccactcccccagaaaaagatagtgagccgggcagcctcttcaccggatggcttcttctggacccaaggctcccccaagcccggaacagcaagccccaagctgaacctaagccactcggaaaccaacgtccacgacgaatctcactttagctattcgttgagccccgggaaccgccaccatcctgtcttctcctcttccgatcctctggagaaagctttcaaaggcagtggccactggcttccggcagcagggctggcgggcaacagaggcggctgcgggagccctggcctccagtgcaaaggggccccctccgcctcatcctcccagctgagcgtgtccagtcaagcctccaccgggagcacccagcttcagctgcacggtctcctgagcaacatcagcagcaaggagggcacctatgccaagctggggggactctacacccagtccctggcccgccttgtagccaaatgtgaggacctcttcatgggcggccagaaaaaggagctccacttcaatgagaataactggtcgctcttcaagctgacttgtaacaagccctgctgtgactcgggggatgccatttattactgtgccacctgctctgaggaccccggcagcacctatgctgtgaaaatctgcaaagcccctgagcccaaaacagtctcctactgcagcccgtccgtgcccgtgcactttaacatccagcaggactgcggccacttcgtcgcctcggtgccgtccagcatgctcagctcccccgacgcgcccaaggaccctgtgcctgccctgcccacacacccccctgcccaggagcaggactgcgtggtggtcatcacccgagaggtgccacatcagaccgcctccgacttcgtgcgggactcggcggccagccaccaggcggagcccgaggcgtacgagcggcgcgtgtgcttcctgcttctgcaactctgcaacgggctggagcacctgaaggagcacgggatcatccaccgggacctgtgcctggagaacctgctgctggtgcactgcaccctccaggccggccccgggcccgcccccgccccggctcccgcccccgccgccgccgcgcctccctgctcctctgccgccccgcctgctggtggcactctcagccccgcagccggccccgcctccccggaagggccccgggagaagcagctgccccggctcatcatcagcaactttttgaaggccaagcagaagccgggcggcaccccaaacctgcagcagaagaagagccaggcccggctggcccccgagatcgtgtctgcttcccagtaccgcaagttcgatgagttccagacaggcatcctcatctacgagctgctgcaccaacccaacccgttcgaggtgcgcgcccagctgcgggagagagactaccggcaggaggacctgccgccgctgcccgcgctgtccctctactcacccggcctgcagcagctggcacatctgctactggaggccgaccccatcaagcgtatccgcatcggcgaggccaagcgcgtgctgcagtgcctgctgtgggggcctcggcgcgagctggtgcagcagccgggcacctcggaggaggcgctgtgcggcacgctgcacaactggatcgacatgaagcgggccctgatgatgatgaagtttgcggagaaggcggtggatcgcaggcggggcgtggagctggaggactggctttgctgccagtacctggcgtctgcggagcccggggccctcttacagtcgctgaagctcctgcagcttctgtgagccaagccccagcctgcaccgtcgctgccccttccctgcctaaccctttcctgtctcgccttggaagcacccatgtctccctgggaaatggtacagatgactgggatacctggatgtaaaatatataaatatatatatagaaaatacatataccatatataaatatgaaagactaaggatgctgttgcccgtccacactcgtctcctctctgcactaagtcctccctgttttcttctgtaattatacacatttccagttccatgcaacgtcctgaggacagttctgtgaactgaatgcagcctggacactggcctcaataccttgtttaggatttcttcacccttttgtcaaattgttatttaaagaaaaaaaaaaaagaagaaaattccattaaaattttttttggttgagtcatga

SEQ ID NO: 284028 - DNA, 4891 bp, Artificial Sequence
  derived and/or modified sequence
ccggaggcggagggggcggagccgcgctcacagctgccacccggccgccgggcccaggcagaagccacccgcccgcggccgggcacgcaccgcgcgcagaccttctgcgaacaatgctccggccgggcggctggcggctcggagaccgacggaggggccgggggagcgcagcccagaggaagccgctctgtgacccacctctgaatcccacaaaactgcaccagagagccgggcgcaagatgaaccagcaccctgtcggctcaagatgcaccagaccctctgcctgaaccccgagagcctgaaaatgtctgcgtgcagtgactttgtggagcacatctggaaacccgggtcctgcaagaactgcttctgcctgcggagcgaccaccagctggtggccggccctccccagcccagagcgggcagcctgccccctccaccgcgcctgcctcccaggcctgagaactgccgcctggaagatgaaggtgtgaacagctcaccttactccaagcccacaattgccgtgaagcccaccatgatgagctccgaggcctctgatgtgtggacagaggccaacctgagtgccgaagtctcgcaggtcatctggagacgagcccctggcaagctccccctcccgaagcaggaggatgcccccgtcgtctacctgggcagcttccgaggtgtacagaagcctgctggtccctctacctcccctgatggcaattctcgctgtcccccagcttacaccatggtcggcctgcacaaccttgagccccgcggcgagaggaacattgccttccacccggtgagcttcccggaggagaaggctgtgcacaaagaaaaaccctcatttccttaccaagaccggccctccacccaggagagcttccgccagaaactggctgcctttgctgggaccacatctggctgtcaccagggccctgggcccctgcgggaatccctgccctcggaggatgacagtgatcaaaggtgctcgccctccggggacagcgagggtggagagtactgctccatcctggactgctgccctgggagccctgttgccaaggctgcctcccagactgcaggttcccggggcaggcatggtggcagggactgctcacccacgtgctgggagcaggggaagtgttccgggcccgcagagcaggagaagcggggcccgagcttccccaaggagtgctgtagccagggccccactgcccacccatcctgcctgggccccaagaaactgtccctcacctcggaggctgccatttcttccgacggcctctcttgtggcagcggcagcggcagcggcgccagtagccccttcgtcccccacctcgagagtgattactgctccctcatgaaggaacctgccccagagaagcagcaggaccctggctgcccaggggtgacccctagcagatgccttgggctgacgggggagccccagcccccggcccacccccgggaggctacacagcctgaacccatctatgctgagagcaccaagaggaagaaggcagctccggtgccttccaagtcacaggccaagatagaacatgcagctgctgcccagggccaaggccaggtatgcacaggtaatgcctgggcccagaaagcagcatctggctggggccgggacagcccagacccaactccccaggtgtcagccaccatcacagtcatggcggcccacccggaagaggaccatcggacgatctacctgagcagccctgactctgcagtgggggtgcagtggccacgagggcctgtgagccagaactccgaggtaggtgaagaggagacttcggctgggcaggggctgagctccagggaaagccatgctcacagtgccagcgagagcaagcccaaggagaggcccgccattccccccaagttgtccaagagtagccctgtagggtccccggtgtcaccgtctgctggagggcccccagtgtcaccgctggctgaccttagtgatgggagctctggcggcagcagcattgggccccagcctccatcccaaggtcctgctgaccccgctccttcctgccggaccaacggtgtcgctatcagtgacccatccaggtgtccccagcctgccgcctcgtcagcctcggaacagaggcggcccaggttccaggcaggcacctggagtcgtcagtgccggatagaggaagaagaggaggtggagcaggaattgctgagtcacagctggggaagagagaccaaaaatggccccacggaccattcaaactccacgacctggcaccgtctccaccccacagatggctcctctgggcagaacagcaaagttgggaccgggatgagcaaatccgcctcttttgcctttgagttccccaaggacagaagtgggattgagacattctcacctcctcctccgcctccaaagtcgcggcaccttctaaaaatgaacaagagcagctctgatttggaaaaagtgagccagggctctgcagaaagcctcagcccatccttcaggggtgtccacgtcagcttcaccaccggctccacggacagcctggcctcagactctaggacctgcagcgatggaggtccctcgtctgagctggctcactcgcccaccaacagcgggaagaagctctttgctcccgttccgtttccttcaggctccactgaggacgtgtcccccagtggcccccagcagccccctccactcccccagaaaaagatagtgagccgggcagcctcttcaccggatggcttcttctggacccaaggctcccccaagcccggaacagcaagccccaagctgaacctaagccactcggaaaccaacgtccacgacgaatctcactttagctattcgttgagccccgggaaccgccaccatcctgtcttctcctcttccgatcctctggagaaagctttcaaaggcagtggccactggcttccggcagcagggctggcgggcaacagaggcggctgcgggagccctggcctccagtgcaaaggggccccctccgcctcatcctcccagctgagcgtgtccagtcaagcctccaccgggagcacccagcttcagctgcacggtctcctgagcaacatcagcagcaaggagggcacctatgccaagctggggggactctacacccagtccctggcccgccttgtagccaaatgtgaggacctcttcatgggcggccagaaaaaggagctccacttcaatgagaataactggtcgctcttcaagctgacttgtaacaagccctgctgtgactcgggggatgccatttattactgtgccacctgctctgaggaccccggcagcacctatgctgtgaaaatctgcaaagcccctgagcccaaaacagtctcctactgcagcccgtccgtgcccgtgcactttaacatccagcaggactgcggccacttcgtcgcctcggtgccgtccagcatgctcagctcccccgacgcgcccaaggaccctgtgcctgccctgcccacacacccccctgcccaggagcaggactgcgtggtggtcatcacccgagaggtgccacatcagaccgcctccgacttcgtgcgggactcggcggccagccaccaggcggagcccgaggcgtacgagcggcgcgtgtgcttcctgcttctgcaactctgcaacgggctggagcacctgaaggagcacgggatcatccaccgggacctgtgcctggagaacctgctgctggtgcactgcaccctccaggccggccccgggcccgcccccgccccggctcccgcccccgccgccgccgcgcctccctgctcctctgccgccccgcctgctggtggcactctcagccccgcagccggccccgcctccccggaagggccccgggagaagcagctgccccggctcatcatcagcaactttttgaaggccaagcagaagccgggcggcaccccaaacctgcagcagaagaagagccaggcccggctggcccccgagatcgtgtctgcttcccagtaccgcaagttcgatgagttccagacaggcatcctcatctacgagctgctgcaccaacccaacccgttcgaggtgcgcgcccagctgcgggagagagactaccggcaggaggacctgccgccgctgcccgcgctgtccctctactcacccggcctgcagcagctggcacatctgctactggaggccgaccccatcaagcgtatccgcatcggcgaggccaagcgcgtgctgcagtgcctgctgtgggggcctcggcgcgagctggtgcagcagccgggcacctcggaggaggcgctgtgcggcacgctgcacaactggatcgacatgaagcgggccctgatgatgatgaagtttgcggagaaggcggtggatcgcaggcggggcgtggagctggaggactggctttgctgccagtacctggcgtctgcggagcccggggccctcttacagtcgctgaagctcctgcagcttctgtgagccaagccccagcctgcaccgtcgctgccccttccctgcctaaccctttcctgtctcgccttggaagcacccatgtctccctgggaaatggtacagatgactgggatacctggatgtaaaatatataaatatatatatagaaaatacatataccatatataaatatgaaagactaaggatgctgttgcccgtccacactcgtctcctctctgcactaagtcctccctgttttcttctgtaattatacacatttccagttccatgcaacgtcctgaggacagttctgtgaactgaatgcagcctggacactggcctcaataccttgtttaggatttcttcacccttttgtcaaattgttatttaaagaaaaaaaaaaaagaagaaaattccattaaaattttttttggttgagtcatg

SEQ ID NO: 284029 - protein, 62 aa, Artificial Sequence
  derived and/or modified sequence
GDVPLGIRNTICRMQQGICRLFFCHSGEKKRDICSDPWNRCCVSNTDEEGKEKPEMDGRSGI

SEQ ID NO: 284030 - protein, 35 aa, Artificial Sequence
  derived and/or modified sequence
RDVICLMQHGTCRLFFCHSGEKKSEICSDPWNRCC

SEQ ID NO: 284031 - protein, 36 aa, Artificial Sequence
  derived and/or modified sequence
RNIICLMQHGTCRLFFCRSGEKKSEICSDPWNRCCI

SEQ ID NO: 284032 - DNA, 655 bp, Artificial Sequence
  derived and/or modified sequence
tccacattgtcctttgagaatgagaagtcatcctggagcacagctcttcccacgctccgggcccacacacccagcctcactccatcaaaggagccccgctgcctgcccacccaccctgggtgctttctggcttgcagtgctcttggcagacatgaggcaacgattgctcccgtccgtcaccagccttctccttgtggccctgctgtttccaggatcgtctcaagccagacatgtgaaccactcagccactgaggctctcggagaactcagggaaagagcccctgggcaaggcacaaacgggtttcagctgctacgccacgcagtgaaacgggacctcttaccaccgcgcaccccaccttaccaaggggatgttccaccgggaattagaaataccatctgccatatgcagcaagggatctgcagactttttttctgccattctggtgagaaaaagcgtgacatttgctctgatccctggaataggtgttgcgtatcaaatacagatgaagaaggaaaagagaaaccagagatggatggcagatctgggatctaaaatataagctcccggaaggcagggatgttgaagtatcccaagggcttaaaggaatgtgtggcttatagtaggtgttcaataaatatttgttgaatgaattta

SEQ ID NO: 284033 - protein, 32 aa, Artificial Sequence
  derived and/or modified sequence
VDCRRSEGFCQEYCNYMETQVGYCSKKKDACC

SEQ ID NO: 284034 - protein, 34 aa, Artificial Sequence
  derived and/or modified sequence
QIVNCKKNEGFCQKYCNFMETQVGYCSKKKEACC

SEQ ID NO: 284035 - protein, 34 aa, Artificial Sequence
  derived and/or modified sequence
RIVDCKRSEGFCQEYCNYLETQVGYCSKKKDACC

SEQ ID NO: 284036 - protein, 53 aa, Artificial Sequence
  derived and/or modified sequence
APIIRRIPYYPEVESDLRIVDCKRSEGFCQEYCNYLETQVGYCSKKKDACCLH

SEQ ID NO: 284037 - protein, 113 aa, Artificial Sequence
  derived and/or modified sequence
MRQRLLPSVTSLLLVALLFPGSSQARHVNHSATEALGELRERAPGQGTNGFQLLRHAVKRDLLPPRTPPYQEPASDLKVVDCRRSEGFCQEYCNYMETQVGYCSKKKDACCLH

SEQ ID NO: 284038 - DNA, 806 bp, Artificial Sequence
  derived and/or modified sequence
agcagtgggatagtagcgtgtccacattgtcctttgagaatgagaagtcatcctggagcacagctcttcccacgctccgggcccacacacccagcctcactccatcaaaggagccccgctgcctgcccacccaccctgggtgctttctggcttgcagtgctcttggcagacatgaggcaacgattgctcccgtccgtcaccagccttctccttgtggccctgctgtttccaggatcgtctcaagccagacatgtgaaccactcagccactgaggctctcggagaactcagggaaagagcccctgggcaaggcacaaacgggtttcagctgctacgccacgcagtgaaacgggacctcttaccaccgcgcaccccaccttaccaagaacctgcatcagatttaaaagttgttgactgcaggagaagtgaaggcttctgccaagaatactgtaattatatggaaacacaagtaggctactgctctaaaaagaaagacgcctgctgtttacattaaaactgatgttgctgatatagaaacaaagctctgccacttacctgttctccggggccacgttgtccaatcaggtgcaggttttttgcggaagtgtctgagcagcagggagcggagatattgccacttgtgccagacagttcaaatattttattgtggcaagataaatgacaaaaatgctacctgtgatcttacagaagatgacttagcttgacatgaacagaattttcaaaatcacacaatttgtgctagtaaatgtggatatcataaacttttattagaaagaattaaaataa

SEQ ID NO: 284039 - protein, 43 aa, Artificial Sequence
  derived and/or modified sequence
DLLPPRTPPYQVHISHQEARGPSFKICVGFLGPRWARGCSTGN

SEQ ID NO: 284040 - protein, 32 aa, Artificial Sequence
  derived and/or modified sequence
VHISHQEARGPSFKICVGFLGPRWARGCSTGN

SEQ ID NO: 284041 - protein, 103 aa, Artificial Sequence
  derived and/or modified sequence
MRQRLLPSVTSLLLVALLFPGSSQARHVNHSATEALGELRERAPGQGTNGFQLLRHAVKRDLLPPRTPPYQVHISHQEARGPSFKICVGFLGPRWARGCSTGN

SEQ ID NO: 284042 - DNA, 312 bp, Artificial Sequence
  derived and/or modified sequence
atgaggcagcgtctcttgcctagcgtgacgtcacttcttttggtagcccttctcttccctggcagttcacaggcacgccatgtcaatcatagtgcaactgaggccctgggcgagctgagggagagagcgcctggccaaggcaccaacggatttcagctgttgcgccatgcggtgaagagagatctccttcccccaagaacccccccataccaggtgcatatcagccatcaggaggcacgcggacccagcttcaagatctgcgtcggattccttgggccacgctgggccaggggatgctcgaccggcaactag

SEQ ID NO: 284043 - DNA, 777 bp, Artificial Sequence
  derived and/or modified sequence
gtgggatagtagcgtgtccacattgtcctttgagaatgagaagtcatcctggagcacagctcttcccacgctccgggcccacacacccagcctcactccatcaaaggagccccgctgcctgcccacccaccctgggtgctttctggcttgcagtgctcttggcagacatgaggcaacgattgctcccgtccgtcaccagccttctccttgtggccctgctgtttccaggatcgtctcaagccagacatgtgaaccactcagccactgaggctctcggagaactcagggaaagagcccctgggcaaggcacaaacgggtttcagctgctacgccacgcagtgaaacgggacctcttaccaccgcgcaccccaccttaccaagtgcacatctctcaccaggaggctcgaggaccctcatttaagatctgcgtgggctttttagggcctagatgggccaggggatgttccactgggaattagaaataccatctgccgtatgcagcaagggatctgcagactttttttctgccattctggtgagaaaaagcgtgacattagctctgatccctggaataggtgttgcgtatcaaatacagatgaagaaggaaaagagaaaccagagatggatggcagatctgggatctaaaatataagctcccggaaggcagggatgttgaagtatcccaagggcttaaaggaatgtgtggcttatagtaggtgttcaataaatatttgttgaatgaatttagcaccaaaggtgaagagctgataaaagaca

SEQ ID NO: 284044 - DNA, 312 bp, Artificial Sequence
  derived and/or modified sequence
atgagacaacgcctgctgcctagcgtcaccagtctcttacttgtggcgctgctgttcccaggttcatctcaggcaaggcacgttaaccactccgcaaccgaagccctgggagagctgagagagagagcacctgggcaagggaccaacggatttcagctccttagacacgctgtgaaacgtgatcttctccctccgagaacacctccttaccaagttcacataagccaccaggaagccaggggaccttcttttaagatttgcgttggattcctaggacctagatgggcgaggggctgctctaccggtaattag

SEQ ID NO: 284045 - DNA, 312 bp, Artificial Sequence
  derived and/or modified sequence
atgagacaacgcctgctgcctagcgtcaccagtctcttacttgtggcgctgctgttcccaggttcatctcaggcaaggcacgttaaccactccgcaaccgaagccctgggagagctgagagagagagcacctgggcaagggaccaacggatttcagctccttagacacgctgtgaaacgtgatcttctccctccgagaacacctccttaccaagttcacataagccaccaggaagccaggggaccttcttttaagatttgcgttggattcctaggacctagatgggcgaggggctgctctacaggtaattag

SEQ ID NO: 284046 - DNA, 795 bp, Artificial Sequence
  derived and/or modified sequence
gtgggatagtagcgtgtccacattgtcctttgagaatgagaagtcatcctggagcacagctcttcccacgctccgggcccacacacccagcctcactccatcaaaggagccccgctgcctgcccacccaccctgggtgctttctggcttgcagtgctcttggcagacatgaggcaacgattgctcccgtccgtcaccagccttctccttgtggccctgctgtttccaggatcgtctcaagccagacatgtgaaccactcagccactgaggctctcggagaactcagggaaagagcccctgggcaaggcacaaacgggtttcagctgctacgccacgcagtgaaacgggacctcttaccaccgcgcaccccaccttaccaagtgcacatctctcaccgggaggctcgaggaccctcatttaggatctgtgtggactttttagggcctagatgggccaggggatgttccaccgggaattagaaataccatctgccatatgcagcaagggatctgcagactttttttctgccattctggtgagaaaaagcgtgacatttgctctgatccctggaataggtgttgcgtatcaaatacagatgaagaaggaaaagagaaaccagagatggatggcagatctgggatctaaaatataagctcccggaaggcagggatgttgaagtatcccaagggcttaaaggaatgtgtggcttatagtaggtgttcaataaatatttgttgaatgaatttagcaccaaaggtgaagagctgataaaagacatttttttaacttccttac

SEQ ID NO: 284047 - DNA, 312 bp, Artificial Sequence
  derived and/or modified sequence
atgagacagagactgctgcccagcgtgaccagcctgctgctggtggccctgctgttccccggcagcagccaggccagacacgtgaaccacagcgccaccgaggccctgggcgagctgagagagagagcccccggccagggcaccaacggcttccagctgctgagacacgccgtgaagagagacctgctgccccccagaacccccccctaccaggtgcacatcagccaccaggaggccagaggccccagcttcaagatctgcgtgggcttcctgggccccagatgggccagaggctgcagcaccggcaactag

SEQ ID NO: 284048 - DNA, 312 bp, Artificial Sequence
  derived and/or modified sequence
atgcggcagcggttgctcccatcagtgaccagtctgttgctggtcgcgctgctctttcctggcagcagccaggccagacacgtcaaccactccgccaccgaagccctgggcgaactgagagagagggccccaggacaggggacgaatggctttcagctcctaaggcacgctgtaaagcgcgatctgctgcctcctcgtacacccccataccaggttcacatcagtcaccaggaggctagaggcccttccttcaaaatttgtgttgggtttctagggccgcggtgggctaggggttgttcaaccggcaactag

SEQ ID NO: 284049 - DNA, 312 bp, Artificial Sequence
  derived and/or modified sequence
atgaggcagaggctgctgcccagcgtgaccagcctgctgctggtggccctgctcttccctggcagcagccaggcccggcacgtgaaccacagcgccacagaggccctgggggagctgcgggagcgggcccctggccagggcaccaacggcttccagctgctgcggcatgctgtgaagagggacctgctgccccccaggaccccaccctaccaggtgcacatcagccaccaggaggcccggggccccagcttcaagatctgtgtgggcttcctgggcccccgctgggcccggggctgcagcactggaaattag

SEQ ID NO: 284050 - DNA, 312 bp, Artificial Sequence
  derived and/or modified sequence
atgcggcagcggctgctgcccagcgtgaccagcctgctgctggtggcactgctgttcccaggcagcagccaagccagacatgtcaaccacagcgccacagaggccttgggcgaattgcgcgagagagcccccggacagggtactaatggattccagctgctgaggcacgctgtgaaaagagacctgctgcccccaagaacgcctccttatcaggtccacatctcacatcaggaagcccgagggccctcttttaaaatctgtgttggtttcctgggcccccggtgggccagagggtgttctacaggcaactag

SEQ ID NO: 284051 - RNA, 312 nt, Artificial Sequence
  derived and/or modified sequence
augagacaacgccugcugccuagcgucaccagucucuuacuuguggcgcugcuguucccagguucaucucaggcaaggcacguuaaccacuccgcaaccgaagcccugggagagcugagagagagagcaccugggcaagggaccaacggauuucagcuccuuagacacgcugugaaacgugaucuucucccuccgagaacaccuccuuaccaaguucacauaagccaccaggaagccaggggaccuucuuuuaagauuugcguuggauuccuaggaccuagaugggcgaggggcugcucuaccgguaauuag

SEQ ID NO: 284052 - RNA, 312 nt, Artificial Sequence
  derived and/or modified sequence
augagacaacgccugcugccuagcgucaccagucucuuacuuguggcgcugcuguucccagguucaucucaggcaaggcacguuaaccacuccgcaaccgaagcccugggagagcugagagagagagcaccugggcaagggaccaacggauuucagcuccuuagacacgcugugaaacgugaucuucucccuccgagaacaccuccuuaccaaguucacauaagccaccaggaagccaggggaccuucuuuuaagauuugcguuggauuccuaggaccuagaugggcgaggggcugcucuacagguaauuag

SEQ ID NO: 284053 - protein, 615 aa, Artificial Sequence
  derived and/or modified sequence
NGSHLKTWLKKKGCAVVEFKMEESMKKAAEVLNKHSLSGRPLKVKEDPDGEHARRAMQKVMATTGGMGMGPGGPGMITIPPSILNNPNIPNEIIHALQAGRLGSTVFVANLDYKVGWKKLKEVFSMAGVVVRADILEDKDGKSRGIGTVTFEQSIEAVQAISMFNGQLLFDRPMHVKMDERALPKGDFFPPERPQQLPHGLGGIGMGLGPGGQPIDANHLNKGIGMGNIGPAGMEGPFGGGMENMGRFGSGMNMGRINEILSNALKRGEIIAKQGGGGGGGSVPGIERMGPGIDRLGGAGMERMGAGLGHGMDRVGSEIERMGLVMDRMGSVERMGSGIERMGPLGLDHMASSIERMGQTMERIGSGVERMGAGMGFGLERMAAPIDRVGQTIERMGSGVERMGPAIERMGLSMERMVPAGMGAGLERMGPVMDRMATGLERMGANNLERMGLERMGANSLERMGLERMGANSLERMGPAMGPALGAGIERMGLAMGGGGGASFDRAIEMERGNFGGSFAGSFGGAGGHAPGVARKACQIFVRNLPFDFTWKMLKDKFNECGHVLYADIKMENGKSKGCGVVKFESPEVAERACRMMNGMKLSGREIDVRIDRNA

SEQ ID NO: 284054 - DNA, 1848 bp, Artificial Sequence
  derived and/or modified sequence
aacggcagccacctgaagacctggctgaagaagaagggctgcgccgtggtggagttcaagatggaggagagcatgaagaaggccgccgaggtgctgaacaagcacagcctgagcggcagacccctgaaggtgaaggaggaccccgacggcgagcacgccagaagagccatgcagaaggtgatggccaccaccggcggcatgggcatgggccccggcggccccggcatgatcaccatcccccccagcatcctgaacaaccccaacatccccaacgagatcatccacgccctgcaggccggcagactgggcagcaccgtgttcgtggccaacctggactacaaggtgggctggaagaagctgaaggaggtgttcagcatggccggcgtggtggtgagagccgacatcctggaggacaaggacggcaagagcagaggcatcggcaccgtgaccttcgagcagagcatcgaggccgtgcaggccatcagcatgttcaacggccagctgctgttcgacagacccatgcacgtgaagatggacgagagagccctgcccaagggcgacttcttcccccccgagagaccccagcagctgccccacggcctgggcggcatcggcatgggcctgggccccggcggccagcccatcgacgccaaccacctgaacaagggcatcggcatgggcaacatcggccccgccggcatggagggccccttcggcggcggcatggagaacatgggcagattcggcagcggcatgaacatgggcagaatcaacgagatcctgagcaacgccctgaagagaggcgagatcatcgccaagcagggcggcggcggcggcggcggcagcgtgcccggcatcgagagaatgggccccggcatcgacagactgggcggcgccggcatggagagaatgggcgccggcctgggccacggcatggacagagtgggcagcgagatcgagagaatgggcctggtgatggacagaatgggcagcgtggagagaatgggcagcggcatcgagagaatgggccccctgggcctggaccacatggccagcagcatcgagagaatgggccagaccatggagagaatcggcagcggcgtggagagaatgggcgccggcatgggcttcggcctggagagaatggccgcccccatcgacagagtgggccagaccatcgagagaatgggcagcggcgtggagagaatgggccccgccatcgagagaatgggcctgagcatggagagaatggtgcccgccggcatgggcgccggcctggagagaatgggccccgtgatggacagaatggccaccggcctggagagaatgggcgccaacaacctggagagaatgggcctggagagaatgggcgccaacagcctggagagaatgggcctggagagaatgggcgccaacagcctggagagaatgggccccgccatgggccccgccctgggcgccggcatcgagagaatgggcctggccatgggcggcggcggcggcgccagcttcgacagagccatcgagatggagagaggcaacttcggcggcagcttcgccggcagcttcggcggcgccggcggccacgcccccggcgtggccagaaaggcctgccagatcttcgtgagaaacctgcccttcgacttcacctggaagatgctgaaggacaagttcaacgagtgcggccacgtgctgtacgccgacatcaagatggagaacggcaagagcaagggctgcggcgtggtgaagttcgagagccccgaggtggccgagagagcctgcagaatgatgaacggcatgaagctgagcggcagagagatcgacgtgagaatcgacagaaacgcctag

SEQ ID NO: 284055 - DNA, 1848 bp, Artificial Sequence
  derived and/or modified sequence
aatggctctcacctaaagacctggctcaaaaaaaaaggatgcgctgtagtcgagttcaagatggaggagtctatgaaaaaggctgccgaggtgttgaacaagcacagtctatccggtcggcccctgaaggtgaaggaggacccagatggtgagcacgcgagaagagccatgcagaaggtcatggccacaacaggaggaatggggatggggcccggagggcctgggatgatcactataccacccagtatactgaacaaccccaatatccctaacgaaatcatccacgccctgcaggccggacgtctaggttccaccgtcttcgtggcgaatctggactacaaagtcggctggaagaagttgaaagaagtcttcagcatggccggtgtagttgttcgggccgacatcttggaagacaaagatggaaaatctcgtggcataggcaccgtaacttttgaacagtccattgaagcagtgcaagccatttccatgtttaatggccagctactgttcgatagaccaatgcacgttaagatggacgagagggcgctgccgaaaggagacttttttccacccgagagaccccagcagctgccccacggcttaggaggtatcggcatgggcctgggaccaggcggtcagccaattgatgcaaatcacctaaataaaggaattggtatgggcaacattggacctgccggcatggagggcccctttggcggcggcatggagaacatgggccgcttcggcagcgggatgaatatgggcaggattaacgaaatcctgtcaaacgcactgaaacgcggtgaaattatcgccaagcagggcggtggcggcggggggggaagcgtccccggcatcgagaggatgggaccaggcatcgatcgacttggcggcgccgggatggagcgcatgggcgccggtctcggccacggtatggaccgagtcggaagcgagatcgagaggatgggtcttgtgatggaccgtatggggagtgtggaaaggatggggtcagggatcgagcgcatggggccactcggcctcgaccatatggcatccagcatcgagcgcatgggacagaccatggaacgaatcgggtccggcgtggagagaatgggggctggtatgggcttcggtttagaaaggatggccgctcctatcgaccgtgtgggacagactatcgaacggatgggaagcggcgtcgagagaatggggccggccatagagcggatgggcctgagcatggagaggatggtcccagcagggatgggcgctggcttggagcgaatgggaccagtgatggaccgcatggccacaggcttggaaagaatgggcgcaaataacctagagcggatgggcctggaacgcatgggggccaactccctggaacgaatgggtctggagagaatgggagcaaattccctcgaacggatggggcctgccatgggtccagcacttggggcaggtatcgagaggatgggactcgccatgggaggaggtggaggtgccagttttgaccgagcaatcgaaatggagagaggcaattttggggggagctttgcaggatcgtttggcggcgcaggtggacatgctcctggggtggctagaaaggcctgccagattttcgtccggaatctgcctttcgacttcacgtggaagatgctgaaagacaagtttaatgaatgcgggcacgtcctgtacgcggatattaaaatggaaaatggaaaaagcaaagggtgcggcgtggtcaagtttgaaagtcctgaagtggcggagagagcctgtcgcatgatgaatggtatgaaactcagcgggcgggagatcgacgtgagaattgatcgcaatgcttag

SEQ ID NO: 284056 - DNA, 2474 bp, Artificial Sequence
  derived and/or modified sequence
cgcgccgggaacagccagtcggtgcctaacgcgagtgtatctcgagagagaagcgatcaacagctgccggtctgcgcctgcgcgcggcgggggcgtggcccggggcgagtggggccaaggaggcagccgggagcggcgggcgcaggtgttactggttgcgtcgggtcacgtgggcgcgcaggcgcagcgcggtgcagcccgttcgctcacacaaagcccagacgcggagaaaatggcggcaggggtcgaagcggcggcggaggtggcggcgacggagatcaaaatggaggaagagagcggcgcgcccggcgtgccgagcggcaacggggctccgggccctaagggtgaaggagaacgacctgctcagaatgagaagaggaaggagaaaaacataaaaagaggaggcaatcgctttgagccatatgccaatccaactaaaagatacagagccttcattacaaacataccttttgatgtgaaatggcagtcacttaaagacctggttaaagaaaaagggatgtgctgttgttgaattcaagatggaagagagcatgaaaaaagctgcggaagtcctaaacaagcatagtctgagcggaagaccactgaaagtcaaagaagatcctgatggtgaacatgccaggagagcaatgcaaaaggtgatggctacgactggtgggatgggtatgggaccaggtggcccaggaatgattactatcccacccagtatcctaaataatcccaacatcccaaatgagattatccatgcattacaggctggaagacttggaagcacagtatttgtagcaaatctggattataaagttggctggaagaaactgaaggaagtatttagtatggctggtgtggtggtccgagcagacattcttgaagataaagatggaaaaagtcgtggaataggcactgttacttttgaacagtccattgaagctgtgcaagctatatctatgttcaatggccagctgctatttgatagaccaatgcacgtcaagatggatgagagggccttaccaaaaggagatttcttccctcctgagcgtccacaacaacttccccatggccttggtggtattggcatggggttaggaccaggagggcaacccattgatgccaatcacctgaataaaggcatcggaatgggaaacataggtcccgcaggaatggaggggccctttggtggtggtatggaaaacatgggtcgatttggatctgggatgaacatgggcaggataaatgaaatcctaagtaatgcactgaagagaggagagatcattgcaaagcagggaggaggtggaggtggaggaagcgtccctgggatcgagaggatgggtcctggcattgaccgcctcgggggtgccggcatggagcgcatgggcgcgggcctgggccacggcatggatcgcgtgggctccgagatcgagcgcatgggcctggtcatggaccgcatgggctccgtggagcgcatgggctccggcattgagcgcatgggcccgctgggcctcgaccacatggcctccagcattgagcgcatgggccagaccatggagcgcattggctctggcgtggagcgcatgggtgccggcatgggcttcggccttgagcgcatggccgctcccatcgaccgtgtgggccagaccattgagcgcatgggctctggcgtggagcgcatgggccctgccatcgagcgcatgggcctgagcatggagcgcatggtgcccgcaggtatgggagctggcctggagcgcatgggccccgtgatggatcgcatggccaccggcctggagcgcatgggcgccaacaatctggagcggatgggcctggagcgcatgggcgccaacagcctcgagcgcatgggcctggagcgcatgggtgccaacagcctcgagcgcatgggccctgccatgggcccggccctgggcgctggcattgagcgcatgggcctggccatgggtggcggtggcggtgccagctttgaccgtgccatcgagatggagcgtggcaacttcggaggaagcttcgcaggttcctttggtggagctggaggccatgctcctggggtggccaggaaggcctgccagatatttgtgagaaatctgccattcgatttcacatggaagatgctaaaggacaaattcaacgagtgcggccacgtgctgtacgccgacatcaagatggagaatgggaagtccaaggggtgtggcgtggttaagttcgagtcgccagaggtggccgagagagcctgccggatgatgaatggcatgaagctgagtggccgagagattgacgttcgaattgatagaaacgcttaagcagttgccttttttaaacatcgatacgagacctctgaatttgtattttttcttgttaaccattttaatttgttggctggatgtataaagatgtttaaaaaattcagttgctttttggggtaatttgaattacttttttaatgactg

SEQ ID NO: 284057 - DNA, 1848 bp, Artificial Sequence
  derived and/or modified sequence
aatggcagccacctgaagacctggctgaagaagaagggctgtgctgtggtggagttcaagatggaggagagcatgaagaaggctgctgaggtgctgaacaagcacagcctgagcggccggcccctgaaggtgaaggaggaccctgatggagagcacgcccggcgggccatgcagaaggtgatggccaccaccggcggcatgggcatgggccctgggggccctggcatgatcaccatcccccccagcatcctgaacaaccccaacatccccaatgagatcatccacgccctgcaggccggccgcctgggcagcacagtgtttgtggccaacctggactacaaggtgggctggaagaagctgaaggaggtgttctccatggccggcgtggtggtgcgggctgacatcctggaggacaaggatggcaagagccggggcatcggcaccgtgacctttgagcagagcattgaagctgtgcaggccatctccatgtttaatggccagctgctgtttgaccggcccatgcacgtgaagatggatgagcgggccctgcccaagggggacttcttccccccagagcggccccagcagctgccccacggcctgggcggcatcggcatgggcctgggccctgggggccagcccattgatgccaaccacctgaacaagggcatcggcatgggcaacatcggccctgctggcatggagggcccctttggaggcggcatggagaacatgggccgcttcggcagcggcatgaacatgggccgcatcaatgagatcctgagcaatgccctgaagagaggagagatcatcgccaagcagggcggcggcggcggcggcggctctgtgcccggcatcgagaggatgggccctggcatcgaccggctgggcggggccggcatggagaggatgggcgccggcctgggccacggcatggacagagtgggcagcgagattgaaagaatgggcctggtgatggacaggatgggctctgtggagaggatgggcagcggcattgaaagaatgggccccctgggcctggaccacatggccagcagcattgaaagaatgggccagaccatggagcgcatcggcagcggcgtggagaggatgggcgccggcatgggcttcggcctggagaggatggccgcccccatcgacagagtgggccagaccattgaaagaatgggcagcggcgtggagaggatgggccctgccattgaaagaatgggcctgtccatggagaggatggtgcctgctggcatgggcgccggcctggagaggatgggccctgtgatggacaggatggccaccggcctggagaggatgggcgccaacaacctggagaggatgggcctggagaggatgggcgccaacagcctggagaggatgggcctggagaggatgggcgccaacagcctggagaggatgggccctgccatgggccctgccctgggcgccggcattgaaagaatgggcctggccatgggcggcggcggcggggccagctttgaccgggccatcgagatggagcggggcaactttggaggcagctttgctggcagctttggaggagctgggggccacgcccctggggtggccaggaaggcctgccagatctttgtgaggaacctgccctttgacttcacctggaagatgctgaaggacaagttcaatgaatgtggccacgtgctgtatgctgacatcaagatggagaatggcaagagcaagggctgcggcgtggtgaagtttgagagccctgaggtggccgagcgggcctgcaggatgatgaatggcatgaagctgagcggccgggagattgatgtgagaattgacagaaatgcctag

SEQ ID NO: 284058 - DNA, 1848 bp, Artificial Sequence
  derived and/or modified sequence
aacggcagccacctgaagacctggctgaagaagaagggctgcgccgttgtggaattcaaaatggaagaaagtatgaagaaggccgccgaagtgctgaataagcacagcctgtccggaaggccacttaaggtgaaagaggacccagatggggagcatgctcgccgcgccatgcaaaaggttatggccacaactggaggcatgggaatgggacctggcggacccgggatgattactatccccccttctattctgaacaatccaaatatacctaacgagattatccacgcacttcaggcaggccggctgggctccaccgtgtttgtcgccaatcttgattataaggtgggctggaaaaagttgaaggaggtgttcagcatggcaggagtggtagttagagctgatattctggaggataaagacgggaagagtaggggcattggcacagtgacctttgagcagagcatcgaggctgtccaggcaataagcatgttcaacggtcagctgctatttgaccggcccatgcatgttaaaatggacgaacgagctcttcctaaaggggattttttccctcccgagcgcccacaacagctcccccacggattgggtggcattggaatgggactagggccaggaggccagcctatagacgctaaccatcttaataaggggattgggatgggcaatatcggtccggctggcatggagggaccttttgggggaggcatggaaaacatgggccggttcggaagtggcatgaatatgggcagaatcaatgagatcctttcgaatgcattaaaacgtggcgaaatcattgcaaagcagggcggaggagggggcggcggcagtgtgcctggcatcgagcggatggggcccggaatcgaccgactggggggggccggcatggagcggatgggtgcgggattggggcacggaatggatcgggtgggttcagagatcgaacggatgggattggtcatggatcgcatgggaagcgtcgaacgcatgggttcaggaattgagcgaatgggcccactgggcctggaccacatggcatcgagcatagaaaggatgggacagaccatggaacgcatcggttccggggttgagcgaatgggcgctgggatggggttcggtctggaaagaatggcggcccctatagaccgcgttgggcagaccatagagagaatgggctccggtgtagagaggatgggccctgcgattgaacggatggggctttcgatggagaggatggtccccgcggggatgggagccggactggaaaggatgggtccagtgatggatcgcatggccactggtctcgaaaggatgggcgcgaataaccttgaaaggatggggttggagaggatgggagctaacagcttggagcgaatgggtcttgagcgaatgggagcaaacagcctggagcgtatgggacctgcgatgggcccagctctgggcgccggcattgagcgcatggggctagccatgggcggcggaggcggcgcgtcctttgacagggcgatcgagatggaaagaggtaatttcggcggctcttttgccggatcgttcggcggcgcaggcggccatgcgccgggagtagctcgaaaggcttgccaaattttcgtgcgcaatcttccatttgattttacatggaagatgttgaaagataaatttaatgagtgtggccacgtgctgtacgcagacatcaagatggaaaacggcaaatccaaaggttgtggcgtggttaagtttgagtcacctgaggtggccgaaagggcatgccgcatgatgaacggcatgaagctcagcggaagagaaatagacgtgcgaatcgaccggaatgcctag

SEQ ID NO: 284059 - DNA, 1848 bp, Artificial Sequence
  derived and/or modified sequence
aacggcagccacctcaagacttggctaaaaaaaaagggctgcgccgtcgtggaattcaagatggaagaaagcatgaagaaagctgccgaagttctgaataaacacagcctgagcggccgtccattaaaggttaaggaggatcccgatggagaacacgctcggagggcaatgcagaaggtgatggctaccactggcggtatgggaatgggccctggcggacctgggatgattacaatccctccttcaatcctcaacaacccaaatatacccaatgagattatccatgctctgcaggcgggacgtctggggtccacggtattcgtagctaacttggactacaaagtgggttggaagaagcttaaggaagtgttttccatggctggggtggtggttcgggcagacattctcgaggataaagacggtaaaagtcgtggcatcgggaccgttaccttcgaacagtctattgaagcagtccaagccatatcaatgttcaatggacagctgctgttcgaccgtcctatgcacgtgaagatggacgagcgggctctgcccaagggagattttttcccgcctgaacggcctcagcagttgccacacggattgggcggtataggcatgggacttggcccaggcggtcagcccatagatgccaatcatctgaacaaaggcattgggatgggcaacatagggcctgctgggatggagggcccattcgggggtgggatggagaatatggggcgtttcggatccggaatgaatatggggagaattaacgagatcctgagcaacgctctcaagcggggtgagatcatcgccaaacaggggggaggagggggaggtggttcagtgcccggtatagagcggatgggacctggaattgatagattaggcggtgccggaatggagaggatgggggctggcctgggtcatgggatggacagggtgggatctgaaatcgagcgcatggggctggtaatggaccgaatgggctccgttgaacgcatgggtagtggaatagagcgcatggggcctctcggcctggatcacatggcttccagcatagaaaggatgggacagaccatggaacgcattggctccggagtggagaggatgggcgcaggcatgggtttcgggcttgagcgcatggctgcacccattgaccgcgtgggccaaaccatcgagcgcatggggagcggagttgaaaggatgggacctgccatcgaaaggatgggactgagcatggagcgaatggtgccagctgggatgggagctggactggagcgtatgggcccagtaatggataggatggctactggactggaacggatgggcgctaataatctcgagaggatgggcctggagcgtatgggtgcaaatagcctggagaggatgggtcttgagagaatgggtgcgaacagcttagaacgaatgggccctgctatggggcctgcgctgggagccggaattgagaggatggggctcgctatgggcggtggcggaggggcatccttcgacagagccattgagatggaacgcggaaacttcggaggtagtttcgctggtagtttcggtggcgctgggggacacgctcctggcgtcgccaggaaggcgtgccagatcttcgtccgcaatctcccctttgactttacttggaagatgctcaaggacaagttcaatgagtgtggacacgttctgtatgcagatattaagatggaaaacggcaaatcaaaaggttgcggggttgtgaagtttgaaagcccagaagtagcagaacgagcctgcagaatgatgaatggaatgaaactcagcgggagagagatagacgtgagaatagacaggaacgcctag

SEQ ID NO: 284060 - DNA, 864 bp, Artificial Sequence
  derived and/or modified sequence
atgggcagcgtggagagaatgggcagcggcatcgagagaatgggccccctgggcctggaccacatggccagcagcatcgagagaatgggccagaccatggagagaatcggcagcggcgtggagagaatgggcgccggcatgggcttcggcctggagagaatggccgcccccatcgacagagtgggccagaccatcgagagaatgggcagcggcgtggagagaatgggccccgccatcgagagaatgggcctgagcatggagagaatggtgcccgccggcatgggcgccggcctggagagaatgggccccgtgatggacagaatggccaccggcctggagagaatgggcgccaacaacctggagagaatgggcctggagagaatgggcgccaacagcctggagagaatgggcctggagagaatgggcgccaacagcctggagagaatgggccccgccatgggccccgccctgggcgccggcatcgagagaatgggcctggccatgggcggcggcggcggcgccagcttcgacagagccatcgagatggagagaggcaacttcggcggcagcttcgccggcagcttcggcggcgccggcggccacgcccccggcgtggccagaaaggcctgccagatcttcgtgagaaacctgcccttcgacttcacctggaagatgctgaaggacaagttcaacgagtgcggccacgtgctgtacgccgacatcaagatggagaacggcaagagcaagggctgcggcgtggtgaagttcgagagccccgaggtggccgagagagcctgcagaatgatgaacggcatgaagctgagcggcagagagatcgacgtgagaatcgacagaaacgcctag

SEQ ID NO: 284061 - DNA, 864 bp, Artificial Sequence
  derived and/or modified sequence
atgggctccgtcgagaggatgggatcaggcattgagcggatggggccactggggctcgaccatatggcctcatccatcgagcgcatgggccaaaccatggagagaattggatccggagttgaacggatgggcgccggcatgggctttgggttggagcggatggcggcccccatagacagagtgggacagaccatcgagcgaatgggctcgggcgtagaacggatgggccccgccattgagcgaatgggtctttccatggaaagaatggtgcctgcagggatgggggcaggcttggaacggatgggaccggtgatggatagaatggccacaggattggaacgaatgggcgccaataatctggagagaatgggactcgaaagaatgggcgctaatagccttgaaaggatgggcctcgagcgaatgggagctaatagtctagagagaatgggccctgctatggggcctgccttgggcgcaggcatcgaaaggatgggcctggctatgggaggaggtggaggagccagcttcgatagggctatcgagatggaacggggtaatttcggcggtagcttcgccggctctttcgggggggccggcggacacgctcccggcgtagctcgaaaggcatgccagatattcgtacgcaatctgccctttgacttcacatggaaaatgcttaaggacaagtttaacgagtgtgggcacgtgctgtacgctgacattaagatggagaacgggaagagtaaaggatgcggcgttgttaagtttgaaagccctgaagtggccgagcgcgcctgccgcatgatgaatggaatgaagctgtccggtcgagagatcgatgttaggattgatagaaacgcatag

SEQ ID NO: 284062 - DNA, 864 bp, Artificial Sequence
  derived and/or modified sequence
atgggctctgtggagaggatgggcagcggcattgaaagaatgggccccctgggcctggaccacatggccagcagcattgaaagaatgggccagaccatggagcgcatcggcagcggcgtggagaggatgggcgccggcatgggcttcggcctggagaggatggccgcccccatcgacagagtgggccagaccattgaaagaatgggcagcggcgtggagaggatgggccctgccattgaaagaatgggcctgtccatggagaggatggtgcctgctggcatgggcgccggcctggagaggatgggccctgtgatggacaggatggccaccggcctggagaggatgggcgccaacaacctggagaggatgggcctggagaggatgggcgccaacagcctggagaggatgggcctggagaggatgggcgccaacagcctggagaggatgggccctgccatgggccctgccctgggcgccggcattgaaagaatgggcctggccatgggcggcggcggcggggccagctttgaccgggccatcgagatggagcggggcaactttggaggcagctttgctggcagctttggaggagctgggggccacgcccctggggtggccaggaaggcctgccagatctttgtgaggaacctgccctttgacttcacctggaagatgctgaaggacaagttcaatgaatgtggccacgtgctgtatgctgacatcaagatggagaatggcaagagcaagggctgcggcgtggtgaagtttgagagccctgaggtggccgagcgggcctgcaggatgatgaatggcatgaagctgagcggccgggagattgatgtgagaattgacagaaatgcctag

SEQ ID NO: 284063 - DNA, 864 bp, Artificial Sequence
  derived and/or modified sequence
atgggcagcgtggagcggatgggcagcggcatcgagcggatgggcccactgggactggaccatatggctagctccattgagcgcatgggacagacaatggaaaggatcggatctggagtggaacgaatgggcgctggtatgggctttggcttagagcgaatggcggcacccatagatcgggtggggcagactatagaacgaatgggcagtggcgtggaaaggatggggcctgccattgaaaggatgggactgagcatggagaggatggtgcctgcaggaatgggcgccggcctcgagaggatgggccccgtcatggaccggatggcaacaggcctggagcgtatgggggcgaataacctagaacggatgggccttgagaggatgggtgctaatagtcttgagcggatggggttggagcgtatgggcgcaaacagcttggaaagaatgggacccgccatggggcctgctcttggcgctggcatcgagcgtatgggcctcgctatgggcgggggtggcggtgcttcttttgacagagcaatcgaaatggagcgcggtaactttggcggatccttcgcgggctctttcgggggcgctggagggcacgcacctggcgtggcacggaaggcctgtcagatcttcgtgcgcaaccttcctttcgatttcacatggaaaatgcttaaggacaagttcaatgagtgtggtcatgtgctctacgctgatattaagatggagaatggcaagtcaaaaggctgcggtgtggtaaagtttgaaagcccagaagtcgcagagagagcttgtcggatgatgaacggcatgaaattgtccggtagagaaattgatgtccgaatagaccgaaatgcgtag

SEQ ID NO: 284064 - DNA, 864 bp, Artificial Sequence
  derived and/or modified sequence
atgggatctgtggagcgaatgggatccggtatagagagaatggggcctctcggtctagatcacatggcgtctagcatcgagagaatggggcagaccatggaaagaattggctcaggagtagagcgcatgggcgctgggatgggatttgggctggagaggatggccgcaccgatagacagagtgggacagaccattgagagaatggggtccggcgtggagcgcatgggacccgctatagaacgcatgggcctttcaatggaacgaatggtccctgcagggatgggtgcgggattagagagaatgggccctgtcatggaccggatggccactggactcgaacgaatgggtgctaacaatcttgagaggatgggcttggagcgcatgggagccaattcccttgaacggatggggctggagaggatgggcgcaaactccctggaacgaatggggcctgccatgggacctgccctgggcgcaggtatagaaagaatgggcctcgctatgggcggtggcggtggagcctcttttgacagagcgattgagatggaacgaggcaacttcgggggatcgtttgcaggcagcttcggaggggcaggcggtcatgcccctggtgtggcgaggaaggcatgccagatcttcgttagaaacctgcccttcgacttcacatggaaaatgctgaaggacaaatttaacgagtgcggacacgtcctgtacgcagatattaagatggaaaatgggaaatctaaaggctgcggcgtggtgaagttcgaaagccctgaagtggccgaaagagcatgcaggatgatgaacgggatgaaactctccggcagggagatagacgtgcgaatcgatcgcaacgcttag

SEQ ID NO: 284065 - protein, 1215 aa, Artificial Sequence
  derived and/or modified sequence
MTSTGQDSTTTRQRRSRQNPQSPPQDSSVTSKRNIKKGAVPRSIPNLAEVKKKGKMKKLGQAMEEDLIVGLQGMDLNLEAEALAGTGLVLDEQLNEFHCLWDDSFPEGPERLHAIKEQLIQEGLLDRCVSFQARFAEKEELMLVHSLEYIDLMETTQYMNEGELRVLADTYDSVYLHPNSYSCACLASGSVLRLVDAVLGAEIRNGMAIIRPPGHHAQHSLMDGYCMFNHVAVAARYAQQKHRIRRVLIVDWDVHHGQGTQFTFDQDPSVLYFSIHRYEQGRFWPHLKASNWSTTGFGQGQGYTINVPWNQVGMRDADYIAAFLHVLLPVALEFQPQLVLVAAGFDALQGDPKGEMAATPAGFAQLTHLLMGLAGGKLILSLEGGYNLRALAEGVSASLHTLLGDPCPMLESPGAPCRSAQASVSCALEALEPFWEVLVRSTETVERDNMEEDNVEESEEEGPWEPPVLPILTWPVLQSRTGLVYDQNMMNHCNLWDSHHPEVPQRILRIMCRLEELGLAGRCLTLTPRPATEAELLTCHSAEYVGHLRATEKMKTRELHRESSNFDSIYICPSTFACAQLATGAACRLVEAVLSGEVLNGAAVVRPPGHHAEQDAACGFCFFNSVAVAARHAQTISGHALRILIVDWDVHHGNGTQHMFEDDPSVLYVSLHRYDHGTFFPMGDEGASSQIGRAAGTGFTVNVAWNGPRMGDADYLAAWHRLVLPIAYEFNPELVLVSAGFDAARGDPLGGCQVSPEGYAHLTHLLMGLASGRIILILEGGYNLTSISESMAACTRSLLGDPPPLLTLPRPPLSGALASITETIQVHRRYWRSLRVMKVEDREGPSSSKLVTKKAPQPAKPRLAERMTTREKKVLEAGMGKVTSASFGEESTPGQTNSETAVVALTQDQPSEAATGGATLAQTISEAAIGGAMLGQTTSEEAVGGATPDQTTSEETVGGAILDQTTSEDAVGGATLGQTTSEEAVGGATLAQTTSEAAMEGATLDQTTSEEAPGGTELIQTPLASSTDHQTPPTSPVQGTTPQISPSTLIGSLRTLELGSESQGASESQAPGEENLLGEAAGGQDMADSMLMQGSRGLTDQAIFYAVTPLPWCPHLVAVCPIPAAGLDVTQPCGDCGTIQENWVCLSCYQVYCGRYINGHMLQHHGNSGHPLVLSYIDLSAWCYYCQAYVHHQALLDVKNIAHQNKFGEDMPHPH

SEQ ID NO: 284066 - protein, 210 aa, Artificial Sequence
  derived and/or modified sequence
MTSTGQDSTTTRQRRSRQNPQSPPQDSSVTSKRNIKKGAVPRSIPNLAEVKKKGKMKKLGQAMEEDLIVGLQGMDLNLEAEALAGTGLVLDEQLNEFHCLWDDSFPEGPERLHAIKEQLIQEGLLDRCVSFQARFAEKEELMLVHSLEYIDLMETTQYMNEGELRVLADTYDSVYLHPNSYSCACLASGSVLRLVDAVLGAEIRNGMAII

SEQ ID NO: 284067 - protein, 296 aa, Artificial Sequence [sequence omitted]

SEQ ID NO: 284068 - protein, 269 aa, Artificial Sequence
  derived and/or modified sequence
MTSTGQDSTTTRQRRSRQNPQSPPQDSSVTSKRNIKKGAVPRSIPNLAEVKKKGKMKKLGQAMEEDLIVGLQGMDLNLEAEALAGTGLVLDEQLNEFHCLWDDSFPEGPERLHAIKEQLIQEGLLDRCVSFQARFAEKEELMLVHSLEYIDLMETTQYMNEGELRVLADTYDSVYLHPNSYSCACLASGSVLRLVDAVLGAEIRNGMAIIRPPGHHAQHSLMDGYCMFNHVAVAARYAQQKHRIRRVLIVDWDVHHGQGTQFTFDQDPR

SEQ ID NO: 284069 - protein, 817 aa, Artificial Sequence
  derived and/or modified sequence
MTSTGQDSTTTRQRRSRQNPQSPPQDSSVTSKRNIKKGAVPRSIPNLAEVKKKGKMKKLGQAMEEDLIVGLQGMDLNLEAEALAGTGLVLDEQLNEFHCLWDDSFPEGPERLHAIKEQLIQEGLLDRCVSFQARFAEKEELMLVHSLEYIDLMETTQYMNEGELRVLADTYDSVYLHPNSYSCACLASGSVLRLVDAVLGAEIRNGMAIIRPPGHHAQHSLMDGYCMFNHVAVAARYAQQKHRIRRVLIVDWDVHHGQGTQFTFDQDPSVLYFSIHRYEQGRFWPHLKASNWSTTGFGQGQGYTINVPWNQVGMRDADYIAAFLHVLLPVALEFQPQLVLVAAGFDALQGDPKGEMAATPAGFAQLTHLLMGLAGGKLILSLEGGYNLRALAEGVSASLHTLLGDPCPMLESPGAPCRSAQASVSCALEALEPFWEVLVRSTETVERDNMEEDNVEESEEEGPWEPPVLPILTWPVLQSRTGLVYDQNMMNHCNLWDSHHPEVPQRILRIMCRLEELGLAGRCLTLTPRPATEAELLTCHSAEYVGHLRATEKMKTRELHRESSNFDSIYICPSTFACAQLATGAACRLVEAVLSGEVLNGAAVVRPPGHHAEQDAACGFCFFNSVAVAARHAQTISGHALRILIVDWDVHHGNGTQHMFEDDPSVLYVSLHRYDHGTFFPMGDEGASSQIGRAAGTGFTVNVAWNGPRMGDADYLAAWHRLVLPIAYEFNPELVLVSAGFDAARGDPLGGCQVSPEGYAHLTLPIACLRGTTTPAQKERGAAQWPQEGADIMRITLAGGELTGRHGKVAYVIKYKL

SEQ ID NO: 284070 - protein, 171 aa, Artificial Sequence
  derived and/or modified sequence
MTSTGQDSTTTRQRRSRQNPQSPPQDSSVTSKRNIKKGAVPRSIPNLAEVKKKGKMKKLGQAMEEDLIVGLQGMDLNLEAEALAGTGLVLDEQLNEFHCLWDDSFPEGPERLHAIKEQLIQEGLLDRCVSFQARFAEKEELMLVHSLEYIDLMETTQYMNEGELRVLADTY

SEQ ID NO: 284071 - protein, 161 aa, Artificial Sequence
  derived and/or modified sequence
MTSTGQDSTTTRQRRSRQNPQSPPQDSSVTSKRNIKKGAVPRSIPNLAEVKKKGKMKKLGQAMEEDLIVGLQGMDLNLEAEALAGTGLVLDEQLNEFHCLWDDSFPEGPERLHAIKEQLIQEGLLDRCVSFQARFAEKEELMLVHSLEYIDLMETTQYMNE

SEQ ID NO: 284072 - protein, 1229 aa, Artificial Sequence
  derived and/or modified sequence
MSGANRGRGQASSTMTSTGQDSTTTRQRRSRQNPQSPPQDSSVTSKRNIKKGAVPRSIPNLAEVKKKGKMKKLGQAMEEDLIVGLQGMDLNLEAEALAGTGLVLDEQLNEFHCLWDDSFPEGPERLHAIKEQLIQEGLLDRCVSFQARFAEKEELMLVHSLEYIDLMETTQYMNEGELRVLADTYDSVYLHPNSYSCACLASGSVLRLVDAVLGAEIRNGMAIIRPPGHHAQHSLMDGYCMFNHVAVAARYAQQKHRIRRVLIVDWDVHHGQGTQFTFDQDPSVLYFSIHRYEQGRFWPHLKASNWSTTGFGQGQGYTINVPWNQVGMRDADYIAAFLHVLLPVALEFQPQLVLVAAGFDALQGDPKGEMAATPAGFAQLTHLLMGLAGGKLILSLEGGYNLRALAEGVSASLHTLLGDPCPMLESPGAPCRSAQASVSCALEALEPFWEVLVRSTETVERDNMEEDNVEESEEEGPWEPPVLPILTWPVLQSRTGLVYDQNMMNHCNLWDSHHPEVPQRILRIMCRLEELGLAGRCLTLTPRPATEAELLTCHSAEYVGHLRATEKMKTRELHRESSNFDSIYICPSTFACAQLATGAACRLVEAVLSGEVLNGAAVVRPPGHHAEQDAACGFCFFNSVAVAARHAQTISGHALRILIVDWDVHHGNGTQHMFEDDPSVLYVSLHRYDHGTFFPMGDEGASSQIGRAAGTGFTVNVAWNGPRMGDADYLAAWHRLVLPIAYEFNPELVLVSAGFDAARGDPLGGCQVSPEGYAHLTHLLMGLASGRIILILEGGYNLTSISESMAACTRSLLGDPPPLLTLPRPPLSGALASITETIQVHRRYWRSLRVMKVEDREGPSSSKLVTKKAPQPAKPRLAERMTTREKKVLEAGMGKVTSASFGEESTPGQTNSETAVVALTQDQPSEAATGGATLAQTISEAAIGGAMLGQTTSEEAVGGATPDQTTSEETVGGAILDQTTSEDAVGGATLGQTTSEEAVGGATLAQTTSEAAMEGATLDQTTSEEAPGGTELIQTPLASSTDHQTPPTSPVQGTTPQISPSTLIGSLRTLELGSESQGASESQAPGEENLLGEAAGGQDMADSMLMQGSRGLTDQAIFYAVTPLPWCPHLVAVCPIPAAGLDVTQPCGDCGTIQENWVCLSCYQVYCGRYINGHMLQHHGNSGHPLVLSYIDLSAWCYYCQAYVHHQALLDVKNIAHQNKFGEDMPHPH

SEQ ID NO: 284073 - DNA, 3690 bp, Artificial Sequence
  derived and/or modified sequence
atgagcggcgccaacagaggcagaggccaggccagcagcaccatgaccagcaccggccaggacagcaccaccaccagacagagaagaagcagacagaacccccagagccccccccaggacagcagcgtgaccagcaagagaaacatcaagaagggcgccgtgcccagaagcatccccaacctggccgaggtgaagaagaagggcaagatgaagaagctgggccaggccatggaggaggacctgatcgtgggcctgcagggcatggacctgaacctggaggccgaggccctggccggcaccggcctggtgctggacgagcagctgaacgagttccactgcctgtgggacgacagcttccccgagggccccgagagactgcacgccatcaaggagcagctgatccaggagggcctgctggacagatgcgtgagcttccaggccagattcgccgagaaggaggagctgatgctggtgcacagcctggagtacatcgacctgatggagaccacccagtacatgaacgagggcgagctgagagtgctggccgacacctacgacagcgtgtacctgcaccccaacagctacagctgcgcctgcctggccagcggcagcgtgctgagactggtggacgccgtgctgggcgccgagatcagaaacggcatggccatcatcagaccccccggccaccacgcccagcacagcctgatggacggctactgcatgttcaaccacgtggccgtggccgccagatacgcccagcagaagcacagaatcagaagagtgctgatcgtggactgggacgtgcaccacggccagggcacccagttcaccttcgaccaggaccccagcgtgctgtacttcagcatccacagatacgagcagggcagattctggccccacctgaaggccagcaactggagcaccaccggcttcggccagggccagggctacaccatcaacgtgccctggaaccaggtgggcatgagagacgccgactacatcgccgccttcctgcacgtgctgctgcccgtggccctggagttccagccccagctggtgctggtggccgccggcttcgacgccctgcagggcgaccccaagggcgagatggccgccacccccgccggcttcgcccagctgacccacctgctgatgggcctggccggcggcaagctgatcctgagcctggagggcggctacaacctgagagccctggccgagggcgtgagcgccagcctgcacaccctgctgggcgacccctgccccatgctggagagccccggcgccccctgcagaagcgcccaggccagcgtgagctgcgccctggaggccctggagcccttctgggaggtgctggtgagaagcaccgagaccgtggagagagacaacatggaggaggacaacgtggaggagagcgaggaggagggcccctgggagccccccgtgctgcccatcctgacctggcccgtgctgcagagcagaaccggcctggtgtacgaccagaacatgatgaaccactgcaacctgtgggacagccaccaccccgaggtgccccagagaatcctgagaatcatgtgcagactggaggagctgggcctggccggcagatgcctgaccctgacccccagacccgccaccgaggccgagctgctgacctgccacagcgccgagtacgtgggccacctgagagccaccgagaagatgaagaccagagagctgcacagagagagcagcaacttcgacagcatctacatctgccccagcaccttcgcctgcgcccagctggccaccggcgccgcctgcagactggtggaggccgtgctgagcggcgaggtgctgaacggcgccgccgtggtgagaccccccggccaccacgccgagcaggacgccgcctgcggcttctgcttcttcaacagcgtggccgtggccgccagacacgcccagaccatcagcggccacgccctgagaatcctgatcgtggactgggacgtgcaccacggcaacggcacccagcacatgttcgaggacgaccccagcgtgctgtacgtgagcctgcacagatacgaccacggcaccttcttccccatgggcgacgagggcgccagcagccagatcggcagagccgccggcaccggcttcaccgtgaacgtggcctggaacggccccagaatgggcgacgccgactacctggccgcctggcacagactggtgctgcccatcgcctacgagttcaaccccgagctggtgctggtgagcgccggcttcgacgccgccagaggcgaccccctgggcggctgccaggtgagccccgagggctacgcccacctgacccacctgctgatgggcctggccagcggcagaatcatcctgatcctggagggcggctacaacctgaccagcatcagcgagagcatggccgcctgcaccagaagcctgctgggcgaccccccccccctgctgaccctgcccagaccccccctgagcggcgccctggccagcatcaccgagaccatccaggtgcacagaagatactggagaagcctgagagtgatgaaggtggaggacagagagggccccagcagcagcaagctggtgaccaagaaggccccccagcccgccaagcccagactggccgagagaatgaccaccagagagaagaaggtgctggaggccggcatgggcaaggtgaccagcgccagcttcggcgaggagagcacccccggccagaccaacagcgagaccgccgtggtggccctgacccaggaccagcccagcgaggccgccaccggcggcgccaccctggcccagaccatcagcgaggccgccatcggcggcgccatgctgggccagaccaccagcgaggaggccgtgggcggcgccacccccgaccagaccaccagcgaggagaccgtgggcggcgccatcctggaccagaccaccagcgaggacgccgtgggcggcgccaccctgggccagaccaccagcgaggaggccgtgggcggcgccaccctggcccagaccaccagcgaggccgccatggagggcgccaccctggaccagaccaccagcgaggaggcccccggcggcaccgagctgatccagacccccctggccagcagcaccgaccaccagaccccccccaccagccccgtgcagggcaccaccccccagatcagccccagcaccctgatcggcagcctgagaaccctggagctgggcagcgagagccagggcgccagcgagagccaggcccccggcgaggagaacctgctgggcgaggccgccggcggccaggacatggccgacagcatgctgatgcagggcagcagaggcctgaccgaccaggccatcttctacgccgtgacccccctgccctggtgcccccacctggtggccgtgtgccccatccccgccgccggcctggacgtgacccagccctgcggcgactgcggcaccatccaggagaactgggtgtgcctgagctgctaccaggtgtactgcggcagatacatcaacggccacatgctgcagcaccacggcaacagcggccaccccctggtgctgagctacatcgacctgagcgcctggtgctactactgccaggcctacgtgcaccaccaggccctgctggacgtgaagaacatcgcccaccagaacaagttcggcgaggacatgccccacccccactag

SEQ ID NO: 284074 - DNA, 3690 bp, Artificial Sequence
  derived and/or modified sequence
atgagtggagctaacagaggaagaggacaagccagttcgacaatgacgtcaacaggacaggactctactaccacccgccaacgccgcagccgccagaatccccaatccccgccacaggatagtagcgtgacctctaaacgaaatattaaaaaaggggccgttcctcgctctattcctaatctggcggaggtcaagaaaaaaggcaagatgaagaagctgggccaagctatggaggaagacttgatcgtgggcctccagggcatggacttaaatcttgaagctgaagcacttgccggaacagggctggtgttggatgaacagctcaacgaattccactgcctatgggacgattcattccctgaaggtcccgagagactgcacgcaatcaaggagcagctgattcaggagggtctcctggatcggtgtgtaagtttccaggccagatttgccgagaaggaggagttgatgttggttcacagtttagaatatatcgacttgatggagacgacccaatacatgaacgagggcgaactgcgagtccttgccgatacttatgattctgtctatttgcacccaaatagctacagctgcgcgtgtctggccagcgggagcgtgctgagacttgtcgacgcagtgttgggtgcagaaatcagaaatggaatggccatcatccgccccccaggtcaccacgctcagcactctttaatggacggttactgcatgtttaatcatgtggccgtggcagctaggtacgctcaacagaaacacagaatcagacgcgtgttaattgtagactgggatgttcatcatggccaggggacccagtttacattcgaccaagaccccagcgtcctgtacttttccatccacaggtacgaacaagggcgcttttggcctcacctgaaagcaagtaattggtcgaccaccgggttcggacagggtcaagggtataccatcaatgtgccgtggaatcaggtgggcatgcgtgacgcagactacatcgccgccttcctacacgtgttgctcccggtggctttagagtttcagccccaactagtgctggtcgccgctgggttcgacgcgctgcaaggcgaccctaagggagagatggctgctactccagctgggtttgcccaactgactcatctcttaatggggttagccggcggcaaactgatcttatctctggaaggcggttacaatttacgtgccctggcagaaggcgtgagtgcaagtttgcacacactgttaggagacccatgtcccatgttagaaagtccaggcgcaccctgtagatctgctcaggcgtctgtcagttgcgctctggaggctctggagcccttctgggaagtgttggtgcgcagtacagagacggtcgagagagataacatggaggaggacaacgtcgaagagtcagaggaggaagggccctgggagcctccagtgctccctatcttgacttggcctgtgctgcagtcaaggacgggtctggtgtatgaccaaaatatgatgaatcactgcaacctgtgggactcccaccacccagaagtcccccagcggatactgaggattatgtgccgcctggaggaactcggcttagcaggcagatgccttacgctgaccccacgacccgcaaccgaggctgaacttttgacctgtcactccgccgaatacgtcggtcacctccgggccaccgaaaaaatgaagacgagggagctccaccgggaatcttccaatttcgattcaatatacatttgcccaagtacttttgcttgtgctcaactagccaccggggcagcatgtagattagtcgaggccgtgctttctggggaggtgctgaatggcgcagctgtggtgcgcccgccaggacaccatgccgagcaggacgccgcatgcggcttttgctttttcaattccgttgctgtggcagcccgccacgcccagaccatctccggccacgccctgcggatcttaattgtcgattgggatgtgcaccacggaaacgggactcagcatatgtttgaagacgacccctccgttctgtacgtcagtctacacagatatgatcatggcacgttcttccctatgggagacgaaggagccagcagccagataggaagagcagctgggacaggattcaccgttaatgtggcttggaatgggccccggatgggcgacgccgactatcttgcggcctggcacaggctggttctgcctattgcatatgagttcaaccctgaactcgtactggtttccgccgggtttgatgccgcccggggggaccctttgggtggatgccaagtgtcccccgagggatacgcccatctgacacatctcctgatgggcctggctagcggacgaattattcttatattggaggggggttataatctgacaagtatctccgagtccatggcggcatgtactcgcagcctactgggggatccaccacctctcctgaccctgcctagaccccctttgtccggtgcattggcttctatcacggagacaatccaggtccaccgccgttactggcgttctctacgggttatgaaagtagaggaccgtgaagggccatcgtcgtccaagctggtgacaaaaaaagctccacagcccgctaagccccgtctggcagaacgcatgactactagagagaagaaagtgctggaagcaggaatgggaaaggtgacatccgcgagtttcggcgaggaatcaacacctggacagacgaacagcgagacagcagtcgtggcactgactcaggatcaaccaagcgaggctgctacaggaggcgccacattagcccagaccatctccgaggccgctattggaggcgccatgcttggacagaccaccagcgaggaggcggttggtggcgcgaccccagatcagacaacatccgaagaaactgttgggggcgctatcttggatcagacgacctccgaagatgcggttggtggagctaccctcggacagaccactagcgaggaagctgtgggcggcgccaccctggcccaaacaacatctgaagccgcaatggaaggcgccacgttggaccagaccacatccgaggaggcccccggcggcacagagttaattcagactccgcttgcctcctctaccgaccatcagactccccccacttcccccgtccagggtacaactcctcagatctccccttctacccttataggatccttaagaacgttagaactgggatcagaatcccagggggccagcgaaagccaggctcccggcgaagaaaatctgctgggggaggccgccgggggccaggacatggccgactccatgctgatgcaagggagccggggtctcaccgatcaagctattttttatgccgtcaccccccttccttggtgtccccaccttgtggcagtctgccctattccagccgccgggctggatgtgacccagccctgcggtgattgtggtactatccaggagaactgggtgtgtttatcctgttaccaggtgtactgcggacggtacatcaacggccacatgctgcagcaccacggaaattctggacatcctctcgttttgagctacatcgatctctccgcttggtgttattattgtcaggcctatgtgcatcaccaagcgctgctggacgtgaaaaacatcgcccaccaaaacaaattcggggaagatatgccccatccccactag

SEQ ID NO: 284075 - DNA, 4190 bp, Artificial Sequence
  derived and/or modified sequence
gaaggcggctagggactggctgaagagggttagcgaaacgttagcggtcgggtctgggcagggggtggagctggttgaaggaacggggcagtcccctgaggagcggggctggttgaaacgctaggggcgggatctggcggagtggaagaaccgcggcaggggccaagcctcctcaactatgacctcaaccggccaggattccaccacaaccaggcagcgaagaagtaggcagaacccccagtcgccccctcaggactccagtgtcacttcgaagcgaaatattaaaaagggagccgttccccgctctatccccaatctagcggaggtaaagaagaaaggcaaaatgaagaagctcggccaagcaatggaagaagacctaatcgtgggactgcaagggatggatctgaaccttgaggctgaagcactggctggcactggcttggtgttggatgagcagttaaatgaattccattgcctctgggatgacagcttcccggaaggccctgagcggctccatgccatcaaggagcaactgatccaggagggcctcctagatcgctgcgtgtcctttcaggcccggtttgctgaaaaggaagagctgatgttggttcacagcctagaatatattgatctgatggaaacaacccagtacatgaatgagggagaactccgtgtcctagcagacacctacgactcagtttatctgcatccgaactcatactcctgtgcctgcctggcctcaggctctgtcctcaggctggtggatgcggtcctgggggctgagatccggaatggcatggccatcattaggcctcctggacatcacgcccagcacagtcttatggatggctattgcatgttcaaccacgtggctgtggcagcccgctatgctcaacagaaacaccgcatccggagggtccttatcgtagattgggatgtgcaccacggtcaaggaacacagttcaccttcgaccaggaccccagtgtcctctatttctccatccaccgctacgagcagggtaggttctggccccacctgaaggcctctaactggtccaccacaggtttcggccaaggccaaggatataccatcaatgtgccttggaaccaggtggggatgcgggatgctgactacattgctgctttcctgcacgtcctgctgccagtcgccctcgagttccagcctcagctggtcctggtggctgctggatttgatgccctgcaaggggaccccaagggtgagatggccgccactccggcagggttcgcccagctaacccacctgctcatgggtctggcaggaggcaagctgatcctgtctctggagggtggctacaacctccgcgccctggctgaaggcgtcagtgcttcgctccacacccttctgggagacccttgccccatgctggagtcacctggtgccccctgccggagtgcccaggcttcagtttcctgtgctctggaagcccttgagcccttctgggaggttcttgtgagatcaactgagaccgtggagagggacaacatggaggaggacaatgtagaggagagcgaggaggaaggaccctgggagccccctgtgctcccaatcctgacatggccagtgctacagtctcgcacagggctggtctatgaccaaaatatgatgaatcactgcaacttgtgggacagccaccaccctgaggtaccccagcgcatcttgcggatcatgtgccgtctggaggagctgggccttgccgggcgctgcctcaccctgacaccgcgccctgccacagaggctgagctgctcacctgtcacagtgctgagtacgtgggtcatctccgggccacagagaaaatgaaaacccgggagctgcaccgtgagagttccaactttgactccatctatatctgccccagtaccttcgcctgtgcacagcttgccactggcgctgcctgccgcctggtggaggctgtgctctcaggagaggttctgaatggtgctgctgtggtgcgtcccccaggacaccacgcagagcaggatgcagcttgcggtttttgctttttcaactctgtggctgtggctgctcgccatgcccagactatcagtgggcatgccctacggatcctgattgtggattgggatgtccaccacggtaatggaactcagcacatgtttgaggatgaccccagtgtgctatatgtgtccctgcaccgctatgatcatggcaccttcttccccatgggggatgagggtgccagcagccagatcggccgggctgcgggcacaggcttcaccgtcaacgtggcatggaacgggccccgcatgggtgatgctgactacctagctgcctggcatcgcctggtgcttcccattgcctacgagtttaacccagaactggtgctggtctcagctggctttgatgctgcacggggggatccgctggggggctgccaggtgtcacctgagggttatgcccacctcacccacctgctgatgggccttgccagtggccgcattatccttatcctagagggtggctataacctgacatccatctcagagtccatggctgcctgcactcgctccctccttggagacccaccacccctgctgaccctgccacggcccccactatcaggggccctggcctcaatcactgagaccatccaagtccatcgcagatactggcgcagcttacgggtcatgaaggtagaagacagagaaggaccctccagttctaagttggtcaccaagaaggcaccccaaccagccaaacctaggttagctgagcggatgaccacacgagaaaagaaggttctggaagcaggcatggggaaagtcacctcggcatcatttggggaagagtccactccaggccagactaactcagagacagctgtggtggccctcactcaggaccagccctcagaggcagccacagggggagccactctggcccagaccatttctgaggcagccattgggggagccatgctgggccagaccacctcagaggaggctgtcgggggagccactccggaccagaccacctcagaggagactgtgggaggagccattctggaccagaccacctcagaggatgctgttgggggagccacgctgggccagactacctcagaggaggctgtaggaggagctacactggcccagaccacctcggaggcagccatggagggagccacactggaccagactacgtcagaggaggctccagggggcaccgagctgatccaaactcctctagcctcgagcacagaccaccagacccccccaacctcacctgtgcagggaactacaccccagatatctcccagtacactgattgggagtctcaggaccttggagctaggcagcgaatctcagggggcctcagaatctcaggccccaggagaggagaacctactaggagaggcagctggaggtcaggacatggctgattcgatgctgatgcagggatctaggggcctcactgatcaggccatattttatgctgtgacaccactgccctggtgtccccatttggtggcagtatgccccatacctgcagcaggcctagacgtgacccaaccttgtggggactgtggaacaatccaagagaattgggtgtgtctctcttgctatcaggtctactgtggtcgttacatcaatggccacatgctccaacaccatggaaattctggacacccgctggtcctcagctacatcgacctgtcagcctggtgttactactgtcaggcctatgtccaccaccaggctctcctagatgtgaagaacatcgcccaccagaacaagtttggggaggatatgccccacccacactaagccccagaatacggtccctcttcaccttctgaggcccacgatagaccagctgtagctcattccagcctgtaccttggatgaggggtagcctcccactgcatcccatcctgaatatcctttgcaactccccaagagtgcttatttaagtgttaatacttttaagagaactgcgacgattaattgtggatctccccctgcccattgcctgcttgaggggcaccactactccagcccagaaggaaaggggggcagctcagtggccccaagagggagctgatatcatgaggataacattggcgggaggggagttaactggcaggcatggcaaggttgcatatgtaataaagtacaagctgttaaaaaa

SEQ ID NO: 284076 - DNA, 736 bp, Artificial Sequence
  derived and/or modified sequence
gtacagcgcgtcgacggcggaggcgggaagggggcggaggccgaccgaaggcggctagggactggctgaagaggaaccgcggcaggggccaagcctcctcaactatgacctcaaccggccaggattccaccacaaccaggcagcgaagaagtaggcagaacccccagtcgccccctcaggactccagtgtcacttcgaagcgaaatattaaaaagggagccgttccccgctctatccccaatctagcggaggtaaagaagaaaggcaaaatgaagaagctcggccaagcaatggaagaagacctaatcgtgggactgcaagggatggatctgaaccttgaggctgaagcactggctggcactggcttggtgttggatgagcagttaaatgaattccattgcctctgggatgacagcttcccggaaggccctgagcggctccatgccatcaaggagcaactgatccaggagggcctcctagatcgctgcgtgtcctttcaggcccggtttgctgaaaaggaagagctgatgttggttcacagcctagaatatattgatctgatggaaacaacccagtacatgaatgagggagaactccgtgtcctagcagacacctacgactcagtttatctgcatccgaactcatactcctgtgcctgcctggcctcaggctctgtcctcaggctggtggatgcggtcctgggggctgagatccggaatggcatggccatcattag

SEQ ID NO: 284077 - DNA, 4179 bp, Artificial Sequence
  derived and/or modified sequence
gttagcggtcgggtctgggcagggggtggagctggttgaaggaacggggcagtcccctgaggagcggggctggttgaaacgctaggggcgggatctggcggagtggaaggtaccggtccggcccgataaggggtggaaaccgcggcaggggccaagcctcctcaactatgacctcaaccggccaggattccaccacaaccaggcagcgaagaagtaggcagaacccccagtcgccccctcaggactccagtgtcacttcgaagcgaaatattaaaaagggagccgttccccgctctatccccaatctagcggaggtaaagaagaaaggcaaaatgaagaagctcggccaagcaatggaagaagacctaatcgtgggactgcaagggatggatctgaaccttgaggctgaagcactggctggcactggcttggtgttggatgagcagttaaatgaattccattgcctctgggatgacagcttcccggaaggccctgagcggctccatgccatcaaggagcaactgatccaggagggcctcctagatcgctgcgtgtcctttcaggcccggtttgctgaaaaggaagagctgatgttggttcacagcctagaatatattgatctgatggaaacaacccagtacatgaatgagggagaactccgtgtcctagcagacacctacgactcagtttatctgcatccgaactcatactcctgtgcctgcctggcctcaggctctgtcctcaggctggtggatgcggtcctgggggctgagatccggaatggcatggccatcattaggcctcctggacatcacgcccagcacagtcttatggatggctattgcatgttcaaccacgtggctgtggcagcccgctatgctcaacagaaacaccgcatccggagggtccttatcgtagattgggatgtgcaccacggtcaaggaacacagttcaccttcgaccaggaccccagtgtcctctatttctccatccaccgctacgagcagggtaggttctggccccacctgaaggcctctaactggtccaccacaggtttcggccaaggccaaggatataccatcaatgtgccttggaaccaggtggggatgcgggatgctgactacattgctgctttcctgcacgtcctgctgccagtcgccctcgagttccagcctcagctggtcctggtggctgctggatttgatgccctgcaaggggaccccaagggtgagatggccgccactccggcagggttcgcccagctaacccacctgctcatgggtctggcaggaggcaagctgatcctgtctctggagggtggctacaacctccgcgccctggctgaaggcgtcagtgcttcgctccacacccttctgggagacccttgccccatgctggagtcacctggtgccccctgccggagtgcccaggcttcagtttcctgtgctctggaagcccttgagcccttctgggaggttcttgtgagatcaactgagaccgtggagagggacaacatggaggaggacaatgtagaggagagcgaggaggaaggaccctgggagccccctgtgctcccaatcctgacatggccagtgctacagtctcgcacagggctggtctatgaccaaaatatgatgaatcactgcaacttgtgggacagccaccaccctgaggtaccccagcgcatcttgcggatcatgtgccgtctggaggagctgggccttgccgggcgctgcctcaccctgacaccgcgccctgccacagaggctgagctgctcacctgtcacagtgctgagtacgtgggtcatctccgggccacagagaaaatgaaaacccgggagctgcaccgtgagagttccaactttgactccatctatatctgccccagtaccttcgcctgtgcacagcttgccactggcgctgcctgccgcctggtggaggctgtgctctcaggagaggttctgaatggtgctgctgtggtgcgtcccccaggacaccacgcagagcaggatgcagcttgcggtttttgctttttcaactctgtggctgtggctgctcgccatgcccagactatcagtgggcatgccctacggatcctgattgtggattgggatgtccaccacggtaatggaactcagcacatgtttgaggatgaccccagtgtgctatatgtgtccctgcaccgctatgatcatggcaccttcttccccatgggggatgagggtgccagcagccagatcggccgggctgcgggcacaggcttcaccgtcaacgtggcatggaacgggccccgcatgggtgatgctgactacctagctgcctggcatcgcctggtgcttcccattgcctacgagtttaacccagaactggtgctggtctcagctggctttgatgctgcacggggggatccgctggggggctgccaggtgtcacctgagggttatgcccacctcacccacctgctgatgggccttgccagtggccgcattatccttatcctagagggtggctataacctgacatccatctcagagtccatggctgcctgcactcgctccctccttggagacccaccacccctgctgaccctgccacggcccccactatcaggggccctggcctcaatcactgagaccatccaagtccatcgcagatactggcgcagcttacgggtcatgaaggtagaagacagagaaggaccctccagttctaagttggtcaccaagaaggcaccccaaccagccaaacctaggttagctgagcggatgaccacacgagaaaagaaggttctggaagcaggcatggggaaagtcacctcggcatcatttggggaagagtccactccaggccagactaactcagagacagctgtggtggccctcactcaggaccagccctcagaggcagccacagggggagccactctggcccagaccatttctgaggcagccattgggggagccatgctgggccagaccacctcagaggaggctgtcgggggagccactccggaccagaccacctcagaggagactgtgggaggagccattctggaccagaccacctcagaggatgctgttgggggagccacgctgggccagactacctcagaggaggctgtaggaggagctacactggcccagaccacctcggaggcagccatggagggagccacactggaccagactacgtcagaggaggctccagggggcaccgagctgatccaaactcctctagcctcgagcacagaccaccagacccccccaacctcacctgtgcagggaactacaccccagatatctcccagtacactgattgggagtctcaggaccttggagctaggcagcgaatctcagggggcctcagaatctcaggccccaggagaggagaacctactaggagaggcagctggaggtcaggacatggctgattcgatgctgatgcagggatctaggggcctcactgatcaggccatattttatgctgtgacaccactgccctggtgtccccatttggtggcagtatgccccatacctgcagcaggcctagacgtgacccaaccttgtggggactgtggaacaatccaagagaattgggtgtgtctctcttgctatcaggtctactgtggtcgttacatcaatggccacatgctccaacaccatggaaattctggacacccgctggtcctcagctacatcgacctgtcagcctggtgttactactgtcaggcctatgtccaccaccaggctctcctagatgtgaagaacatcgcccaccagaacaagtttggggaggatatgccccacccacactaagccccagaatacggtccctcttcaccttctgaggcccacgatagaccagctgtagctcattccagcctgtaccttggatgaggggtagcctcccactgcatcccatcctgaatatcctttgcaactccccaagagtgcttatttaagtgttaatacttttaagagaactgcgacgattaattgtggatctccccctgcccattgcctgcttgaggggcaccactactccagcccagaaggaaaggggggcagctcagtggccccaagagggagctgatatcatgaggataacattggcgggaggggagttaactggcaggcatggcaaggttgcatatgtaataaagtacaagctgttaaaaaa

SEQ ID NO: 284078 - DNA, 907 bp, Artificial Sequence
  derived and/or modified sequence
agctggcgtagcacgccgacgcaccgccccgccgcttgtgagctcgcgagaggtgtggctcgcgcgaggggcgcggccttgaggcacggtcccctctggaggcgggatctgggcgggcagtcgagagacgaggcccaatggaaaagaaaagcctgagcgctcgcgtccccacaggtcgccagaaacttggtggagcgagccaagggcggagtttgagaaaggggctgcgtccaatgagtggagcgaaccgcggcaggggccaagcctcctcaactatgacctcaaccggccaggattccaccacaaccaggcagcgaagaagtaggcagaacccccagtcgccccctcaggactccagtgtcacttcgaagcgaaatattaaaaagggagccgttccccgctctatccccaatctagcggaggtaaagaagaaaggcaaaatgaagaagctcggccaagcaatggaagaagacctaatcgtgggactgcaagggatggatctgaaccttgaggctgaagcactggctggcactggcttggtgttggatgagcagttaaatgaattccattgcctctgggatgacagcttcccggaaggccctgagcggctccatgccatcaaggagcaactgatccaggagggcctcctagatcgctgcgtgtcctttcaggcccggtttgctgaaaaggaagagctgatgttggttcacagcctagaatatattgatctgatggaaacaacccagtacatgaatgagggagaactccgtgtcctagcagacacctacgactcagtttatctgcatccgaactcatactcctgtgcctgcctggcctcaggctctgtcctcaggctggtggatgcggtcctgggggctgagatccggaatggcatggccatcattag

SEQ ID NO: 284079 - DNA, 583 bp, Artificial Sequence
  derived and/or modified sequence
agcccgcccgcgctacgtcatcacggcgcgtcgcgcgggaagtcgcggggaaaaggtcgccagaaacttggtggagcgagccaagggcggagtttgagaaaggggctgcgtccaatgagtggagcgaaccgcggcaggggccaagcctcctcaactatgacctcaaccggccaggattccaccacaaccaggcagcgaagaagtaggcagaacccccagtcgccccctcaggactccagtgtcacttcgaagcgaaatattaaaaagggagccgttccccgctctatccccaatctagcggaggtaaagaagaaaggcaaaatgaagaagctcggccaagcaatggaagaagacctaatcgtgggactgcaagggatggatctgaaccttgaggctgaagcactggctggcactggcttggtgttggatgagcagttaaatgaattccattgcctctgggatgacagcttcccggaaggccctgagcggctccatgccatcaaggagcaactgatccaggagggcctcctagatcgctgcgtgtcctttcaggcccggtttgctgaaaaggaagagctgatgt

SEQ ID NO: 284080 - DNA, 2544 bp, Artificial Sequence
  derived and/or modified sequence
gggcagtcccctgaggagcggggctggttgaaacgctaggggcgggatctggcggagtggaagaaccgcggcaggggccaagcctcctcaactatgacctcaaccggccaggattccaccacaaccaggcagcgaagaagtaggcagaacccccagtcgccccctcaggactccagtgtcacttcgaagcgaaatattaaaaagggagccgttccccgctctatccccaatctagcggaggtaaagaagaaaggcaaaatgaagaagctcggccaagcaatggaagaagacctaatcgtgggactgcaagggatggatctgaaccttgaggctgaagcactggctggcactggcttggtgttggatgagcagttaaatgaattccattgcctctgggatgacagcttcccggaaggccctgagcggctccatgccatcaaggagcaactgatccaggagggcctcctagatcgctgcgtgtcctttcaggcccggtttgctgaaaaggaagagctgatgttggttcacagcctagaatatattgatctgatggaaacaacccagtacatgaatgagggagaactccgtgtcctagcagacacctacgactcagtttatctgcatccgaactcatactcctgtgcctgcctggcctcaggctctgtcctcaggctggtggatgcggtcctgggggctgagatccggaatggcatggccatcattaggcctcctggacatcacgcccagcacagtcttatggatggctattgcatgttcaaccacgtggctgtggcagcccgctatgctcaacagaaacaccgcatccggagggtccttatcgtagattgggatgtgcaccacggtcaaggaacacagttcaccttcgaccaggaccccagtgtcctctatttctccatccaccgctacgagcagggtaggttctggccccacctgaaggcctctaactggtccaccacaggtttcggccaaggccaaggatataccatcaatgtgccttggaaccaggtggggatgcgggatgctgactacattgctgctttcctgcacgtcctgctgccagtcgccctcgagttccagcctcagctggtcctggtggctgctggatttgatgccctgcaaggggaccccaagggtgagatggccgccactccggcagggttcgcccagctaacccacctgctcatgggtctggcaggaggcaagctgatcctgtctctggagggtggctacaacctccgcgccctggctgaaggcgtcagtgcttcgctccacacccttctgggagacccttgccccatgctggagtcacctggtgccccctgccggagtgcccaggcttcagtttcctgtgctctggaagcccttgagcccttctgggaggttcttgtgagatcaactgagaccgtggagagggacaacatggaggaggacaatgtagaggagagcgaggaggaaggaccctgggagccccctgtgctcccaatcctgacatggccagtgctacagtctcgcacagggctggtctatgaccaaaatatgatgaatcactgcaacttgtgggacagccaccaccctgaggtaccccagcgcatcttgcggatcatgtgccgtctggaggagctgggccttgccgggcgctgcctcaccctgacaccgcgccctgccacagaggctgagctgctcacctgtcacagtgctgagtacgtgggtcatctccgggccacagagaaaatgaaaacccgggagctgcaccgtgagagttccaactttgactccatctatatctgccccagtaccttcgcctgtgcacagcttgccactggcgctgcctgccgcctggtggaggctgtgctctcaggagaggttctgaatggtgctgctgtggtgcgtcccccaggacaccacgcagagcaggatgcagcttgcggtttttgctttttcaactctgtggctgtggctgctcgccatgcccagactatcagtgggcatgccctacggatcctgattgtggattgggatgtccaccacggtaatggaactcagcacatgtttgaggatgaccccagtgtgctatatgtgtccctgcaccgctatgatcatggcaccttcttccccatgggggatgagggtgccagcagccagatcggccgggctgcgggcacaggcttcaccgtcaacgtggcatggaacgggccccgcatgggtgatgctgactacctagctgcctggcatcgcctggtgcttcccattgcctacgagtttaacccagaactggtgctggtctcagctggctttgatgctgcacggggggatccgctggggggctgccaggtgtcacctgagggttatgcccacctcaccctgcccattgcctgcttgaggggcaccactactccagcccagaaggaaaggggggcagctcagtggccccaagagggagctgatatcatgaggataacattggcgggaggggagttaactggcaggcatggcaaggttgcatatgtaataaagtacaagctg

SEQ ID NO: 284081 - DNA, 610 bp, Artificial Sequence
  derived and/or modified sequence
atcacggcgcgtcgcgcgggaagtcgcggggaaaaggtaagatgccccttcctaattccctcgcttccttgcttgctctccagacaccgccgacccgaagggctcctaagtgactggacagggacggaggggcggcggctatggcatccgggacgacagcgacgatagccgaggcaagaaaaagcttgcaccgcagccctgtcgggaaccgccggcgcctgccttttacgtaggcgcagcacagctggcgtagcacgccgacgcaccgccccgtcgcctgtgagctcgcggtgtggctcagcccagctggcgtagcacgccgacgcaccgccccgccgcttgtgagctcgcgagaggtcgccagaaacttggtggagcgagccaagggcggagtttgagaaaggggctgcgtccaatgagtggagcgaaccgcggcaggggccaagcctcctcaactatgacctcaaccggccaggattccaccacaaccaggcagcgaagaagtaggcagaacccccagtcgccccctcaggactccagtgtcacttcgaagcgaaatattaaaaagggagccgttccccgctctatccccaatctagcggaggtaaag

SEQ ID NO: 284082 - DNA, 658 bp, Artificial Sequence
  derived and/or modified sequence
gcgtaaggaatggaatctaatagagggggcggagcctggaaaagggcagagaggtggggtcctcagggcacactagccccctcacatacccacgctcctccccccacccccagaaccgcggcaggggccaagcctcctcaactatgacctcaaccggccaggattccaccacaaccaggcagcgaagaagtaggcagaacccccagtcgccccctcaggactccagtgtcacttcgaagcgaaatattaaaaagggagccgttccccgctctatccccaatctagcggaggtaaagaagaaaggcaaaatgaagaagctcggccaagcaatggaagaagacctaatcgtgggactgcaagggatggatctgaaccttgaggctgaagcactggctggcactggcttggtgttggatgagcagttaaatgaattccattgcctctgggatgacagcttcccggaaggccctgagcggctccatgccatcaaggagcaactgatccaggagggcctcctagatcgctgcgtgtcctttcaggcccggtttgctgaaaaggaagagctgatgttggttcacagcctagaatatattgatctgatggaaacaacccagtacatgaatgagggagaactccgtgtcctagcagacacctacga

SEQ ID NO: 284083 - DNA, 599 bp, Artificial Sequence
  derived and/or modified sequence
agggtggagtcgaaaccggggtcggggccggggccggctgagtgaaagggtgggtgattatcccgggagataggccgaaagggcagaaccgcggcaggggccaagcctcctcaactatgacctcaaccggccaggattccaccacaaccaggcagcgaagaagtaggcagaacccccagtcgccccctcaggactccagtgtcacttcgaagcgaaatattaaaaagggagccgttccccgctctatccccaatctagcggaggtaaagaagaaaggcaaaatgaagaagctcggccaagcaatggaagaagacctaatcgtgggactgcaagggatggatctgaaccttgaggctgaagcactggctggcactggcttggtgttggatgagcagttaaatgaattccattgcctctgggatgacagcttcccggaaggccctgagcggctccatgccatcaaggagcaactgatccaggagggcctcctagatcgctgcgtgtcctttcaggcccggtttgctgaaaaggaagagctgatgttggttcacagcctagaatatattgatctgatggaaacaacccagtacatgaatgag

SEQ ID NO: 284084 - DNA, 568 bp, Artificial Sequence
  derived and/or modified sequence
gaggcggagtttggaaggctgtggagaatcagatcgcaaccgcggcaggggccaagcctcctcaactatgacctcaaccggccaggattccaccacaaccaggcagcgaagaagtaggcagaacccccagtcgccccctcaggactccagtgtcacttcgaagcgaaatattaaaaagggagccgttccccgctctatccccaatctagcggaggtaaagaagaaaggcaaaatgaagaagctcggccaagcaatggaagaagacctaatcgtgggactgcaagggatggatctgaaccttgaggctgaagcactggctggcactggcttggtgttggatgagcagttaaatgaattccattgcctctgggatgacagcttcccggaaggccctgagcggctccatgccatcaaggagcaactgatccaggagggcctcctagatcgctgcgtgtcctttcaggcccggtttgctgaaaaggaagagctgatgttggttcacagcctagaatatattgatctgatggaaacaacccagtacatgaatgagggagaactccgtgtccta

SEQ ID NO: 284085 - DNA, 3887 bp, Artificial Sequence
  derived and/or modified sequence
agaaacttggtggagcgagccaagggcggagtttgagaaaggggctgcgtccaatgagtggagcgaaccgcggcaggggccaagcctcctcaactatgacctcaaccggccaggattccaccacaaccaggcagcgaagaagtaggcagaacccccagtcgccccctcaggactccagtgtcacttcgaagcgaaatattaaaaagggagccgttccccgctctatccccaatctagcggaggtaaagaagaaaggcaaaatgaagaagctcggccaagcaatggaagaagacctaatcgtgggactgcaagggatggatctgaaccttgaggctgaagcactggctggcactggcttggtgttggatgagcagttaaatgaattccattgcctctgggatgacagcttcccggaaggccctgagcggctccatgccatcaaggagcaactgatccaggagggcctcctagatcgctgcgtgtcctttcaggcccggtttgctgaaaaggaagagctgatgttggttcacagcctagaatatattgatctgatggaaacaacccagtacatgaatgagggagaactccgtgtcctagcagacacctacgactcagtttatctgcatccgaactcatactcctgtgcctgcctggcctcaggctctgtcctcaggctggtggatgcggtcctgggggctgagatccggaatggcatggccatcattaggcctcctggacatcacgcccagcacagtcttatggatggctattgcatgttcaaccacgtggctgtggcagcccgctatgctcaacagaaacaccgcatccggagggtccttatcgtagattgggatgtgcaccacggtcaaggaacacagttcaccttcgaccaggaccccagtgtcctctatttctccatccaccgctacgagcagggtaggttctggccccacctgaaggcctctaactggtccaccacaggtttcggccaaggccaaggatataccatcaatgtgccttggaaccaggtggggatgcgggatgctgactacattgctgctttcctgcacgtcctgctgccagtcgccctcgagttccagcctcagctggtcctggtggctgctggatttgatgccctgcaaggggaccccaagggtgagatggccgccactccggcagggttcgcccagctaacccacctgctcatgggtctggcaggaggcaagctgatcctgtctctggagggtggctacaacctccgcgccctggctgaaggcgtcagtgcttcgctccacacccttctgggagacccttgccccatgctggagtcacctggtgccccctgccggagtgcccaggcttcagtttcctgtgctctggaagcccttgagcccttctgggaggttcttgtgagatcaactgagaccgtggagagggacaacatggaggaggacaatgtagaggagagcgaggaggaaggaccctgggagccccctgtgctcccaatcctgacatggccagtgctacagtctcgcacagggctggtctatgaccaaaatatgatgaatcactgcaacttgtgggacagccaccaccctgaggtaccccagcgcatcttgcggatcatgtgccgtctggaggagctgggccttgccgggcgctgcctcaccctgacaccgcgccctgccacagaggctgagctgctcacctgtcacagtgctgagtacgtgggtcatctccgggccacagagaaaatgaaaacccgggagctgcaccgtgagagttccaactttgactccatctatatctgccccagtaccttcgcctgtgcacagcttgccactggcgctgcctgccgcctggtggaggctgtgctctcaggagaggttctgaatggtgctgctgtggtgcgtcccccaggacaccacgcagagcaggatgcagcttgcggtttttgctttttcaactctgtggctgtggctgctcgccatgcccagactatcagtgggcatgccctacggatcctgattgtggattgggatgtccaccacggtaatggaactcagcacatgtttgaggatgaccccagtgtgctatatgtgtccctgcaccgctatgatcatggcaccttcttccccatgggggatgagggtgccagcagccagatcggccgggctgcgggcacaggcttcaccgtcaacgtggcatggaacgggccccgcatgggtgatgctgactacctagctgcctggcatcgcctggtgcttcccattgcctacgagtttaacccagaactggtgctggtctcagctggctttgatgctgcacggggggatccgctggggggctgccaggtgtcacctgagggttatgcccacctcacccacctgctgatgggccttgccagtggccgcattatccttatcctagagggtggctataacctgacatccatctcagagtccatggctgcctgcactcgctccctccttggagacccaccacccctgctgaccctgccacggcccccactatcaggggccctggcctcaatcactgagaccatccaagtccatcgcagatactggcgcagcttacgggtcatgaaggtagaagacagagaaggaccctccagttctaagttggtcaccaagaaggcaccccaaccagccaaacctaggttagctgagcggatgaccacacgagaaaagaaggttctggaagcaggcatggggaaagtcacctcggcatcatttggggaagagtccactccaggccagactaactcagagacagctgtggtggccctcactcaggaccagccctcagaggcagccacagggggagccactctggcccagaccatttctgaggcagccattgggggagccatgctgggccagaccacctcagaggaggctgtcgggggagccactccggaccagaccacctcagaggagactgtgggaggagccattctggaccagaccacctcagaggatgctgttgggggagccacgctgggccagactacctcagaggaggctgtaggaggagctacactggcccagaccacctcggaggcagccatggagggagccacactggaccagactacgtcagaggaggctccagggggcaccgagctgatccaaactcctctagcctcgagcacagaccaccagacccccccaacctcacctgtgcagggaactacaccccagatatctcccagtacactgattgggagtctcaggaccttggagctaggcagcgaatctcagggggcctcagaatctcaggccccaggagaggagaacctactaggagaggcagctggaggtcaggacatggctgattcgatgctgatgcagggatctaggggcctcactgatcaggccatattttatgctgtgacaccactgccctggtgtccccatttggtggcagtatgccccatacctgcagcaggcctagacgtgacccaaccttgtggggactgtggaacaatccaagagaattgggtgtgtctctcttgctatcaggtctactgtggtcgttacatcaatggccacatgctccaacaccatggaaattctggacacccgctggtcctcagctacatcgacctgtcagcctggtgttactactgtcaggcctatgtccaccaccaggctctcctagatgtgaagaacatcgcccaccagaacaagtttggggaggatatgccccacccacactaagccccagaatacggtccctcttcaccttctgaggcccacgatagaccagctgtagctcattccagcctgtaccttggatgaggggtagcctcccactgcatcccatcctgaatatcctttgcaactccccaagagtgcttattt

SEQ ID NO: 284086 - DNA, 3690 bp, Artificial Sequence
  derived and/or modified sequence
atgtctggggccaacagaggccggggccaggccagcagcaccatgaccagcacaggccaggacagcaccaccacccggcagaggaggagccggcagaacccccagagccccccccaggacagctctgtgaccagcaagaggaacatcaagaagggagctgtgcccaggagcatccccaacctggccgaggtgaagaagaagggcaagatgaagaagctgggccaggccatggaggaggacctgattgtgggcctgcagggcatggacctgaacctggaggccgaggccctggccggcaccggcctggtgctggatgagcagctgaatgagttccactgcctgtgggatgacagcttccctgagggccctgagcggctgcacgccatcaaggagcagctgatccaggagggcctgctggacagatgtgtgtccttccaggccaggtttgctgagaaggaggagctgatgctggtgcacagcctggagtacatcgacctgatggagaccacccagtacatgaatgaaggagagctgcgggtgctggccgacacctatgattctgtgtacctgcaccccaacagctacagctgtgcctgcctggccagcggctctgtgctgcggctggtggatgctgtgctgggcgctgagatcagaaatggcatggccatcatccggcccccaggccaccacgcccagcacagcctgatggatggctactgcatgttcaaccacgtggccgtggccgcccgctatgcccagcagaagcaccgcatcagaagagtgctgattgtggactgggatgtgcaccacggccagggcacccagttcacctttgaccaggaccccagcgtgctgtacttcagcatccacagatatgagcagggccgcttctggccccacctgaaggccagcaactggagcaccactggatttggccagggccagggctacaccatcaacgtgccctggaaccaggtgggcatgagagatgctgactacatcgccgccttcctgcacgtgctgctgcctgtggccctggagttccagccccagctggtgctggtggccgccggctttgatgccctgcagggcgaccccaagggggagatggccgccaccccagctggctttgcccagctgacccacctgctgatgggcctggccggcggcaagctgatcctgagcctggagggcggctacaacctgcgggccctggccgagggcgtgtctgccagcctgcacaccctgctgggggacccctgccccatgctggagagccctggggccccctgccgcagcgcccaggcctctgtgtcctgtgccctggaggccctggagcccttctgggaggtgctggtgcgcagcacagagaccgtggagcgggacaacatggaggaggacaacgtggaggagagcgaggaggagggcccctgggagccccctgtgctgcccatcctgacctggcctgtgctgcagagcaggacaggcctggtgtatgaccagaacatgatgaaccactgcaacctgtgggacagccaccaccctgaggtgccccagaggatcctgcgcatcatgtgccgcctggaggagctgggcctggccggccgctgcctgaccctgacccccaggcctgccacagaggccgagctgctgacctgccacagcgcagaatatgtgggccacctgcgggccacagagaagatgaagacccgggagctgcaccgggagagcagcaactttgacagcatctacatctgccccagcacctttgcctgtgcccagctggccactggagctgcctgccgcctggtggaggccgtgctgtctggagaggtgctgaatggagctgctgtggtgcggcccccaggccaccacgccgagcaggatgctgcctgtggcttctgcttcttcaacagcgtggccgtggccgcccggcatgcccagaccatcagcggccacgccctgcgcatcctgattgtggactgggatgtgcaccacggcaatggcacccagcacatgtttgaagatgaccccagcgtgctgtatgtgtccctgcacagatatgaccacggcaccttcttccccatgggagatgagggcgccagcagccagatcggccgggctgctggcaccggcttcaccgtgaatgtggcctggaatggccccaggatgggagatgctgactacctggccgcctggcaccggctggtgctgcccatcgcctatgagttcaaccctgagctggtgctggtgtctgctggctttgatgctgcccggggggaccccctgggcggctgccaggtgtccccagagggctacgcccacctgacccacctgctgatgggcctggccagcggccgcatcatcctgatcctggagggcggctacaacctgaccagcatcagcgagagcatggccgcctgcaccaggagcctgctgggggaccccccacccctgctgaccctgcccaggcctcccctgagcggggccctggccagcatcacagagaccatccaggtgcaccggcgctactggaggagcctgcgggtgatgaaggtggaggaccgggagggccccagcagcagcaagctggtgaccaagaaggccccccagcctgccaagccccggctggccgagaggatgaccacccgggagaagaaggtgctggaggccggcatgggcaaggtgaccagcgccagctttggagaggagagcaccccaggccagaccaacagcgagacagctgtggtggccctgacccaggaccagcccagcgaggccgccactggaggagccaccctggcccagaccatcagcgaggccgccatcggcggggccatgctgggccagaccaccagcgaggaggccgtgggcggggccaccccagaccagaccaccagcgaggagaccgtgggcggggccatcctggaccagaccaccagtgaagatgctgtgggcggggccaccctgggccagaccaccagcgaggaggccgtgggcggggccaccctggcccagaccaccagcgaggccgccatggagggcgccaccctggaccagaccaccagcgaggaggcccctgggggcacagagctgatccagacccccctggccagcagcacagaccaccagaccccacccaccagccctgtgcagggcaccaccccccagatcagccccagcaccctcatcggcagcctgcggaccctggagctgggcagcgagagccagggcgccagcgagagccaggcccctggagaggagaacctgctgggggaggccgccggcggccaggacatggctgacagcatgctgatgcagggcagccggggcctgacagaccaggccatcttctatgctgtgacccccctgccctggtgcccccacctggtggccgtgtgccccatcccagctgctggcctggatgtgacccagccctgtggggactgtggcaccatccaggagaactgggtgtgcctgagctgctaccaggtgtactgcggccgctacatcaatggccacatgctgcagcaccacggcaacagcggccaccccctggtgctgagctacatcgacctgagcgcctggtgctactactgccaggcctacgtgcaccaccaggccctgctggatgtgaagaacatcgcccaccagaacaagtttggagaggacatgccccacccccactag

SEQ ID NO: 284087 - DNA, 3690 bp, Artificial Sequence
  derived and/or modified sequence
atgagcggcgccaaccggggccggggccaggccagcagcaccatgaccagcaccggccaggacagcaccactacacggcagcgcaggtctaggcagaatcctcagagtccccctcaggacagctccgtgacgtccaaacgaaatatcaaaaagggagctgtcccgagatccatcccaaacctcgctgaggttaaaaagaaggggaagatgaaaaaactgggccaagccatggaggaagacctcattgtcgggttgcagggcatggacctgaatttagaggccgaagctcttgctggcacaggtcttgtcctggacgaacagcttaacgaattccactgcctgtgggatgacagtttccccgaggggccagagaggctgcatgccatcaaggagcagttgattcaggagggcctgcttgatcggtgcgtgtcgttccaggctagattcgccgagaaggaggagcttatgctagttcattccctggaatacatcgacctgatggagaccacccagtacatgaatgaaggagaactccgggtcttggcagacacttacgattctgtgtatctgcaccccaactcctactcgtgcgcttgtctggccagcggcagcgtactgagactggtggacgcagtcctcggggctgagatccgcaacggtatggcgatcatccgccctcccgggcatcacgctcagcatagcctcatggacgggtattgtatgtttaatcacgtcgcagttgcggctcgttatgcacagcagaaacaccgcatccgtagagtgctgattgtcgactgggacgttcatcatggccagggaacccagttcacctttgatcaggacccaagcgtgctgtacttttcaattcatcgctacgaacaagggcggttttggccacatctcaaagcctcaaattggagcactacaggctttgggcaaggccaagggtacaccatcaacgtcccctggaatcaggtcggaatgcgcgacgcggattatatcgcagctttcctgcacgtgctcttaccagtggctcttgagtttcagccacagctggtgctggtggcggctggatttgacgcacttcagggcgaccccaagggtgagatggctgctactcctgctggctttgcacagctcacccatcttctgatgggcctggccgggggcaaactgattctgtctttagagggaggctataatttacgcgccctggctgaaggcgtgtccgcaagcctgcacacattactgggagacccatgccctatgctagagtcaccgggagcaccctgtaggtctgctcaggcctcggtttcttgtgcgctggaagctctcgagcccttctgggaagttctagtgcggtcaaccgagaccgtggaaagagataacatggaagaagacaacgtcgaggaatctgaggaggagggaccttgggagcctcctgttctgcccatactcacttggcctgtactccagtcacggaccggactggtgtacgatcaaaatatgatgaaccattgcaacctttgggatagtcaccacccagaagtaccccagcggatcttgcggataatgtgccggctggaagagctcggactggccggcagatgtctaacgctcacaccaaggcccgccacagaggcagagctcctgacgtgccattccgccgaatacgtcgggcacctccgcgccacagaaaaaatgaagaccagggagctgcaccgggagagctccaacttcgatagcatttacatctgtccttctacgttcgcatgtgcgcaattagctaccggggccgcttgtaggcttgtcgaggccgtactgtctggtgaggtacttaacggcgctgcggttgttcggccccccggccatcacgccgaacaggatgccgcttgtggtttctgcttctttaattctgtggccgtggctgctaggcatgcgcagaccatttccggccacgccctgcgtatactgatcgttgactgggacgttcatcacgggaacgggacccaacacatgttcgaggacgatcccagcgtcctttacgttagtctgcacaggtacgaccacggcacttttttccccatgggggacgagggtgcatctagccagatcggccgcgccgccggcacaggctttaccgttaacgtcgcatggaacgggcccagaatgggcgacgccgactatctagccgcttggcatagactggtgctccccattgcctatgagttcaatcccgagttagtgttagtgtcagccggttttgatgctgcccgcggcgatccccttgggggctgtcaggtgagcccggagggatacgcccacctgacccatctgctgatggggctagcctcgggacgcatcatacttatcctcgagggcggctacaacctgacgagcatctccgagtccatggccgcatgtacaagatctctgctgggtgaccccccccctctgctcactcttcctcgaccacctctcagtggagcactggcaagtattactgaaactatccaggttcacagacgctactggcgcagccttcgggtaatgaaagtggaggaccgggaaggcccttcgagttctaagctggtgaccaaaaaggctccacaaccagctaagccacgattggccgagcggatgacaacacgagagaagaaggtgctggaggccggcatgggcaaggtaacctcggctagcttcggcgaggagagcactccgggccagactaatagtgaaacagccgtcgttgcactgacgcaagaccaaccaagcgaagcagccaccggtggggccacccttgcccagaccattagcgaggcggcgataggcggcgctatgctcggccagacgacatccgaggaggccgttggaggcgccacccccgaccagactacatcggaagagacagtgggcggagccattcttgatcagaccacatccgaggatgccgtgggaggggctactctggggcagactacatcagaagaagcagtgggcggtgccaccctggcacaaaccacatccgaggctgccatggaaggcgccacactggaccagactacctctgaagaggccccaggggggacagaacttatccaaactcccctggcaagttccaccgatcatcagacacccccaaccagcccagtgcagggtaccaccccccaaatttcaccatccaccctgattggctccttgagaactctggagcttggatccgagtcccaaggcgcctccgaatcccaggcacctggcgaggagaaccttctgggcgaagctgccggagggcaagacatggcagatagcatgctgatgcagggctcaagaggactgacggatcaagcaatcttttatgccgtaacccctctgccctggtgcccccacttagtcgctgtgtgccctatcccggctgctggtctggatgtgacacaaccctgcggcgactgtggaacaattcaggagaattgggtgtgtttgtcatgctaccaggtatactgtgggcggtatataaacgggcacatgctacagcaccacggaaactcaggacatccacttgtcttaagttatatcgatctgagtgcttggtgctactattgccaggcgtatgtgcaccaccaggcgctgttagatgttaaaaatattgcccatcagaacaagttcggtgaggacatgccacatccacattag

SEQ ID NO: 284088 - DNA, 3690 bp, Artificial Sequence
  derived and/or modified sequence
atgtcaggcgctaacaggggaagaggacaggcatcaagtactatgacaagtacaggacaggactcaacaaccacgcggcagaggcgctcaagacagaacccacagtctccgccacaagatagttccgtgacctccaagcgaaacatcaaaaagggcgctgtgcccagatccatccccaacctcgccgaagtgaagaagaaaggaaagatgaagaagttgggccaggctatggaggaagatctcattgttggcttgcagggcatggatctgaatctcgaggcagaggccctcgctggtactgggcttgtcctggatgagcaactgaacgagttccactgtttgtgggacgactcgttcccagagggtccagagcgacttcacgccattaaggagcaacttattcaagagggccttctcgatagatgtgtgagttttcaggcacgctttgcagagaaggaagagctaatgttggtccacagcctggagtatatcgacctcatggagactacacagtatatgaatgaaggcgagctcagagtgttggccgacacttacgactctgtgtacctgcatcctaactcttactcctgtgcatgtctggcatcagggagcgtgctccgcctagtagacgcagtattgggcgctgagatcaggaacggcatggccatcattagaccccctggccatcacgcacaacattctctcatggacggctactgtatgtttaaccatgtggctgtggctgccaggtatgcccagcaaaagcacaggatccgtagagtcctcatcgtggattgggacgtgcaccacgggcagggtacccagttcacctttgaccaagaccctagtgtgctctacttctccattcatcggtatgaacaaggtaggttttggccacacctcaaagctagcaattggtccacaaccggcttcggtcaggggcaagggtacaccataaatgtcccatggaaccaggtgggcatgagagacgctgattacattgctgcttttcttcatgtcctgctgcctgtggctctggaattccaaccacagctcgtcttggtcgcagctgggttcgacgccctgcagggcgaccccaaaggcgaaatggctgcaacgcccgcaggatttgctcagttgacacacctcttaatggggttagccggaggtaaacttatcctgtctttagaaggaggttacaatcttcgggcacttgcggagggagtaagtgctagtctgcatacactattgggggatccctgtccgatgctcgagagcccgggagcaccctgtaggtctgctcaggcaagcgtgtcatgtgcattagaagccctcgaacctttctgggaggtactggtgcggagtaccgaaactgtggagagggataatatggaggaagacaatgtcgaggaatctgaggaagaaggaccttgggaaccacctgtgctcccaatattgacctggcccgtcctgcagagccgcactggtctcgtttacgatcaaaatatgatgaaccactgtaatctctgggactctcatcaccccgaggtgcctcaaagaatccttcgcatcatgtgcagactggaagagctcggtctcgcagggagatgcctgacgctgacgcctagacccgctactgaagctgagctgctcacttgccattcagcagaatacgtgggccatctcagagcaacagaaaaaatgaaaaccagagaactgcaccgagaaagcagcaactttgactcaatttacatctgcccctccacttttgcctgcgcccaactggcaaccggcgctgcctgtcggctagtagaggcggtactgagcggcgaggtcctgaatggtgccgcagtcgtacggcctccgggacaccatgcggaacaggacgcggcttgtggcttttgtttcttcaattctgtcgctgtagccgctcgccacgcccagacgattagcggccacgcacttagaatcctcatcgtggactgggatgtgcaccacggcaatggcacacagcacatgtttgaagatgacccttccgtgctatatgtgtccttacaccggtatgaccacggaaccttcttccccatgggagacgagggtgcttcaagtcagattgggagggctgccggaacgggcttcactgtgaacgtcgcatggaatgggcctcggatgggcgacgctgactacctcgcagcgtggcatcgactcgttctccctatcgcttatgaattcaaccccgaactggtcctcgtgtctgcaggatttgacgccgctaggggagatccactggggggatgtcaagtgtcacctgaggggtacgcccacctcacccacctcctcatgggccttgcgagcggtcgcattatcctgatcctggagggtggatataatttgactagtatcagtgaatccatggcagcctgtacaagaagcctccttggtgatcctcctcctctccttacgttgcctcgcccaccactgtctggtgctttagcctccattactgagactatacaggtgcacaggcgttattggcggtcactgcgcgtgatgaaagttgaggatagagaagggccaagctcgtccaaactggtaacaaagaaggcaccccagcctgcaaagccccgacttgccgagcgtatgactactagagagaaaaaggtactggaagccggaatgggcaaagtgacgagtgcaagctttggcgaagagtcgacacccggtcagaccaatagtgaaactgccgtcgttgcgttgacgcaggaccagccttcagaagccgctaccgggggagcgacattggcacagaccatttcagaagccgcaattggcggtgcaatgctcggccaaaccacttccgaagaagccgtaggcggagcaaccccagaccaaacaacttctgaggagacggtcgggggagctatcctcgaccagaccacctcagaggacgctgtgggtggcgcaacgttagggcagacaacgtccgaagaggcagtgggcggagctacacttgctcagaccactagcgaagccgctatggaaggggctacactggaccagactacgagtgaggaagcgcctggtgggacggaactgatacagactccccttgcctcctcgactgatcaccaaacccccccaacgtcccccgtacaggggaccacaccgcaaatctccccatccacactgatcggaagtttgaggaccctcgagctcggctctgagtcccagggtgccagtgaaagccaggctcctggcgaagaaaatctgctgggcgaggcggctggtgggcaagacatggctgatagcatgctgatgcagggatcaagaggactgacagatcaagcgatcttctacgcggtcactcccctgccctggtgcccacacctagtggctgtttgtccaatccctgcggctggcctcgatgttacgcaaccctgtggcgactgtggcaccatacaagaaaattgggtgtgtctgagttgttatcaggtgtactgtggcaggtacatcaacgggcatatgctgcagcaccacggcaattcaggccacccccttgttctatcgtacattgacttgagcgcatggtgttattactgccaggcctacgtgcaccaccaagccctgctggacgttaagaacatcgcccaccaaaacaaattcggtgaagacatgccccacccccactag

SEQ ID NO: 284089 - protein, 170 aa, Artificial Sequence
  derived and/or modified sequence
MPLPVALQTRLAKRGILKHLEPEPEEEIIAEDYDDDPVDYEATRLEGLPPSWYKVFDPSCGLPYYWNADTDLVSWLSPHDPNSVVTKSAKKLRSSNAAVSRKDEELDPMDPSSYSDAPRGTWSTGLPKRNEAKTGADTTAAGPLFQQRPYPSPGAVLRANAEASRTKQQD

SEQ ID NO: 284090 - protein, 150 aa, Artificial Sequence
  derived and/or modified sequence
  misc_feature (1)..(1): Xaa can be any naturally occurring amino acid
XIATYLLHLLVQPEEEIIAEDYDDDPVDYEATRLEGLPPSWYKVFDPSCGLPYYWNADTDLVSWLSPHDPNSVVTKSAKKLRSSNAAVSRKDEELDPMDPSSYSDAPRGTWSTGLPKRNEAKTGADTTAAGPLFQQRPYPSPGAVLRANA

SEQ ID NO: 284091 - DNA, 513 bp, Artificial Sequence
  derived and/or modified sequence
atgcccctgcccgtggccctgcagaccagactggccaagagaggcatcctgaagcacctggagcccgagcccgaggaggagatcatcgccgaggactacgacgacgaccccgtggactacgaggccaccagactggagggcctgccccccagctggtacaaggtgttcgaccccagctgcggcctgccctactactggaacgccgacaccgacctggtgagctggctgagcccccacgaccccaacagcgtggtgaccaagagcgccaagaagctgagaagcagcaacgccgccgtgagcagaaaggacgaggagctggaccccatggaccccagcagctacagcgacgcccccagaggcacctggagcaccggcctgcccaagagaaacgaggccaagaccggcgccgacaccaccgccgccggccccctgttccagcagagaccctaccccagccccggcgccgtgctgagagccaacgccgaggccagcagaaccaagcagcaggactag

SEQ ID NO: 284092 - DNA, 513 bp, Artificial Sequence
  derived and/or modified sequence
atgccgctgcccgtcgccctacagacaaggctagccaaacgcggcattttgaaacaccttgagcccgaacctgaagaggagatcatagcagaggattatgacgatgacccagtggattatgaggcaacgcggcttgaaggactccccccatcctggtataaggtgttcgatccctcgtgtggactgccctactactggaatgcggacacagatcttgtctcttggctgagcccacacgaccccaattccgtagtaactaaatcagcaaagaaactgcgttcatccaacgcggcagtcagtcggaaggacgaagagttggaccccatggatcccagtagctattcggacgctcctaggggcacctggtccacagggctgcccaagagaaatgaggcaaagactggcgcagacacaactgctgccggccccctttttcagcagcgtccttatccctcacctggagcggtgctgagggccaacgctgaagcctcccgcaccaaacaacaagattag

SEQ ID NO: 284093 - DNA, 513 bp, Artificial Sequence
  derived and/or modified sequence
atgcccctgcctgtggccctgcagacccggctggccaagaggggcatcctgaagcacctggagcctgagcctgaggaggagatcatcgcagaagattatgatgatgatcctgtggactatgaggccacccggctggagggcctgcccccatcctggtacaaggtgtttgaccccagctgtggcctgccctactactggaatgctgacacagacctggtgtcctggctgagcccccatgaccccaacagcgtggtgaccaagagcgccaagaagctgcggagcagcaatgctgctgtgtccaggaaggatgaggagctggaccccatggaccccagcagctacagtgatgccccccggggcacctggagcacaggcctgcccaagagaaatgaggccaagacaggagctgacaccacagctgctggccccctcttccagcagaggccctaccccagccctggagctgtgctgcgggccaatgctgaggccagcaggaccaagcagcaggactag

SEQ ID NO: 284094 - DNA, 513 bp, Artificial Sequence
  derived and/or modified sequence
atgcccctgcccgtggccctgcagacccggctggccaagcggggcatcttaaagcatctggagccagaacctgaggaagagatcatagcagaagattatgatgatgatccggttgactacgaagccaccaggctcgagggtctgccaccttcgtggtataaagtgttcgatccctcttgcggattaccatactattggaatgcagatactgacctggtatcatggttatcgccacatgacccaaattccgttgtgaccaaatccgcaaagaaactgcgctcttcaaacgccgccgtgagccggaaggatgaggagctcgaccccatggatcctagcagctatagtgatgctcctaggggaacttggtcgaccggactgcccaagcgaaatgaggcaaaaacaggtgctgataccacggccgctggcccactcttccagcaaagaccctatcccagccctggcgctgtcctccgcgccaacgcggaggcttctcgcaccaaacagcaagactag

SEQ ID NO: 284095 - DNA, 760 bp, Artificial Sequence
  derived and/or modified sequence
tgcctcctgagcgtagtccagttactttcaggctcggggagtgaaggcctcgttgagagaaggtctcattcggtgttttgggaagagagtcgtgtgggcccaggtatcgtagcggcgacacgagagagacgggcggtgtgacagccttccactacctgcacgagtgtattggtctgtctgctatcagctatgccgctgcccgttgcgctgcagacccgcttggccaagagaggcatcctcaaacatctggagcctgaaccagaggaagagatcattgccgaggactatgacgatgatcctgtggactacgaggccaccaggttggagggcctaccaccaagctggtacaaggtgttcgacccttcctgcgggctcccttactactggaatgcagacacagaccttgtatcctggctctccccacatgaccccaactccgtggttaccaaatcggccaagaagctcagaagcagtaatgcagcagtaagccgaaaggatgaagagttagaccccatggaccctagctcatactcagacgccccccggggcacgtggtcaacaggactccccaagcggaatgaggccaagactggcgctgacaccacagcagctgggcccctcttccagcagcggccgtatccatccccaggggctgtgctccgggccaatgcagaggcctcccgaaccaagcagcaggattgaagcttcggcctccctggccctgggttaaaataaaagctttctggtgatcctgcccacc

SEQ ID NO: 284096 - DNA, 513 bp, Artificial Sequence
  derived and/or modified sequence
atgccactgcctgtcgcacttcagacgagactggcgaagcggggtatcctgaaacatcttgaacccgaacccgaggaggaaatcattgccgaagactacgatgatgacccggtcgactacgaagcaactcgtctggaaggactgcctccaagctggtataaggtctttgacccgtcctgcggactcccttactactggaacgcagacacagatctggtgtcctggctctccccacatgacccaaattcagtcgtcaccaaatccgctaaaaaattgagaagtagcaatgcagcagttagcaggaaagatgaggagttagatcctatggacccaagctcctattctgatgcccctcgcggaacatggagtaccggcctgcctaaaaggaatgaagctaagaccggggcagacacaaccgccgctgggcctttgttccagcagcgcccttatccgagcccaggtgcagttttaagagcaaatgcggaggcgtcacgcaccaagcagcaggactag

SEQ ID NO: 284097 - DNA, 513 bp, Artificial Sequence
  derived and/or modified sequence
atgcctctgccagtggccttgcaaacacgcctcgcaaagcgcgggatattaaagcacctagagcccgaaccagaggaagaaatcatcgcagaggactacgacgacgatcccgttgattatgaagcaacccgcctggaaggactgccccccagctggtacaaggtctttgatccctcatgtggcttgccttactattggaacgccgacactgatctcgtcagctggttaagtccccatgatccaaactccgtggttacgaagtccgccaaaaagctaagaagcagtaacgcggctgtctccaggaaggatgaggagctggaccccatggatcccagttcatacagtgacgccccccgggggacatggagtacaggacttccgaagcggaatgaagccaaaaccggggcagatactaccgcggcaggcccactgtttcagcagcggccctatccatctccgggcgccgtgctacgcgctaacgcagaagcttcacggaccaaacagcaagactag

SEQ ID NO: 284098 - DNA, 513 bp, Artificial Sequence
  derived and/or modified sequence
atgcccctgcctgttgcgctccagaccagactagcgaagcgcgggatactcaagcacctcgaacctgaaccagaagaagagataatcgccgaggactatgacgacgatccagtagattatgaagctactcgactggagggcctgcctccaagctggtataaagtgttcgaccccagctgcggccttccctactactggaatgccgacacggacctcgtgtcatggctctcccctcacgatcctaactcggttgtgactaagagtgccaaaaagttaaggagctccaacgcagcagtgtcccgcaaagatgaggaactcgacccgatggacccctctagttattcagacgctccccgaggtacttggagtactggcctccccaagcgtaatgaggccaagaccggggctgacaccaccgctgctggccccttgttccagcagcggccctacccctcccccggcgctgtgctgcgggctaatgcagaggcctcgagaacaaagcaacaggactag

SEQ ID NO: 284099 - DNA, 453 bp, Artificial Sequence
  derived and/or modified sequence
tgaatcgctacctacctgctacacctactcgtccagcctgaagaagagatcatagccgaggattacgacgacgatccagtggactacgaagccacccgactcgaaggcctgccccccagctggtataaggtgttcgacccctcctgtgggcttccctactattggaatgccgatactgatttggtgagttggctctcaccccatgaccctaatagtgtggtcactaagtctgctaagaagttacgatcatctaacgcggccgtttcccgcaaagacgaagagctggatcctatggacccgtcatcttactcagacgctccaaggggaacctggagcacaggtctgcccaaaaggaatgaagccaagactggcgctgatacaaccgcggctgggccgctgttccagcagcgtccatacccaagccccggcgctgtgctccgcgccaacgcgtag

SEQ ID NO: 284100 - DNA, 453 bp, Artificial Sequence
  derived and/or modified sequence
tgaattgccacctacctgctgcacctgctggtgcagcctgaggaggagatcatcgccgaggactatgatgatgatcctgtggactatgaggccacccggctggagggcctgccccccagctggtacaaggtgtttgaccccagctgtggcctgccctactactggaatgctgacacagacctggtgtcctggctgagcccccatgaccccaacagcgtggtgaccaagagcgccaagaagctgcggagcagcaatgctgctgtgtccaggaaggatgaggagctggaccccatggaccccagcagctacagtgatgccccccggggcacctggagcacaggcctgcccaagagaaatgaggccaagacaggagctgacaccacagctgctggccccctcttccagcagaggccctaccccagccctggagctgtgctgcgggccaatgcctag

SEQ ID NO: 284101 - DNA, 513 bp, Artificial Sequence
  derived and/or modified sequence
atgcccctgcccgtggccctgcagacccggctggccaagcggggcatcctcaagcatctcgaacctgaacccgaagaggaaattatagctgaggactacgacgatgacccagttgattacgaggcgacacggctggagggcctcccgccctcctggtataaggtgtttgatccctcttgcggactaccctattattggaacgccgatacagacctcgtttcctggctgagtccacacgatccaaattctgtcgtaactaagtcggctaaaaaactaagatccagcaacgctgcagtgtccaggaaggatgaagaacttgacccaatggatccatcttcttattcagacgccccaagggggacttggtctaccggtctgccaaagcgtaacgaggctaaaacaggggccgataccaccgctgccggccccctgttccaacagaggccataccctagtccaggcgcagtgctgcgcgccaatgccgaggcttctcggactaagcagcaggactag

SEQ ID NO: 284102 - DNA, 513 bp, Artificial Sequence
  derived and/or modified sequence
atgcccctgcccgtggccctgcagacccggctggccaagcggggcattcttaaacatctcgaacctgagccggaagaggaaatcatagccgaggattatgatgacgatcctgttgattacgaggccacacgcctggaggggcttcctcccagttggtacaaagtctttgatccctcctgtggactcccttattactggaacgcagatacggatcttgtctcttggctgtccccacatgatcctaacagcgtggtgacaaaaagcgcaaaaaagctccgcagctccaatgccgctgtcagccgaaaggacgaggagttggaccccatggatcccagctcgtactcggatgcaccaagggggacttggtccactgggctgcctaagagaaacgaagccaagacaggggctgataccaccgccgccggtccgttgtttcaacaacgtccctatcccagccccggtgcagttctgagagctaacgctgaagcttcccgaactaaacagcaggattag

SEQ ID NO: 284103 - DNA, 453 bp, Artificial Sequence
  derived and/or modified sequence
tgaatcgccacctacctgctgcacctgctggtgcagcccgaggaggagattattgccgaagactatgacgacgacccagtcgactacgaggccactcggctcgaaggcctcccaccatcctggtacaaggtatttgacccgtcttgcgggctcccctattactggaacgcggacaccgacctggtttcatggctcagtccccatgacccgaactctgtagtcactaaatccgccaagaaactccgaagcagcaatgccgctgtttcgcgcaaagatgaggagctggacccaatggacccaagtagctattctgatgcaccaaggggaacctggagcactggactgccaaaaaggaatgaagctaagaccggcgctgacacgacggccgcaggcccactctttcaacaaagaccttaccctagccctggagccgtcctacgggcgaatgcttag

SEQ ID NO: 284104 - DNA, 664 bp, Artificial Sequence
  derived and/or modified sequence
caggctcggggagtgaaggcctcgttgagagaaggtctcattcggtgttttgggaagagagtcgtgtgggcccaggtctgtctgctatcagctatgccgctgcccgttgcgctgcagacccgcttggccaagagaggcatcctcaaacatctggagcctgaaccagaggaagagatcattgccgaggactatgacgatgatcctgtggactacgaggccaccaggttggagggcctaccaccaagctggtacaaggtgttcgacccttcctgcgggctcccttactactggaatgcagacacagaccttgtatcctggctctccccacatgaccccaactccgtggttaccaaatcggccaagaagctcagaagcagtaatgcagcagtaagccgaaaggatgaagagttagaccccatggaccctagctcatactcagacgccccccggggcacgtggtcaacaggactccccaagcggaatgaggccaagactggcgctgacaccacagcagctgggcccctcttccagcagcggccgtatccatccccaggggctgtgctccgggccaatgcagaggcctcccgaaccaagcagcaggattgaagcttcggcctccctggccctgggttaaaataaaagctttctggtgatcctgcccacc

SEQ ID NO: 284105 - DNA, 451 bp, Artificial Sequence
  derived and/or modified sequence
atattgccacctacctcttacatcttttagtgcaaccagaggaagagatcattgccgaggactatgacgatgatcctgtggactacgaggccaccaggttggagggcctaccaccaagctggtacaaggtgttcgacccttcctgcgggctcccttactactggaatgcagacacagaccttgtatcctggctctccccacatgaccccaactccgtggttaccaaatcggccaagaagctcagaagcagtaatgcagcagtaagccgaaaggatgaagagttagaccccatggaccctagctcatactcagacgccccccggggcacgtggtcaacaggactccccaagcggaatgaggccaagactggcgctgacaccacagcagctgggcccctcttccagcagcggccgtatccatccccaggggctgtgctccgggccaatgcaga

SEQ ID NO: 284106 - DNA, 513 bp, Artificial Sequence
  derived and/or modified sequence
atgccactgcccgtggctctgcagacaaggctggcgaagagagggattctaaagcatttagaacccgaacctgaagaagaaattattgccgaagactatgacgatgatcctgtggattatgaagctactaggctcgaaggcctacccccatcctggtacaaggttttcgatcctagctgcggtctgccctactattggaatgctgataccgacctggtctcatggctctctccccatgatcctaactcagtggtgactaaatcggctaagaagttgcggtctagcaacgcagccgttagtagaaaagatgaggaattagatccgatggatccttcatcatactctgatgcaccaaggggcacatggtctacaggcctacccaagcgcaacgaggctaaaacaggggcagacacaaccgcggcaggaccgctgttccagcagagaccttatcccagccctggcgctgtgctgcgggcaaacgccgaggcctcacgcaccaagcagcaggattag

SEQ ID NO: 284107 - DNA, 513 bp, Artificial Sequence
  derived and/or modified sequence
atgccgctcccagtagcactgcagacccgtctggccaagcgcggaatccttaaacatctggaacctgagcctgaagaggaaattatcgcagaagattatgacgatgaccctgtggactacgaggccacgcgcctcgaggggttgcccccaagctggtacaaagtgtttgatccttcctgtggtttgccctattattggaacgctgacacagatctggtgagttggctttctccccatgaccctaattccgtggtcaccaagtctgctaaaaagctccggtcttccaatgcagccgtttcacggaaggatgaagagctggatcctatggacccatcatcctactccgatgcccctagaggaacctggagcactggcctccccaagcgtaacgaggctaaaaccggggcagacactacagctgcagggcctttgtttcaacagcggccatatccaagtccaggcgctgttctgcgggctaacgctgaggcaagcaggacaaagcagcaggactag

SEQ ID NO: 284108 - DNA, 453 bp, Artificial Sequence
  derived and/or modified sequence
tgaattgccacctacctcctgcacctcctggtgcagcccgaggaggagataatcgcagaagattatgacgatgaccctgttgactatgaggcgacccggctggagggtctgccaccctcatggtataaagtgtttgatccatcctgcggccttccatactattggaatgctgataccgacttggtgtcctggctctctccccatgaccctaactccgtagtaaccaagtccgcaaagaagcttagaagctctaatgccgcagtatcccgaaaagacgaagagctcgaccccatggatccgtcctcatattctgacgctcctcgcggtacttggtcaactggcctcccaaagcgtaatgaggctaagactggtgcagacaccactgcagcagggcctttgtttcagcagaggccttaccccagccctggcgctgtacttcgagcgaatgcatag

SEQ ID NO: 284109 - DNA, 453 bp, Artificial Sequence
  derived and/or modified sequence
tgaatcgccacctacctgctgcacctgctggtgcagcccgaggaggagatcatcgccgaggactacgacgacgaccccgtggactacgaggccaccagactggagggcctgccccccagctggtacaaggtgttcgaccccagctgcggcctgccctactactggaacgccgacaccgacctggtgagctggctgagcccccacgaccccaacagcgtggtgaccaagagcgccaagaagctgagaagcagcaacgccgccgtgagcagaaaggacgaggagctggaccccatggaccccagcagctacagcgacgcccccagaggcacctggagcaccggcctgcccaagagaaacgaggccaagaccggcgccgacaccaccgccgccggccccctgttccagcagagaccctaccccagccccggcgccgtgctgagagccaacgcctag

SEQ ID NO: 284110 - protein, 411 aa, Artificial Sequence
  derived and/or modified sequence
MAAAKLLHDSGLNVVVLEARDRVGGRTYTLRNQKVKYVDLGGSYVGPTQNRILRLAKELGLETYKVNEVERLIHHVKGKSYPFRGPFPPVWNPITYLDHNNFWRTMDDMGREIPSDAPWKAPLAEEWDNMTMKELLDKLCWTESAKQLATLFVNLCVTAETHEVSALWFLWYVKQCGGTTRIISTTNGGQERKFVGGSGQVSERIMDLLGDRVKLERPVIYIDQTRENVLVETLNHEMYEAKYVISAIPPTLGMKIHFNPPLPMMRNQMITRVPLGSVIKCIVYYKEPFWRKKDYCGTMIIDGEEAPVAYTLDDTKPEGNYAAIMGFILAHKARKLARLTKEERLKKLCELYAKVLGSLEALEGSTPASGQDLLCRHRDCHTLERLHGGGCRGRGESSPRDPACHGEDSRG

SEQ ID NO: 284111 - DNA, 1515 bp, Artificial Sequence
  derived and/or modified sequence
atggctgctgccaaactgctgcacgactcaggtctgaacgtggttgtcttagaagccagggaccgcgttggcggtcgcacctacaccctgcgcaatcagaaagtgaaatacgtggacttgggcggatcttacgtgggaccgacacagaatagaatcctgcgattagccaaagaactggggctagagacctataaggtgaacgaagtggaaaggctgatccatcacgtgaaaggcaagtcttacccctttcgcggaccttttccgccggtttggaatcccattacgtaccttgatcacaataatttctggcggacaatggatgacatgggcagagagatcccctccgacgccccctggaaagccccgttggctgaagaatgggacaacatgacgatgaaggaactactggacaagctgtgttggaccgagtccgccaaacagctggctacactgttcgtaaacctgtgcgtaaccgctgaaacccacgaggtgagcgctttgtggttcttgtggtacgtgaagcagtgcggtggaaccacccgcattatcagtactacaaatggggggcaggagagaaaattcgtgggcggatctggtcaggtgagcgagaggattatggatttactcggcgatcgggtgaagttggagcggccagtgatttatattgaccaaactcgtgagaatgtattagtagagaccctgaaccacgaaatgtatgaggctaagtacgtcatttctgcgataccaccaacattgggcatgaaaatacatttcaacccacccctacccatgatgcgcaaccaaatgattacaagagtacctctgggatctgtgataaaatgtatcgtctattataaagaaccattttggcggaagaaagactactgtgggaccatgatcattgacggtgaagaggccccggtagcctacaccctcgacgacacaaagccagagggcaactacgcagcaattatgggctttattcttgctcacaaggcgaggaagctggcacgcctgaccaaggaagagcgactgaaaaagctgtgcgagctgtacgccaaggtgctggggagcctcgaagctctggaaccagtacattacgaagagaaaaattggtgcgaggaacagtatagcggcgggtgctacactacctatttcccccccggtatactgacacaatacggcagagtactccgacagcctgttgaccgcatatactttgctggtacagagaccgctacgcattggagtggctacatggagggagcagttgaagccggagagagggcggcgcgggaaatactccatgcaatggggaagatccccgaggatgaaatttggcaaagcgagccggagagcgtggacgttcctgcacagcccatcacaaccacttttttggagcggcatctgcctagcgtgccaggcctgctgcgactgattggtttgacaactatatttagtgccaccgctctaggctttctggctcataaacgcggtctactggttcgggtgtag

SEQ ID NO: 284112 - DNA, 1236 bp, Artificial Sequence
  derived and/or modified sequence
atggcagcagctaagctgcttcacgacagtggtttgaatgttgtggtgctggaagccagggatcgggtggggggtcgcacctacacactgaggaatcaaaaagttaaatatgtagatctgggcggtagttatgtaggacccacccagaaccgcattttacgcctggccaaggagctcggcttggaaacatacaaggtgaacgaggtggagcggcttatccaccacgttaagggaaagagctatccctttcggggaccttttccgcctgtctggaaccctatcacctatctggaccacaacaacttttggagaacaatggacgacatgggccgcgaaatcccaagcgatgccccatggaaggcacctctggccgaagaatgggacaatatgacaatgaaggagctactagacaaattatgttggaccgagtccgcaaaacagcttgctactctctttgtgaacttgtgcgtcactgccgaaacacacgaggtgagcgctttatggtttctatggtacgtgaagcagtgcggtgggaccactcgaattatctctactactaatgggggacaggaacgcaagttcgtgggcggctctggccaggtgtcggagcgaattatggatctgcttggcgaccgtgtcaagctcgaacggccagtcatctatatcgaccagacacgcgaaaatgtgctcgtggagaccctcaatcatgagatgtatgaggccaaatacgtaatttcggcgattccacctacgctgggaatgaagatccatttcaaccctccattgccgatgatgcgcaaccagatgattacaagggtgccccttggcagcgtgataaaatgtattgtgtactataaagagccattctggagaaagaaggattactgcggcactatgatcatcgatggggaggaagccccggtcgcctacaccctggatgataccaagccagagggaaactacgcagcaatcatgggctttatattggcccacaaggcacggaagctggccaggctgaccaaggaagagcgactaaagaagttgtgcgagctgtatgcaaaggtccttggttcactggaggccctggagggatcgacacccgcgagcggacaggatctgctttgccgacaccgggactgtcacaccctggagaggctacacggggggggttgtcggggacgcggagaatcatcccctagagatcccgcctgtcacggcgaggattctaggggatag

SEQ ID NO: 284113 - DNA, 1515 bp, Artificial Sequence
  derived and/or modified sequence
atggctgctgccaagctgctgcatgacagcggcctgaatgtggtggtgctggaggcccgggacagagtgggcggccgcacctacaccctgaggaaccagaaggtgaagtatgtggacctgggcggcagctatgtgggccccacccagaaccgcatcctgcggctggccaaggagctgggcctggagacctacaaggtgaatgaggtggagcggctcatccaccacgtgaagggcaagagctaccccttccggggccccttcccccctgtgtggaaccccatcacctacctggaccacaacaacttctggaggaccatggatgacatgggccgggagatccccagtgatgccccctggaaggcccccctggccgaggagtgggacaacatgaccatgaaggagctgctggacaagctgtgctggacagagagcgccaagcagctggccaccctgtttgtgaacctgtgtgtgacagctgagacccatgaggtgtctgccctgtggttcctgtggtacgtgaagcagtgtggcggcaccacccgcatcatcagcaccaccaatggaggccaggagaggaagtttgtgggcggcagcggccaggtgtctgagcgcatcatggacctgctgggggacagagtgaagctggagaggcctgtgatctacatcgaccagaccagagaaaatgtgctggtggagaccctgaaccacgagatgtatgaggccaagtatgtgatcagcgccatcccccccaccctgggcatgaagatccacttcaacccccccctgcccatgatgaggaaccagatgatcaccagggtgcccctgggcagcgtcatcaagtgcatcgtgtactacaaggagcccttctggaggaagaaggactactgcggcaccatgatcattgatggagaggaggcccctgtggcctacaccctggatgacaccaagccagagggcaactatgctgccatcatgggcttcatcctggcccacaaggccaggaagctggcccggctgaccaaggaggagcggctgaagaagctgtgtgagctgtatgccaaggtgctgggcagcctggaggccctggagcctgtgcactatgaggagaagaactggtgtgaggagcagtacagcggcggctgctacaccacctacttccccccaggcatcctgacccagtatggccgggtgctgcggcagcctgtggaccgcatctactttgctggaacagaaacagccacccactggagcggctacatggagggcgctgtggaggccggggagcgggccgcccgggagatcctgcacgccatgggcaagatcccagaagatgagatctggcagagcgagcctgagagcgtggatgtgcctgcccagcccatcaccaccaccttcctggagcggcacctgcccagcgtgcccggcctgctgcggctcatcggcctgaccaccatcttcagcgccacagccctgggcttcctggcccacaagaggggcctgctggtgcgggtgtag

SEQ ID NO: 284114 - DNA, 1236 bp, Artificial Sequence
  derived and/or modified sequence
atggctgctgccaagctgctgcatgacagcggcctgaatgtggtggtgctggaggcccgggacagagtgggcggccgcacctacaccctgaggaaccagaaggtgaagtatgtggacctgggcggcagctatgtgggccccacccagaaccgcatcctgcggctggccaaggagctgggcctggagacctacaaggtgaatgaggtggagcggctcatccaccacgtgaagggcaagagctaccccttccggggccccttcccccctgtgtggaaccccatcacctacctggaccacaacaacttctggaggaccatggatgacatgggccgggagatccccagtgatgccccctggaaggcccccctggccgaggagtgggacaacatgaccatgaaggagctgctggacaagctgtgctggacagagagcgccaagcagctggccaccctgtttgtgaacctgtgtgtgacagctgagacccatgaggtgtctgccctgtggttcctgtggtacgtgaagcagtgtggcggcaccacccgcatcatcagcaccaccaatggaggccaggagaggaagtttgtgggcggcagcggccaggtgtctgagcgcatcatggacctgctgggggacagagtgaagctggagaggcctgtgatctacatcgaccagaccagagaaaatgtgctggtggagaccctgaaccacgagatgtatgaggccaagtatgtgatcagcgccatcccccccaccctgggcatgaagatccacttcaacccccccctgcccatgatgaggaaccagatgatcaccagggtgcccctgggcagcgtcatcaagtgcatcgtgtactacaaggagcccttctggaggaagaaggactactgcggcaccatgatcattgatggagaggaggcccctgtggcctacaccctggatgacaccaagccagagggcaactatgctgccatcatgggcttcatcctggcccacaaggccaggaagctggcccggctgaccaaggaggagcggctgaagaagctgtgtgagctgtatgccaaggtgctgggcagcctggaggccctggagggcagcaccccagccagcggccaggacctgctgtgccgccaccgggactgccacaccctggagcggctgcatggaggcggctgccggggccgcggggagagcagcccccgggaccctgcctgccacggggaggacagccggggctag

SEQ ID NO: 284115 - DNA, 1862 bp, Artificial Sequence
  derived and/or modified sequence
agaaaacggagcagcgggcaccagggaggcctggaacggggcgagcgccatgagcaacaaatgcgacgtggtcgtggtggggggcggcatctcagaaacatcagactctgggcctctattgacaaaccgtatccacttgtatggcagcagccaaacttctgcatgactctggactgaatgtggttgttctggaagcccgggaccgtgtgggaggcaggacttacactcttaggaaccaaaaggttaaatatgtggaccttggaggatcctatgttggaccaacccagaatcgtatcttgagattagccaaggagctaggattggagacctacaaagtgaatgaggttgagcgtctgatccaccatgtaaagggcaaatcataccccttcagggggccattcccacctgtatggaatccaattacctacttagatcataacaacttttggaggacaatggatgacatggggcgagagattccgagtgatgccccatggaaggctccccttgcagaagagtgggacaacatgacaatgaaggagctactggacaagctctgctggactgaatctgcaaagcagcttgccactctctttgtgaacctgtgtgtcactgcagagacccatgaggtctctgctctctggttcctgtggtatgtgaagcagtgtggaggcacaacaagaatcatctcgacaacaaatggaggacaggagaggaaatttgtgggcggatctggtcaagtgagtgagcggataatggacctccttggagaccgagtgaagctggagaggcctgtgatctacattgaccagacaagagaaaatgtccttgtggagaccctaaaccatgagatgtatgaggctaaatatgtgattagtgctattcctcctactctgggcatgaagattcacttcaatccccctctgccaatgatgagaaaccagatgatcactcgtgtgcctttgggttcagtcatcaagtgtatagtttattataaagagcctttctggaggaaaaaggattactgtggaaccatgattattgatggagaagaagctccagttgcctacacgttggatgataccaaacctgaaggcaactatgctgccataatgggatttatcctggcccacaaagccagaaaactggcacgtcttaccaaagaggaaaggttgaagaaactttgtgaactctatgccaaggttctgggttccctagaagctctggagccagtgcattatgaagaaaagaactggtgtgaggagcagtactctgggggctgctacacaacttatttcccccctgggatcctgactcaatatggaagggttctacgccagccagtggacaggatttactttgcaggcaccgagactgccacacactggagcggctacatggagggggctgtagaggccggggagagagcagcccgagagatcctgcatgccatggggaagattccagaggatgaaatctggcagtcagaaccagagtctgtggatgtccctgcacagcccatcaccaccacctttttggagagacatttgccctccgtgccaggcctgctcaggctgattggattgaccaccatcttttcagcaacggctcttggcttcctggcccacaaaagggggctacttgtgagagtctaaagagagagggtgtctgtaatcacactctcttcttactgtatttgggatatgagtttggggaaagagttgcagtaaagttccatgaagacaaatagtgtggagtgaggcggggagcatgaagataaatccaactctgactgtaaaatacatggtatctctttctccgttgtggcccctgcttagtgtcccttacctggcttagcgttc

SEQ ID NO: 284116 - DNA, 1515 bp, Artificial Sequence
  derived and/or modified sequence
atggccgccgccaagctgctgcacgacagcggcctgaacgtggtggtactggaggcccgcgatagggtggggggacggacctacaccttgcgcaatcagaaggtaaagtatgttgatctgggtggcagctacgttgggcctacccagaacaggattctacggctggcaaaagaattaggacttgagacatataaggtaaatgaagtggagaggttgattcaccacgtgaagggtaaaagttaccccttcagaggccctttcccaccggtttggaacccaatcacgtatctcgaccacaataacttctggagaaccatggacgatatgggccgcgagattcctagtgatgcaccctggaaggctccacttgccgaggaatgggataacatgaccatgaaagaattactagacaagctatgctggacggaatccgccaaacagctggcaactctcttcgtgaacctgtgtgtcacagcagaaacccacgaggtgagcgctctgtggtttctgtggtacgtaaaacagtgcggagggactacgcgcataattagcacgacaaacggcggtcaggagcgcaagttcgtcggagggagcggacaagtttctgagagaatcatggatctgcttggcgaccgcgtgaagctggaacggcctgtcatctacatcgaccagacaagagaaaacgtgctagtggaaacactgaatcatgaaatgtacgaagcaaagtatgtaatctcagcaatacccccaaccctcggcatgaagattcacttcaacccccccctcccaatgatgagaaaccagatgatcaccagggtccctttaggatctgtcatcaaatgtattgtttactacaaggagccattttggaggaagaaagactactgcggtaccatgatcattgatggcgaggaagcacctgtagcatatactttggacgacacaaagcctgagggtaattacgcggcaatcatgggattcatccttgcgcacaaggcccgaaagctggcaaggttgactaaagaggagagacttaaaaaactgtgtgagctctacgccaaggtgcttggctcactagaagcacttgagccagtgcactacgaagagaagaactggtgcgaagaacagtacagcggcggatgctacacaacctacttccccccggggattctgactcagtatggtcgggtgctgaggcagcccgttgacagaatttactttgccggaaccgagaccgctactcactggagcggttacatggagggcgccgtcgaagccggtgagcgggcggcaagagaaattctgcacgcgatggggaagatccccgaagacgagatttggcagtctgaacccgaaagtgtcgatgttccagctcagccgattacgacaactttcctggaaaggcacctgccttctgtgcctggcctcctacgccttatcggccttactacaatcttctcagcaactgcattgggcttcctggctcacaagagaggcctcctcgtgcgggtgtag

SEQ ID NO: 284117 - DNA, 1236 bp, Artificial Sequence
  derived and/or modified sequence
atggccgccgccaagctgctgcacgacagcggcctgaacgtggtggtgctggaagctcgggacagagttggaggtaggacgtataccttaagaaaccaaaaggtgaagtacgtggatctgggggggtcatacgtcgggccgactcaaaacaggattcttagactggccaaggagttgggtttggagacttataaggtgaacgaggtggagaggctgattcatcatgtgaagggtaagtcctatccttttcgcggcccctttccgcctgtctggaatccaatcacttatctagaccacaacaatttctggaggaccatggacgacatggggcgagaaattccctcagatgcaccttggaaggccccactcgccgaagagtgggacaatatgacaatgaaggagctgctggacaagctctgttggaccgagtctgccaaacagttggccacactgtttgtcaacctatgcgtaacagccgaaactcacgaggttagtgccctgtggtttttatggtatgtgaaacagtgcggcggcaccactaggataataagtacaacaaatggcggccaggagcggaagtttgtcggaggcagcggtcaagtcagtgagaggatcatggacctgctcggcgatagagtgaaactagagagaccggtgatttatattgaccagacaagggagaatgtcttggtggaaactctgaatcatgaaatgtatgaagctaagtacgtgattagcgctatcccgcctacccttggaatgaagattcactttaatcccccgttgcctatgatgcgtaaccaaatgatcacaagagtccccctgggctcggttataaaatgcatagtgtactataaggaaccattttggcggaaaaaggattactgtggaacaatgataatcgatggagaggaggcgcccgttgcctatacactggatgacaccaaacccgagggcaattatgccgcaattatggggtttatactggcccacaaggccaggaaattagctaggcttacgaaggaagagagattgaagaaactctgtgagttgtatgccaaagtccttggatctctagaggccctggaagggagcacgccagcttctggacaggacctcttatgcagacatagggactgccacactctggagcgcctgcacggaggtggttgtagggggcgcggagaatcctctccccgggaccctgcctgccacggagaagacagtcgcggttag

SEQ ID NO: 284118 - DNA, 1515 bp, Artificial Sequence
  derived and/or modified sequence
atggccgcagccaagctgttgcatgactctggcctgaacgtcgtggtccttgaggctcgggatagagtgggaggtcgcacgtatacattgagaaatcagaaagtcaagtatgtagacctgggcggatcatacgtgggcccaacacagaaccggatcctgcggttggccaaggaactgggtttagagacctataaagtcaacgaagtggaaagattgatccatcacgtcaaaggcaagagctacccatttaggggcccatttcccccagtgtggaaccctatcacatacctcgaccataataacttttggcggaccatggatgacatgggccgagaaataccttcagatgctccttggaaagctccacttgcagaggaatgggataacatgactatgaaagagctgcttgataagctgtgttggaccgaaagtgcaaaacagctggccaccctcttcgtgaatctctgtgtgacggctgagacccatgaagtcagtgccctttggtttttatggtacgttaagcagtgcggcggaacaaccagaatcatctccaccactaatggcggacaggaaaggaaatttgttggcggttctggccaagtctctgaaaggattatggatcttctgggggatcgtgtgaaactcgaacggcctgtcatctatattgatcagacccgggagaacgtcctcgtggagacactgaaccacgagatgtacgaagctaagtacgtcatttctgcaatccccccaactttagggatgaagattcattttaacccccctttgccaatgatgaggaaccagatgatcactcgagtcccgctggggtcagtgataaagtgcattgtctattacaaagaacccttttggcgcaagaaggattactgcggtactatgattattgatggagaagaggcgcctgtggcctatactttagacgacacaaagcccgaagggaattacgctgccatcatgggttttatactcgcacacaaggccaggaaactggcaaggctgactaaagaggaaaggctgaagaaactgtgcgagctttatgctaaggtgctgggaagtctagaagcactcgaacctgtccattacgaagagaaaaattggtgcgaggaacaatatagcggtggatgctataccacgtatttccctccaggaatcctaacccagtacgggagggtcctgagacagccggtggaccgaatttattttgctggcactgagaccgcaacccactggagtgggtatatggaaggggcagtggaggccggagagagggctgcgagggaaattttgcacgccatggggaagatccctgaggatgaaatatggcagagcgagcccgaatctgtggacgttccggcacaaccaattaccacaactttcctggagcggcacctgccctctgtccctggactgctgcgcttaatcgggttgaccaccattttctccgccacggcgcttgggttcctcgcgcataagcggggactgctcgtccgtgtgtag

SEQ ID NO: 284119 - DNA, 1236 bp, Artificial Sequence
  derived and/or modified sequence
atggcggctgctaagctgctgcacgatagcggactaaacgtagttgtgctcgaggcgagggacagagtcggtgggcgtacctacacactgaggaaccagaaggtcaagtacgtggatcttggtggaagttacgtgggcccaacccaaaataggatcctgagactggccaaggagctgggattggagacctacaaggtcaacgaggttgaacggctgatccaccacgtgaaaggcaagtcttaccccttcaggggaccattccctccagtctggaatcccattacctatctggatcataacaacttctggagaactatggacgacatgggaagggaaataccttccgatgccccttggaaagcccctctcgccgaagaatgggataatatgaccatgaaggagcttctggataagctctgttggacagagtcagccaaacagctcgccactttgtttgtgaatctttgcgtcaccgcagaaacccacgaggtgagcgctttgtggtttctttggtacgtaaagcagtgcggcggaactacgcgtatcataagtaccaccaatggcggtcaggaacggaagtttgtgggcggatccggacaggtgtccgaaaggattatggacttactcggtgaccgggtcaagctggagcgacctgtaatttacattgatcagacccgcgagaacgttctggtggagaccctgaaccacgagatgtacgaggctaagtatgtgatctcggcaattccaccaaccctggggatgaagatccacttcaaccctcccctgcctatgatgcgcaatcagatgatcactagagttcctcttggctcagttatcaaatgtattgtgtactataaggaacccttctggaggaaaaaagattattgtgggactatgattatagacggcgaggaggcccctgtcgcctacacgctggatgatacaaagcccgaggggaactatgccgctattatgggatttattctggctcataaggctcggaagctggcacgcctcacaaaagaagaaagactcaaaaagctttgcgaactgtatgccaaggtgctaggtagcctcgaggccctggaaggctctacccccgcttctggccaggacctgctatgccgacacagagattgccacaccttagaacggctacatggcggagggtgtaggggccgaggcgaatccagccccagggaccctgcctgccatggcgaagattcaagaggttag

SEQ ID NO: 284120 - DNA, 1515 bp, Artificial Sequence
  derived and/or modified sequence
atggccgccgccaagctgctgcacgacagcggcctgaacgtggtggtgctggaggccagagacagagtgggcggcagaacctacaccctgagaaaccagaaggtgaagtacgtggacctgggcggcagctacgtgggccccacccagaacagaatcctgagactggccaaggagctgggcctggagacctacaaggtgaacgaggtggagagactgatccaccacgtgaagggcaagagctaccccttcagaggccccttcccccccgtgtggaaccccatcacctacctggaccacaacaacttctggagaaccatggacgacatgggcagagagatccccagcgacgccccctggaaggcccccctggccgaggagtgggacaacatgaccatgaaggagctgctggacaagctgtgctggaccgagagcgccaagcagctggccaccctgttcgtgaacctgtgcgtgaccgccgagacccacgaggtgagcgccctgtggttcctgtggtacgtgaagcagtgcggcggcaccaccagaatcatcagcaccaccaacggcggccaggagagaaagttcgtgggcggcagcggccaggtgagcgagagaatcatggacctgctgggcgacagagtgaagctggagagacccgtgatctacatcgaccagaccagagagaacgtgctggtggagaccctgaaccacgagatgtacgaggccaagtacgtgatcagcgccatcccccccaccctgggcatgaagatccacttcaacccccccctgcccatgatgagaaaccagatgatcaccagagtgcccctgggcagcgtgatcaagtgcatcgtgtactacaaggagcccttctggagaaagaaggactactgcggcaccatgatcatcgacggcgaggaggcccccgtggcctacaccctggacgacaccaagcccgagggcaactacgccgccatcatgggcttcatcctggcccacaaggccagaaagctggccagactgaccaaggaggagagactgaagaagctgtgcgagctgtacgccaaggtgctgggcagcctggaggccctggagcccgtgcactacgaggagaagaactggtgcgaggagcagtacagcggcggctgctacaccacctacttcccccccggcatcctgacccagtacggcagagtgctgagacagcccgtggacagaatctacttcgccggcaccgagaccgccacccactggagcggctacatggagggcgccgtggaggccggcgagagagccgccagagagatcctgcacgccatgggcaagatccccgaggacgagatctggcagagcgagcccgagagcgtggacgtgcccgcccagcccatcaccaccaccttcctggagagacacctgcccagcgtgcccggcctgctgagactgatcggcctgaccaccatcttcagcgccaccgccctgggcttcctggcccacaagagaggcctgctggtgagagtgtag

SEQ ID NO: 284121 - DNA, 1236 bp, Artificial Sequence
  derived and/or modified sequence
atggccgccgccaagctgctgcacgacagcggcctgaacgtggtggtgctggaggccagagacagagtgggcggcagaacctacaccctgagaaaccagaaggtgaagtacgtggacctgggcggcagctacgtgggccccacccagaacagaatcctgagactggccaaggagctgggcctggagacctacaaggtgaacgaggtggagagactgatccaccacgtgaagggcaagagctaccccttcagaggccccttcccccccgtgtggaaccccatcacctacctggaccacaacaacttctggagaaccatggacgacatgggcagagagatccccagcgacgccccctggaaggcccccctggccgaggagtgggacaacatgaccatgaaggagctgctggacaagctgtgctggaccgagagcgccaagcagctggccaccctgttcgtgaacctgtgcgtgaccgccgagacccacgaggtgagcgccctgtggttcctgtggtacgtgaagcagtgcggcggcaccaccagaatcatcagcaccaccaacggcggccaggagagaaagttcgtgggcggcagcggccaggtgagcgagagaatcatggacctgctgggcgacagagtgaagctggagagacccgtgatctacatcgaccagaccagagagaacgtgctggtggagaccctgaaccacgagatgtacgaggccaagtacgtgatcagcgccatcccccccaccctgggcatgaagatccacttcaacccccccctgcccatgatgagaaaccagatgatcaccagagtgcccctgggcagcgtgatcaagtgcatcgtgtactacaaggagcccttctggagaaagaaggactactgcggcaccatgatcatcgacggcgaggaggcccccgtggcctacaccctggacgacaccaagcccgagggcaactacgccgccatcatgggcttcatcctggcccacaaggccagaaagctggccagactgaccaaggaggagagactgaagaagctgtgcgagctgtacgccaaggtgctgggcagcctggaggccctggagggcagcacccccgccagcggccaggacctgctgtgcagacacagagactgccacaccctggagagactgcacggcggcggctgcagaggcagaggcgagagcagccccagagaccccgcctgccacggcgaggacagcagaggctag

SEQ ID NO: 284122 - protein, 1703 aa, Artificial Sequence
  derived and/or modified sequence
MLSATPLYGNVHSWMNSERVRMCGASEDRKILVNDGDASKARLELREENPLNHNVVDASTAHRIDGLAALSMDRTGLIREGLRVPGNIVYSSLCGLGSEKGREAATSTLGGLGFSSERNPEMQFKPNTPETVEASAVSGKPPNGFSAIYKTPPGIQKSAVATAEALGLDRPASDKQSPLNINGASYLRLPWVNPYMEGATPAIYPFLDSPNKYSLNMYKALLPQQSYSLAQPLYSPVCTNGERFLYLPPPHYVGPHIPSSLASPMRLSTPSASPAIPPLVHCADKSLPWKMGVSPGNPVDSHAYPHIQNSKQPRVPSAKAVTSGLPGDTALLLPPSPRPSPRVHLPTQPAADTYSEFHKHYARISTSPSVALSKPYMTVSSEFPAARLSNGKYPKAPEGGEGAQPVPGHARKTAVQDRKDGSSPPLLEKQTVTKDVTDKPLDLSSKVVDVDASKADHMKKMAPTVLVHSRAGSGLVLSGSEIPKETLSPPGNGCAIYRSEIISTAPSSWVVPGPSPNEENNGKSMSLKNKALDWAIPQQRSSSCPRMGGTDAVITNVSGSVSSAGRPASASPAPNANADGTKTSRSSVETTPSVIQHVGQPPATPAKHSSSTSSKGAKASNPEPSFKANENGLPPSSIFLSPNEAFRSPPIPYPRSYLPYPAPEGIAVSPLSLHGKGPVYPHPVLLPNGSLFPGHLAPKPGLPYGLPTGRPEFVTYQDALGLGMVHPMLIPHTPIEITKEEKPERRSRSHERARYEDPTLRNRFSEILETSSTKLHPDVPTDKNLKPNPNWNQGKTVVKSDKLVYVDLLREEPDAKTDTNVSKPSFAAESVGQSAEPPKPSVEPALQQHRDFIALREELGRISDFHETYTFKQPVFTVSKDSVLAGTNKENLGLPVSTPFLEPPLGSDGPAVTFGKTQEDPKPFCVGSAPPSVDVTPTYTKDGADEAESNDGKVLKPKPSKLAKRIANSAGYVGDRFKCVTTELYADSSQLSREQRALQRAMMRFSELEMKEREGGHPATKDSEMCKFSPADWERLKGNQDKKPKSVTLEEAIAEQNESERCEYSVGNKHRDPFEAPEDKDLPVEKYFVERQPVSEPPADQVASDMPHSPTLRVDRKRKVSGDSSHTETTAEEVPEDPLLKAKRRRVSKGLHPKKQRHLLHLRERWEQQVSAADGKPGRQSRKEVTQATQPEAIPQGTNITEEKPGRKRAEAKGNRSWSEESLKPSDNEQGLPVFSGSPPMKSLSSTSAGGKKQAQPSCAPASRPPAKQQKIKENQKTDVLCADEEEDCQAASLLQKYTDNSEKPSGKRLCKTKHLIPQESRRGLPLTGEYYVENADGKVTVRRFRKRPEPSSDYDLSPAKQEPKPFDRLQQLLPASQSTQLPCSSSPQETTQSRPMPPEARRLIVNKNAGETLLQRAARLGYEEVVLYCLENKICDVNHRDNAGYCALHEACARGWLNIVRHLLEYGADVNCSAQDGTRPLHDAVENDHLEIVRLLLSYGADPTLATYSGRTIMKMTHSELMEKFLTDYLNDLQGRNDDDASGTWDFYGSSVCEPDDESGYDVLANPPGPEDQDDDDDAYSDVFEFEFSETPLLPCYNIQVSVAQGPRNWLLLSDVLKKLKMSSRIFRCNFPNVEIVTIAEAEFYRQVSASLLFSCSKDLEAFNPESKELLDLVEFTNEIQTLLGSSVEWLHPSDLASDNYW

SEQ ID NO: 284123 - protein, 622 aa, Artificial Sequence
  derived and/or modified sequence
MPHSPTLRVDRKRKVSGDSSHTETTAEEVPEDPLLKAKRRRVSKGLHPKKQRHLLHLRERWEQQVSAADGKPGRQSRKEVTQATQPEAIPQGTNITEEKPGRKRAEAKGNRSWSEESLKPSDNEQGLPVFSGSPPMKSLSSTSAGGKKQAQPSCAPASRPPAKQQKIKENQKTDVLCADEEEDCQAASLLQKYTDNSEKPSGKRLCKTKHLIPQESRRGLPLTGEYYVENADGKVTVRRFRKRPEPSSDYDLSPAKQEPKPFDRLQQLLPASQSTQLPCSSSPQETTQSRPMPPEARRLIVNKNAGETLLQRAARLGYEEVVLYCLENKICDVNHRDNAGYCALHEACARGWLNIVRHLLEYGADVNCSAQDGTRPLHDAVENDHLEIVRLLLSYGADPTLATYSGRTIMKMTHSELMEKFLTDYLNDLQGRNDDDASGTWDFYGSSVCEPDDESGYDVLANPPGPEDQDDDDDAYSDVFEFEFSETPLLPCYNIQVSVAQGPRNWLLLSDVLKKLKMSSRIFRCNFPNVEIVTIAEAEFYRQVSASLLFSCSKDLEAFNPESKELLDLVEFTNEIQTLLGSSVEWLHPSDLASDNYWKSPQIARGSVEGKKTDDKTSKTDL

SEQ ID NO: 284124 - DNA, 5112 bp, Artificial Sequence
  derived and/or modified sequence
atgctgagcgccactcctttgtatggaaacgtacactcctggatgaattcggaacgcgtgcgaatgtgcggggcaagtgaggaccgaaagattctagtgaatgatggtgacgccagcaaggcgaggttggaactcagggaggagaatcctctgaatcacaatgtggtggacgccagcacggctcatcgcattgatggccttgctgccctttccatggacaggacagggctgatacgcgagggcctccgcgtcccaggcaatatcgtgtatagctctttgtgcggcttgggatccgaaaagggccgggaagctgctactagtactctgggagggctggggttctctagtgagaggaatcctgagatgcaatttaagccgaacacacccgaaacagtagaggccagcgcagttagcggcaaaccacctaatggtttcagcgcaatttacaagacgcctccgggcattcagaagtccgcggtggcgacagccgaggccttgggactggatcggcctgcctctgataagcagtcgcccctgaacattaatggggcttcctatttaaggctcccgtgggtaaatccgtacatggaaggtgccacacccgcgatctatccattcctcgattcgccaaacaaatatagcctgaatatgtacaaagcgctgctacctcaacaatcatacagcttagctcagcccctgtacagcccggtgtgcaccaacggagagagattcctctatctgccccctccacactacgtggggcctcacatcccatcatcgttggcaagtccaatgcggctctcaaccccatcagccagtcctgctatacccccccttgtgcactgcgcggataaatccctcccttggaaaatgggagttagcccgggaaatcctgtggacagtcatgcatacccccatatccagaattcaaagcagcctcgtgtgccttcggcgaaagccgttacctcaggactgccaggagacacggctctgttactcccgccaagcccccggccttcccctagggtgcaccttccaacacaacccgcggcggatacctacagtgaattccacaagcactatgccaggatcagcacatccccgtctgttgctctttcaaagccttacatgacagtgagttctgagtttcccgccgctagactgtcaaatggtaaatacccgaaagctcctgagggaggggagggcgcccagcctgttccaggacacgcgagaaagacagccgtccaagacagaaaagacggatcctcaccacctctactcgagaaacagaccgtcacgaaagatgtgaccgacaagcccctcgatttgagcagcaaggtcgtcgatgtagatgcctcaaaagcggaccatatgaagaagatggcacctacagtgcttgtccacagtcgagctggttcagggctcgtgttgtcagggtcagaaatccctaaagagacgctgtcaccacccggcaatggttgtgcgatctatcggagtgagatcatcagtaccgctccaagctcctgggtcgtgcctggcccttccccaaatgaagagaacaacggaaaatcaatgtcacttaaaaacaaggcgctggattgggcgataccacaacagaggagcagtagttgccctcgtatgggcggcacagatgcagtgataaccaatgtctcgggatctgtctcctcagcgggtaggcccgccagcgcctccccagctccgaacgccaacgcggacggaacaaagacatctcgcagttcagtcgaaacgacccctagtgtgattcagcacgtggggcaacctcccgccactccggccaaacactcgagctccaccagttccaagggggcaaaggcttccaacccagaaccatccttcaaagcaaatgagaatggactacccccatcatctatattcctgtctcccaatgaggcgtttcgatctcctcctataccttacccccgaagctatctgccctatccagcacctgaggggattgccgtcagcccactgtcattacatggtaagggacccgtgtacccacatcctgtgctactgcctaacgggtcccttttccccggccacctggccccgaaacctggactgccatatgggctgcctaccgggcgccccgagtttgtcacctatcaggacgcccttggcttaggcatggtacatcctatgttgattccgcatactcctatcgagattacgaaggaagaaaagcccgagcggagatctcgctcacacgaacgggcaaggtacgaggaccctactcttagaaatcgatttagcgagattctcgagacctcctccactaaacttcatcccgacgtccctacagataagaacttaaaacccaatccaaactggaatcaggggaaaacggtcgtcaagagtgataagctggtatacgtagacttactgcgggaggagccagacgcgaagactgacaccaacgtctccaagccatcctttgccgccgaaagcgtcggccagtcggccgagccgcccaagcctagcgtggagcccgctctgcagcagcaccgcgatttcatcgcccttagagaggaattggggaggatttccgacttccacgagacctatacctttaagcagcctgtattcaccgtgagcaaggattccgtactggctggcacaaataaagaaaatctgggcttgcccgtttcgacacctttccttgaaccccccttgggctccgatgggccagccgtcactttcgggaaaactcaggaagaccctaagcctttctgtgtggggtctgctcctccttccgtggacgtcaccccgacctacaccaaggacggggcagatgaagccgagtcaaatgacggcaaagtcctcaagcctaagcccagtaagctcgccaaacgcattgctaatagtgcggggtacgtgggcgatcggttcaagtgcgtgaccaccgagctgtatgcggattcctcccagcttagtcgggaacaaagggctcttcagcgggccatgatgagattttcggagcttgaaatgaaagagagagaaggagggcacccagccacaaaagatagcgagatgtgcaagttttctccggccgactgggaaagactgaagggcaaccaagataaaaaacccaaaagtgtgacgctcgaggaggccatagctgaacagaacgaaagcgagaggtgtgagtattctgtgggaaataaacatagggatccgtttgaggcgcccgaggacaaggatttgcccgtcgagaagtattttgtggagcggcaacctgtctctgaaccgcctgctgaccaggttgcctcagacatgcctcacagtccaacactacgagtggaccgaaagcggaaagtgagtggcgattctagccacactgaaaccacggctgaggaggtgccagaagaccccctgctgaaggctaagaggcgacgggtgagcaagggcctgcaccccaaaaaacagcgtcatctgcttcacctgcgggaaagatgggaacagcaagtgagcgccgcagacggcaagcctggccggcaaagccggaaggaggttacccaggccacacagcccgaagctattccccagggaacaaacatcaccgaagaaaagccgggtaggaaaagggcagaagctaaaggtaacagaagctggtcagaggaaagcctgaaaccctcagataatgagcagggtctgccagtgttttccggaagccctcccatgaaaagcctctcatccacctcagcggggggcaagaagcaggcccaacctagctgcgcccctgcctcaagaccacccgctaaacagcagaaaatcaaagaaaaccagaagaccgacgtgctttgcgccgacgaggaggaggactgtcaggccgccagcctcctgcaaaagtacacggataattctgaaaagccatcgggtaaacgcctctgcaagaccaagcatctcatccctcaggagagccggcgagggctcccactcacaggcgaatactacgtggaaaatgcggacggtaaggtgacagttcgtagatttaggaagcgtcccgagccatccagtgattacgatctgagcccagcaaagcaggaacctaaaccattcgatcggcttcaacagttgcttcccgcatcccaatctacacaactaccttgctccagctctccacaggaaacaactcagagtcgccctatgccaccagaagcccggaggctgatcgtcaataagaatgccggggagacgctgcttcagcgagcagcccgtttagggtatgaagaagtggtcctctattgcctggagaataagatatgtgatgtcaaccatagggacaacgccggatattgcgcgttgcatgaagcctgcgcccgcggatggctcaacatagtaaggcacctgctcgagtatggtgctgatgtgaattgcagcgcccaggacggcacccggccccttcacgatgccgttgagaatgaccacctggagatagtgagacttctgctgtcctacggggctgatccgacactcgccacctacagtggccgcaccatcatgaaaatgacccactcagagttgatggaaaagttcctgaccgactacttgaacgatctccaaggcagaaatgacgatgatgcctctggtacatgggacttctacggcagtagtgtgtgcgaacctgacgacgagagcggatatgacgtcttggccaatcctcccggccctgaagaccaagacgacgatgatgatgcctacagtgacgtttttgaattcgagttttcggaaacacccctactgccctgctacaatatccaggtttcagttgctcaggggccacgtaactggctgcttttgtccgatgtcctgaaaaagctgaagatgtctagccggatttttcgctgcaatttcccaaatgtcgagatcgtcaccatcgccgaggcagagttctatcggcaggtatctgcatccctcctattctcatgcagcaaagacctggaagctttcaatcctgagtcgaaagagctccttgatctggtggagttcacaaatgagatacaaacattattgggcagttctgtggaatggctacaccccagcgacttagctagcgataactattggtag

SEQ ID NO: 284125 - DNA, 1869 bp, Artificial Sequence
  derived and/or modified sequence
atgcctcactctcctacactacgtgtcgatcggaaaaggaaggtctccggagactcatcccacacagagacaacagcagaggaggtcccagaggaccctcttcttaaggccaaaaggcggcgagtgagcaagggcttacacccaaagaaacaaaggcatttattgcaccttcgtgagcgctgggaacagcaagtaagcgcagctgacgggaaaccaggcagacagtctagaaaagaggtgactcaggccacccagccggaggccatcccccaaggtacaaatattacagaggagaagccgggaaggaagagagcagaagctaaagggaataggtcttggagcgaagagagtcttaaaccctctgacaatgaacagggactgccagtcttctccggcagccccccaatgaaatccttgtcaagcacaagcgcgggcggtaaaaagcaggcacagccctcatgtgctcccgcttcccggccacctgctaaacagcagaagattaaggagaatcagaaaaccgacgtgctctgtgcagatgaggaggaggattgccaggccgccagccttcttcagaagtacactgacaattctgagaagccttcggggaagcgactgtgtaaaactaaacacctgatcccacaagaatctcgtagggggctgccactgacaggagagtattatgttgaaaacgccgacggaaaggttacagttcgcagatttagaaagcgccctgaaccgtctagtgactacgatctgtcgcccgccaaacaggaacctaaaccatttgaccggttacagcagttgttgcccgcatctcagtccacgcagctgccctgctcaagcagcccccaagagactacacaaagtcggcccatgccccccgaggcccgcaggttaatagtgaataaaaacgcaggcgagaccctcctgcagcgagctgcaaggctggggtacgaagaagtcgtactgtactgcctcgaaaacaagatctgtgatgtgaaccatcgtgacaatgccggatactgcgccctgcatgaggcctgcgcccgcggctggctgaacattgtgagacatttgctcgaatacggagctgacgtgaattgcagcgcccaggacgggactagacccctccatgacgctgtggagaatgatcacctggaaatcgtgaggctgctgctatcatacggcgccgacccaacactggccacttactcagggcggaccataatgaagatgacacattcagaactgatggagaaatttctgaccgattacttgaatgatctgcagggtaggaacgacgatgacgcctctgggacctgggacttctatgggtcgtctgtgtgtgagcctgacgatgagagcggctatgacgtactggccaatccaccgggccccgaagaccaggatgatgatgacgatgcttactctgatgtgtttgaattcgagttttcagaaaccccactgctgccttgctataacatccaagtctccgtcgcacagggcccccgcaactggctcttgctttccgatgtcctaaagaagctaaaaatgagctcgagaatatttaggtgtaactttccaaacgtggaaatcgtcaccattgctgaagccgaattttaccgtcaagtcagcgcctccctcctgttcagttgcagcaaggaccttgaagctttcaatcctgagtccaaagaactcctcgacctggttgaattcaccaacgaaattcagactttactgggcagctctgtggaatggctgcacccaagcgacctcgccagcgacaattactggaaatcaccgcagattgcacgcggcagcgtggaaggtaagaagacagacgacaagacttccaagaccgatctctag

SEQ ID NO: 284126 - DNA, 1236 bp, Artificial Sequence
  derived and/or modified sequence
atgacacggccggcttttcaaccgccagctacacccgccaagcatagctcttccacctcgtctaagggagcaaaggcatccaacccagagccgagcttcaaagcgaacgagaatggcttgcctccctcctcgatttttctgagtcctaatgaagcattccgaagtccccccatcccctaccccagatcttacctgccctatcctgctccagaaggaatcgctgtttccccgctgtccctgcatggcaaagggcccgtttatccacatcctgtcctgttgccgaacggatccttgtttccgggtcacctcgctcctaaacccggtctgccttacgggctgcctacaggccggcccgaatttgtcacgtaccaggatgccttaggactagggatggtgcacccaatgcttattcctcacactcccatcgaaatcaccaaagaggagaaacccgaacgcaggtctaggagccacgagcgtgcacgttacgaggaccccacacttagaaataggttctcagagatcttggagaccagctccaccaaactccaccctgatgtgccaactgataagaatttgaagccaaacccgaactggaaccagggcaaaacggtggttaaatctgataaactagtgtatgttgaccttctgcgagaggagccagatgccaagaccgatactaacgtttctaagccctcctttgccgcggagtccgtgggccagagcgccgaacccccaaagccaagcgtggaacccgcccttcaacagcaccgcgattttattgcgttgcgggaggagttgggcaggatctctgattttcacgaaacatatacatttaagcagcctgtgttcacagtctctaaagactcggtgctagctggcactaataaagagaatttgggtctgcctgtgagcactccatttttagagccgccattgggctcggatgggcctgccgtgacctttgggaaaacccaagaagatccaaaacccttctgcgtcgggtccgccccaccttccgttgatgtcactccaacgtacaccaaagatggcgcagacgaggccgagagtaacgacgggaaggtcctgaagccgaagcctagcaagctggctaaacgaatcgctaattccgccggatacgtgggcgataggttcaagtgcgttaccactgagttatacgccgattcttctcagttgtctagagaacagcgtgctctccaggtctcccctcccacttag

SEQ ID NO: 284127 - DNA, 5112 bp, Artificial Sequence
  derived and/or modified sequence
atgctgagcgccacccccctgtatggaaatgtgcacagctggatgaacagcgagcgggtgaggatgtgtggggccagcgaggacaggaagatcctggtgaatgatggagatgccagcaaggcccggctggagctgcgggaggagaaccccctgaaccacaacgtggtggatgccagcacagcccacagaattgatggcctggccgccctgtccatggacagaacaggcctcatccgggagggcctgcgggtgcccggcaacatcgtgtacagcagcctgtgtggcctgggcagcgagaagggccgggaggccgccaccagcaccctgggcggcctgggcttcagcagcgagaggaaccctgagatgcagttcaagcccaacaccccagagaccgtggaggccagcgctgtgtctgggaagcccccaaatggcttcagcgccatctacaagaccccacctggcatccagaagtctgctgtggccacagctgaggccctgggcctggacaggcctgccagtgacaagcagagccccctgaacatcaacggggccagctacctgcggctgccctgggtgaacccctacatggagggcgccaccccagccatctaccccttcctggacagccccaacaagtacagcctgaacatgtacaaggccctgctgccccagcagagctacagcctggcccagcccctgtacagccctgtgtgcaccaacggggagcgcttcctgtacctgcccccaccccactacgtgggcccccacatccccagcagcctggccagccccatgaggctgagcaccccatctgccagccctgccatcccccccctggtgcactgtgccgacaagagcctgccctggaagatgggcgtgtccccaggcaaccctgtggacagccacgcctacccccacatccagaacagcaagcagccccgggtgcccagcgccaaggctgtgaccagcggcctgcccggggacacagccctgctgctgccccccagcccccggcccagcccccgggtgcacctgcccacccagcctgctgctgacacctacagcgagttccacaagcactacgcccgcatcagcaccagccccagcgtggccctgagcaagccctacatgacagtgtcctctgagttccctgctgcccggctgagcaatggcaagtaccccaaggcccctgagggcggggagggcgcccagcctgtgcccggccacgccaggaagacagctgtgcaggacaggaaggatggcagcagcccccccctgctggagaagcagacagtgaccaaggatgtgacagacaagcccctggacctgagcagcaaggtggtggatgtggatgccagcaaggctgaccacatgaagaagatggcccccaccgtgctggtgcacagcagagctggcagcggcctggtgctgagcggcagcgagatccccaaggagaccctgagccccccaggaaatggctgtgccatctacagaagtgagatcatcagcacagcccccagctcctgggtggtgcccggccccagccccaatgaagaaaataatggcaagtccatgagcctgaagaacaaggccctggactgggccatcccccagcagaggagcagcagctgccccaggatgggcggcacagatgctgtgatcaccaacgtgtctggctctgtgtcctctgctggccgcccagccagcgccagccctgccccaaatgccaatgctgatggcaccaagaccagccgcagctctgtggagaccaccccatctgtcatccagcacgtgggccagcccccagccaccccagccaagcacagcagcagcaccagcagcaaaggagccaaggccagcaaccctgagcccagcttcaaggccaatgaaaatggcctgccccccagcagcatcttcctgagccccaatgaggccttccgcagcccccccatcccctaccccaggagctacctgccctacccagcccctgagggcattgctgtgagccccctgagcctgcacggcaagggccctgtgtacccccaccctgtgctgctgcccaacggcagcctcttccctggccacctggcccccaagccaggcctgccctacggcctgcccaccggccggcctgagtttgtgacctaccaggatgccctgggcctgggcatggtgcaccccatgctgatcccccacacccccatcgagatcaccaaggaggagaagccagagaggaggagccgcagccatgagcgggcccgctatgaggaccccaccctgaggaaccgcttcagcgagatcctggagaccagcagcaccaagctgcacccagatgtgcccacagacaagaacctgaagcccaaccccaactggaaccagggcaagacagtggtgaagagtgacaagctggtgtatgtggacctgctgcgggaggagccagatgccaagacagacaccaacgtgtccaagcccagctttgctgctgagagcgtgggccagagcgctgagccccccaagcccagcgtggagcccgccctgcagcagcaccgggacttcatcgccctgcgggaggagctgggccgcatcagtgacttccacgagacctacaccttcaagcagcccgtcttcaccgtgtccaaggacagcgtgctggccggcaccaacaaggagaacctgggcctgcctgtgtccacccccttcctggagccccccctgggcagtgatggccctgctgtgaccttcggcaagacccaggaggaccccaagcccttctgtgtgggcagcgccccacccagcgtggatgtgacccccacctacaccaaggatggagcagatgaagctgagagcaatgatggcaaggtgctgaagcccaagcccagcaagctggccaagagaattgccaacagcgctggctacgtgggggaccgcttcaagtgtgtgaccacagagctgtatgctgacagcagccagctgagccgggagcagagggccctgcagagggccatgatgaggttcagcgagctggagatgaaggagcgggagggcggccacccagccaccaaggacagcgagatgtgcaagttcagccctgctgactgggagcggctgaagggcaaccaggacaagaagcccaagtctgtgaccctggaggaggccatcgccgagcagaatgaaagtgagcgctgtgagtacagcgtgggcaacaagcaccgggacccctttgaggcccctgaggacaaggacctgcctgtggagaagtactttgtggagcggcagcctgtgtctgagcccccagctgaccaggtggccagtgacatgccccacagccccaccctgcgggtggacaggaagaggaaggtgtctggggacagcagccacacagagaccacagctgaggaggtgcctgaggaccccctgctgaaggccaagagaagaagagtgtccaagggcctgcaccccaagaagcagaggcacctgctgcacctgcgggagcgctgggagcagcaggtgtctgctgctgatggcaagccaggccggcagagcaggaaggaggtgacccaggccacccagcctgaggccatcccccagggcaccaacatcacagaggagaagccaggcaggaagagagctgaggccaagggcaacagatcctggagcgaggagagcctgaagcccagcgacaatgagcagggcctgcctgtgttcagcggcagcccccccatgaagagcctgagcagcaccagcgctgggggcaagaagcaggcccagcccagctgtgccccagccagccggcccccagccaagcagcagaagatcaaggagaaccagaagacagatgtgctgtgtgctgatgaggaggaggactgccaggccgccagcctgctgcagaagtacacagacaacagcgagaagcccagcggcaagaggctgtgcaagaccaagcacctgatcccccaggagagccggcggggcctgcccctgaccggggagtactacgtggagaatgctgatggcaaggtgacagtgcggcgcttcaggaagaggcctgagcccagcagtgactatgacctgagccctgccaagcaggagcccaagccctttgaccggctgcagcagctgctgcctgccagccagagcacccagctgccctgcagcagcagcccccaggagaccacccagagccggcccatgcctcctgaggcccggcggctgattgtgaacaagaatgctggggagaccctgctgcagagagctgcccggctgggctatgaggaggtggtgctgtactgcctggagaacaagatctgtgatgtgaaccaccgggacaatgccggctactgtgccctgcacgaggcctgtgcccggggctggctgaacatcgtgcgccacctgctggagtatggagcagatgtgaactgcagcgcccaggacggcacccggcccctgcatgatgctgtggagaatgaccacctggagatcgtgcggctgctgctgtcctatggagctgaccccaccctggccacctacagcggccgcaccatcatgaagatgacccacagcgagctgatggagaagttcctgacagactacctgaatgacctgcagggcagaaatgatgatgatgccagcggcacctgggacttctacggcagctctgtgtgtgagccagatgatgagagcggctatgatgtgctggccaaccccccaggccctgaggaccaggatgatgatgatgatgcctacagtgatgtgtttgaatttgagttcagcgagacccccctgctgccctgctacaacatccaggtgtctgtggcccagggccccaggaactggctgctgctgagtgatgtgctgaagaagctgaagatgagcagccgcatcttccgctgcaacttccccaacgtggagatcgtgaccatcgccgaggccgagttctaccggcaggtgtctgccagcctgctcttcagctgcagcaaggacctggaggccttcaaccctgagagcaaggagctgctggacctggtggagttcaccaatgagatccagaccctgctgggcagctctgtggagtggctgcaccccagcgacctggccagtgacaactactggtag

SEQ ID NO: 284128 - DNA, 1869 bp, Artificial Sequence
  derived and/or modified sequence
atgccccacagccccaccctgcgggtggacaggaagaggaaggtgtctggggacagcagccacacagagaccacagctgaggaggtgcctgaggaccccctgctgaaggccaagagaagaagagtgtccaagggcctgcaccccaagaagcagaggcacctgctgcacctgcgggagcgctgggagcagcaggtgtctgctgctgatggcaagccaggccggcagagcaggaaggaggtgacccaggccacccagcctgaggccatcccccagggcaccaacatcacagaggagaagccaggcaggaagagagctgaggccaagggcaacagatcctggagcgaggagagcctgaagcccagcgacaatgagcagggcctgcccgtcttcagcggcagcccccccatgaagagcctgagcagcaccagcgctgggggcaagaagcaggcccagcccagctgtgccccagccagccggcccccagccaagcagcagaagatcaaggagaaccagaagacagatgtgctgtgtgctgatgaggaggaggactgccaggccgccagcctgctgcagaagtacacagacaacagcgagaagcccagcggcaagaggctgtgcaagaccaagcacctgatcccccaggagagcagaagaggcctgcccctgactggagagtactacgtggagaatgctgatggcaaggtgacagtgcggcgcttcaggaagaggcctgagcccagcagtgactatgacctgagccctgccaagcaggagcccaagccctttgaccggctgcagcagctgctgcctgccagccagagcacccagctgccctgcagcagcagcccccaggagaccacccagagccggcccatgcctcctgaggcccggcggctcatcgtgaacaagaatgctggggagaccctgctgcagagagctgcccggctgggctatgaggaggtggtgctgtactgcctggagaacaagatctgtgatgtgaaccaccgggacaatgccggctactgtgccctgcacgaggcctgtgcccggggctggctgaacatcgtgcgccacctgctggagtatggagcagatgtgaactgcagcgcccaggacggcacccggcccctgcatgatgctgtggagaatgaccacctggagatcgtgcggctgctgctgtcctatggagctgaccccaccctggccacctacagcggccgcaccatcatgaagatgacccacagcgagctgatggagaagttcctgacagactacctgaatgacctgcagggcagaaatgatgatgatgccagcggcacctgggacttctacggcagctctgtgtgtgagccagatgatgaaagtggctatgatgtgctggccaaccccccaggccctgaggaccaggatgatgatgatgatgcctacagtgatgtgtttgaatttgagttcagcgagacccccctgctgccctgctacaacatccaggtgtctgtggcccagggccccaggaactggctgctgctgagtgatgtgctgaagaagctgaagatgagcagccgcatcttccgctgcaacttccccaacgtggagatcgtgaccatcgccgaggccgagttctaccggcaggtgtctgccagcctgctcttcagctgcagcaaggacctggaggccttcaaccctgagagcaaggagctgctggacctggtggagttcaccaatgagatccagaccctgctgggcagctctgtggagtggctgcaccccagcgacctggccagtgacaactactggaagagcccccagatcgcccggggctctgtggagggcaagaagacagatgacaagaccagcaagacagacctgtag

SEQ ID NO: 284129 - DNA, 1236 bp, Artificial Sequence
  derived and/or modified sequence
atgaccaggcctgccttccagcccccagccaccccagccaagcacagcagcagcaccagcagcaagggggccaaggccagcaaccctgagcccagcttcaaggccaatgaaaatggcctgccccccagcagcatcttcctgagccccaatgaggccttccgcagcccccccatcccctaccccaggagctacctgccctacccagcccctgagggcattgctgtgagccccctgagcctgcatggaaaaggacctgtgtacccccaccctgtgctgctgcccaacggcagcctcttccctggccacctggcccccaagccaggcctgccctacggcctgcccaccggccggcctgagtttgtgacctaccaggatgccctgggcctgggcatggtgcaccccatgctgatcccccacacccccatcgagatcaccaaggaggagaagccagagcggcgcagccgcagccatgagcgggcccgctatgaggaccccaccctgaggaaccgcttcagcgagatcctggagaccagcagcaccaagctgcacccagatgtgcccacagacaagaacctgaagcccaaccccaactggaaccagggcaagacagtggtgaagagtgacaagctggtgtatgtggacctgctgcgggaggagccagatgccaagacagacaccaacgtgtccaagcccagctttgctgctgagagcgtgggccagagcgctgagccccccaagcccagcgtggagcccgccctgcagcagcaccgggacttcatcgccctgcgggaggagctgggccgcatcagtgacttccacgagacctacaccttcaagcagcctgtgttcaccgtgtccaaggacagcgtgctggccggcaccaacaaggagaacctgggcctgcctgtgtccacccccttcctggagccccccctgggcagtgatggccctgctgtgaccttcggcaagacccaggaggaccccaagcccttctgtgtgggcagcgcccctccttctgtggatgtgacccccacctacaccaaggatggagcagatgaggccgagagcaatgatggcaaggtgctgaagcccaagcccagcaagctggccaagagaattgccaacagcgctggctacgtgggggaccgcttcaagtgtgtgaccacagagctgtatgctgacagcagccagctgagccgggagcagagggccctgcaggtgtccccacccacctag

SEQ ID NO: 284130 - DNA, 5112 bp, Artificial Sequence
  derived and/or modified sequence
atgctgagcgccacccccctgtacggcaacgtgcacagctggatgaattcagagagggtgcgtatgtgtggagccagcgaggaccgtaaaatccttgtgaacgacggggacgcaagtaaggctaggctggagctgcgggaagagaaccccttgaaccacaacgttgttgatgcaagtacggcccaccgcatagacggactagcagccttgtctatggacagaacaggcctaattcgcgaggggctgagggtgccagggaacatcgtgtactcctctctgtgtgggctggggtctgaaaaaggacgcgaggctgctacctctacattgggcgggcttggatttagctccgaacgcaatccagagatgcagttcaagcccaatacccccgaaaccgtggaggctagcgctgtgagcggaaagcctccaaacggcttcagcgctatatacaaaacaccccctggaatacagaaatcggctgtggccactgcagaggccctgggactggatcgcccagctagcgacaagcagtccccactgaacatcaacggtgcatcatatctgaggctgccatgggtgaacccatacatggagggggcaacccctgccatttacccattcttggatagcccaaacaaatactccctaaacatgtacaaggcgctgctgccacaacagagttacagccttgcgcagcctctgtattcacctgtatgcacgaatggtgagagatttctataccttcccccaccacattatgtaggcccccacattccctcttccttagccagtcccatgaggttgagcaccccgtcggcaagtcccgccattcctccactggtgcattgtgctgataagtcactgccttggaagatgggagtgagcccaggtaatcccgtggattcccacgcatacccacacattcaaaacagtaagcagccgagggtgccctctgccaaagcagtcacctctggccttcccggcgacactgcgctcctccttccaccaagcccgaggccatcaccaagagtacaccttcccacccaacctgcggctgacacctattccgagttccacaagcactatgctcgcatttctacctctccttccgtagccctgagtaaaccgtacatgactgtgtctagtgaatttcctgccgccaggttgtcaaacggaaagtacccaaaggcccccgagggcggcgaaggagcgcagccagtccccggccatgccagaaagactgctgtgcaggatcgaaaggacgggagttccccccctctcctggagaagcagaccgtgactaaagacgtaaccgataagcccctcgacctttcctccaaggtggtggacgtggacgctagcaaagctgatcacatgaagaaaatggcccccacggtacttgtgcattcgagggccggaagcggtctggtccttagcggaagcgagatccctaaggagactctgagcccccccgggaatggttgcgccatttaccggtcagagattatctctaccgcccccagctcttgggtggtccccggaccttccccgaacgaggaaaataatggcaagtctatgtccctgaagaacaaagctctggactgggcaataccacagcaacgctctagttcttgcccaagaatgggaggaacggatgccgtaattactaatgtttccggttcggtttctagcgcagggagaccagcttccgcatctccggctcccaatgccaatgcggacggcactaaaacatctcggtcctctgtcgaaaccaccccatctgtgattcagcacgttggccaaccgccagctacgcctgcgaagcatagctcttcaacctcaagcaaaggagcaaaagcaagtaatccagagccctcctttaaagctaatgagaacgggctcccgcccagtagcatcttcctaagccctaacgaagcattccggtcccctcctatcccttatccgcgtagctatctaccttatccggccccggaaggcattgctgtgtcacccctgagtcttcacggtaagggtcctgtctaccctcatccagtactgttgcccaatgggagcctctttcctggtcatctggccccaaagccaggactcccttatggattgccaaccgggagacccgagttcgtgacataccaggatgccttgggcctcggaatggtccatcctatgctcatcccccatactcccattgagataacaaaggaggaaaagcccgagagacgttctaggtcccacgagcgggctcggtacgaagaccctactctccgaaacaggttcagcgaaatcctggaaacatccagcactaaactgcatcccgacgtcccaaccgacaagaacctgaaaccaaacccaaattggaatcaaggaaagacagtggtcaagtctgacaagctcgtatatgtggatctcctgagggaggagccagacgccaaaactgatacaaacgtgtccaagccaagcttcgctgccgaatccgttggccagagtgcggaaccacctaaaccatcggttgagccagctctccaacagcatcgggacttcatagccctacgcgaggaattggggcgcatctccgattttcacgagacctacacattcaagcaaccagtgttcactgtgagcaaggacagtgtgctggcaggcaccaataaagaaaatctgggcctgcctgtgagcacaccctttctcgagcctcccttgggaagcgacgggccggcagtgactttcggaaaaacccaggaagatccgaaaccgttttgtgtcggcagtgccccaccatccgtggacgtaactcctacgtacactaaggatggcgctgacgaagccgagagcaatgatggcaaagtgctgaagccaaaaccttcaaagctggccaagcgaatagctaattctgcgggatacgtgggcgatagatttaaatgcgttactacagagctttacgcggactcaagccagctctcacgggagcagagggccctacagagggcaatgatgcggttctccgagctggaaatgaaggaacgggagggtgggcacccagccactaaggattccgagatgtgtaaattctcaccagccgattgggaacgcctcaaagggaaccaggataaaaagcctaaatccgtgacgctggaggaagcaatcgccgagcaaaatgaatcagagcgctgtgagtatagtgtggggaataagcatcgggacccgttcgaagccccagaggacaaggacctgcctgtggaaaagtattttgtggagaggcaacctgtaagcgaaccaccagccgaccaggtagctagtgacatgcctcacagcccaaccctccgtgtggatcgtaaacggaaagtgtccggagactccagccacactgaaacaactgctgaagaggtacccgaggatcccttgttgaaagccaagcgcagacgagtttctaagggcctccatccgaagaagcagcggcatttgctccaccttcgggaacggtgggaacagcaagtaagcgccgcggacggcaaaccaggacgtcagagccgtaaagaagtcacacaggccactcagcccgaggcaatcccccaaggcactaacattactgaggaaaagccagggcgcaagcgagccgaagccaagggaaatagaagctggtctgaagagagcctcaaaccaagcgacaatgagcagggcctccctgtcttctctggatcccctcctatgaaaagccttagttctacaagcgcaggcgggaagaaacaggcacagccttcctgcgcacccgcctcacgccccccggccaagcaacagaagatcaaagaaaaccagaaaaccgatgttttatgcgcagacgaggaggaggattgtcaagccgctagcctcctccagaagtacactgacaattccgagaagccttccggaaagcgcctctgtaaaacaaagcacctcatacctcaagaaagcaggcgggggctccccctgaccggagagtattacgttgagaacgctgacggaaaggtgaccgtccgccgctttcgaaaacggcctgagccctcaagtgattatgacctgtcacctgctaaacaagaacctaagcctttcgacagactccaacagctgctgcccgcttcccagtctacgcagctgccctgctcatcatctccccaggagaccacccaatccagaccaatgccccctgaagcccggcggctaatcgtgaataaaaacgctggcgagacacttttgcagcgcgcggcccgcctcgggtatgaggaggttgtgctgtattgtctggagaacaagatctgtgatgtaaaccatcgtgacaatgcagggtactgcgctctccacgaggcgtgcgccaggggttggttgaacatagttaggcatctcctggagtatggggcagacgtgaattgctcagcccaggacggcaccaggccactgcatgacgctgttgaaaatgatcatttagaaattgtgcgactgttgttgtcctacggagcagatcccactcttgccacctacagcgggcggaccatcatgaagatgacacactccgagttgatggagaagtttctcacagactatctgaatgacttgcagggccgtaacgatgatgacgcttctgggacttgggacttttacggatccagcgtttgcgagcccgacgacgaaagcggttacgacgtcctggccaatcccccagggcccgaggatcaggacgacgatgatgacgcgtattccgatgtctttgaattcgagttttccgagacgcccctgctgccttgttacaatatccaggtatcggttgcccagggccctagaaactggctccttctctcggacgtattaaaaaagctgaagatgtcctcccgcatttttcgctgtaatttccctaatgtggaaatcgtcaccattgctgaggccgagttctaccggcaggtgtctgctagcctgctgttctcctgcagtaaagacctggaagcgttcaaccctgaatcaaaagaactgcttgatctggtagaattcacaaacgagattcaaacccttctaggctcctcagtggagtggctgcatccatccgatttggctagcgacaattactggtag

SEQ ID NO: 284131 - DNA, 1869 bp, Artificial Sequence
  derived and/or modified sequence
atgccccacagccccaccctgcgggtggaccggaagcggaaggtgagtggagatagcagccacacagaaaccacagctgaggaggtgccagaggatccacttctgaaagccaaacgtagaagggtatcaaaagggttgcaccctaaaaagcagaggcacctcctgcacttgcgagaacgatgggaacaacaagtctccgctgccgatgggaaaccgggacgtcaatcccgtaaggaggtcacccaagccacccagcccgaagcgatcccacaggggactaatattactgaggagaagcccggacgcaagcgagccgaggctaagggaaacagatcttggagcgaggagtccctcaagccttcagacaacgaacaaggactgcccgtcttcagtggctcccctcctatgaaaagtctgtcgtcaaccagtgctggtgggaagaagcaggcgcaaccttcatgcgccccggcatcacgtcctcccgctaagcaacaaaaaataaaggagaatcagaagacggacgttctttgcgccgacgaggaggaagactgtcaggcggcctctctgctccagaagtatactgataactctgaaaagccctccggcaaacgactgtgtaagacgaaacacttaatcccacaggaatcacgccggggccttccgttgaccggcgaatattacgtggaaaacgccgatgggaaggttaccgtgcgccgcttccgcaagcggcctgagcccagttccgactacgacttgtctcctgccaaacaagagcctaagccttttgatcgccttcaacagctgttgccggcatcacagtctacgcagttaccatgtagttcatcaccacaggagacaactcagtcaaggcctatgccgccagaggcccgccggcttattgtgaataagaatgctggagagacccttctgcagcgcgctgccaggctagggtacgaggaggtagtgctgtattgtcttgaaaacaaaatctgcgacgtcaatcatcgggataatgcagggtactgcgccctgcacgaagcctgtgccaggggatggctgaacatagttcgtcatctgctcgagtatggagccgatgtcaactgtagcgcccaggacggtacccggccacttcacgacgctgtcgagaacgatcatctcgagatcgtgcgattattgctcagctatggtgccgatccgaccctggcgacttactccgggcgaaccattatgaaaatgactcattcagaactcatggagaagttcctcactgactatctcaacgacctccaggggaggaacgacgacgacgctagtgggacctgggatttctacggctccagcgtgtgcgaaccagacgatgagagcgggtacgatgtgctcgcaaacccccccggtcctgaagaccaggacgacgacgacgacgcttacagcgacgtcttcgaattcgagttctccgaaacccctctcctaccgtgctataacatccaggtcagcgtggcccagggaccacgcaattggttgctgttgtcagacgtcctgaagaagcttaagatgtcatcacggatcttcaggtgtaactttccgaacgtcgaaatagttacaattgcagaagctgaattctaccggcaagtcagcgcatccctactgttttcctgttctaaagatcttgaggctttcaatccagagtccaaggagctccttgatctcgtggagttcacaaacgaaatccagaccctgctcgggtcttccgtagagtggttgcatccctccgatttggccagcgacaactactggaagtctccacagatcgcccgcggctcagttgaaggaaaaaaaactgacgataagaccagtaaaactgatctatag

SEQ ID NO: 284132 - DNA, 1236 bp, Artificial Sequence
  derived and/or modified sequence
atgacccggcccgccttccagccccccgccacccccgccaagcacagctccagcacgagctctaagggcgcaaaggcctcaaaccccgaacctagcttcaaagcaaacgagaacgggctaccccccagcagcatattcctcagccccaatgaggccttcagatcccctcctataccttacccccggagttatctgccctatccagctcctgagggaatagccgtgagccctctctcactgcacgggaaaggccctgtgtaccctcaccccgttctattacccaacgggtcactcttccccggccacctggcccccaaacctggcctcccctatggactccccacaggtagacctgagttcgtgacttatcaagatgctcttggcctcggcatggtccaccccatgttaataccacacactcctatcgagattaccaaagaggaaaagcccgagcgcaggtctagatcacacgagcgggccagatatgaagatcccacactccgcaacaggttctctgaaattctggagacgtcatcaacaaagctccatcccgatgtccccacagacaagaaccttaaacccaatcccaattggaatcaggggaagacggttgtcaaatccgataagctagtctacgtagatttattacgggaagaaccagacgcgaagacagacactaacgttagcaaaccttcctttgcagccgaatcggtcggtcagagcgccgagccacctaaaccatctgtggaaccagcacttcagcagcaccgcgacttcatcgctctgcgcgaagaactcgggcggatttcagatttccacgaaacgtatactttcaaacagcccgtctttaccgtgtctaaggattccgtgctcgcaggcacaaataaggagaatctgggactgcccgtttctaccccgtttttagagccacctcttgggtctgacggtcccgccgtgaccttcggaaagactcaggaggacccaaaacccttttgcgtggggtctgctccacccagcgtggatgtcacgccgacttatactaaggacggcgcggatgaagcagagtctaacgacggtaaggtcctgaagcctaagcccagcaagctggccaagcgtatagcgaattcagctgggtatgtcggggaccgttttaagtgcgtaactacggagttgtatgctgactcaagccagctttcccgggaacagagggctttacaagttagtccacccacctag

SEQ ID NO: 284133 - DNA, 5111 bp, Artificial Sequence
  derived and/or modified sequence
atgctgtcagcaacaccactctatgggaacgttcacagctggatgaacagcgagagagtgcgcatgtgcggcgcttctgaagatcggaagatcttggtcaatgacggagatgctagcaaggccaggttggagttgagagaagaaaatcccttgaatcacaacgtggtggatgcgtcaaccgcccatagaattgatggactagccgctctatcaatggatagaactgggctaatcagagaagggctgagagttccaggaaacattgtgtactcctccttatgtggcctgggcagcgaaaagggaagagaggctgctacaagcaccttgggcggtctgggttttagctctgaaaggaatcctgagatgcagttcaaaccaaacacaccggagacagtcgaggctagcgcagtgtctgggaagccgccaaacggctttagtgcaatatacaagacccccccagggatccaaaaatctgccgtcgccactgcggaggctctgggcctagataggcccgcaagtgacaagcagagccctctcaacatcaatggggcttcgtaccttaggctaccttgggttaatccatatatggagggggctacacctgcaatttatccctttttggatagccccaacaagtatagccttaatatgtataaagcgctgctgccccagcagtcatactctttggcacagcctctgtattcaccggtatgcacgaatggggagaggtttctctaccttcccccaccacattatgtgggacctcacattccgtcctctctggcctctccgatgaggttgtccacaccctctgcgagcccagcaattcccccactggttcattgcgctgacaaatcgctgccctggaagatgggagttagtcctggaaatcctgtggatagccacgcttacccgcacatccagaactctaagcaacccagagtaccttcagccaaggcagtaacatctgggctgcctggcgatactgccttgctgcttcccccatctcctcgcccttccccacgtgtgcatctgcctacacagccagccgcagatacttattctgaatttcacaaacactacgcgagaatttctacctcccctagtgtcgccctgagcaagccctacatgaccgtgagtagtgagtttcctgctgcaaggctgtccaatggaaaatatccaaaagctcccgaaggaggtgaaggcgcacagccagtacccggtcatgcacgaaagaccgccgtgcaagacagaaaagacggctccagccctccactgttagagaagcagaccgtaaccaaagatgtgaccgataaaccactggacctgtcatcaaaggtggtcgatgttgacgccagtaaagcagaccatatgaagaaaatggcaccaaccgtgttggtgcattcccgggctgggtccgggctcgttttgagcgggagcgaaattcccaaagagacgctgagccccccaggcaatggatgcgctatttaccgatctgagataatctccacagcacccagttcctgggtcgtgccgggtcctagtcctaatgaagagaataatggcaagagcatgagcttgaaaaataaggctctggattgggccattcctcagcagcgatcttcttcttgccccagaatgggaggtacagatgctgtgattactaatgtgagcgggagcgtgtctagcgcagggcgacccgcatctgcctcccctgcacctaacgctaacgccgacggtacgaagacctctcgcagcagcgttgagactaccccctccgtgatccaacacgtaggtcagcccccagccacacccgcaaaacacagttcctccactagctcgaaaggggcaaaggcaagtaaccccgagcccagcttcaaggccaacgaaaacggactcccgccttcttcaatctttctgtcccctaatgaggctttcaggtccccacccattccctaccctcggagttacctcccctaccctgccccagagggaattgccgtgagccccttatctctgcacgggaagggaccagtgtacccacatccagtgttgctgccgaatggcagcctctttcctggtcatctcgcacctaaacctggattaccctacggattaccgacaggtcggccagaattcgttacctaccaggatgccctcgggctgggcatggtgcaccccatgcttatcccccacacgcccatcgaaatcacgaaagaagaaaagccggagcggcgatcccggagccacgagcgagccagatatgaagatcctaccctacgaaatcggttctcagaaatcctagagacttcatccacgaagctacacccagacgtacccactgataagaacctgaagcctaacccgaattggaaccagggaaagactgttgtgaagagtgacaaactggtatatgtggatcttttgcgtgaagagcctgacgcaaagacagacactaacgtcagtaaaccatcttttgctgcggagagtgtgggccagagcgccgaacctccaaaaccctccgtcgagccagcgctgcagcaacaccgagatttcatcgccctgagggaagagttgggccgaatcagtgattttcacgagacctatactttcaagcaacccgtttttacggtgagcaaggattcagtactggctggcaccaataaagaaaacctggggctgccggtctccaccccctttttagaaccaccactgggctccgacggccctgcagtgacgtttgggaagacacaggaggatcctaagcctttttgtgtcggatcagccccaccaagtgtggatgtgactccaacttataccaaagacggggcagacgaggccgagagcaatgacggtaaggttctgaaacctaagccgagcaaattggccaaacgcattgccaatagtgcgggttacgtgggagaccgctttaagtgtgtgaccaccgagctttatgcggattcaagccagctctctcgcgaacagagagctctgcagagggccatgatgcgcttcagtgaacttgagatgaaggagagagagggaggacatcctgccacaaaggacagtgagatgtgtaagttctctccagcagactgggaacggctgaaagggaaccaagataaaaaacctaaaagcgttacattggaggaggcaattgcggagcagaacgaatctgagcggtgtgaatatagcgtgggaaataaacacagggatccattcgaggcacctgaagataaggacctgcccgtggagaagtactttgtggaaagacagcccgtgtccgagcctccagctgatcaagttgcctctgatatgccacacagtcccactctgagggtcgaccggaagcgcaaggtgagcggcgactcaagtcacacggaaacaactgctgaagaagtaccagaggaccctctcctcaaggccaaaaggcgccgagtatcaaagggtctccacccaaaaaagcagaggcacttactgcacttgagggagcggtgggagcagcaggtcagtgccgcagacggaaagccgggtaggcaatcgcgaaaggaagttactcaggcgactcagcccgaagcaattccgcaaggaaccaacattaccgaagagaagccaggaagaaaaagagcagaggctaaaggcaatagatcctggtctgaagaatcccttaaaccttccgataacgaacagggcctcccagtgtttagtggctcaccaccaatgaagtccctgtccagcactagcgccggtgggaagaagcaggcgcagccttcctgtgctcccgcatcccggcctcccgctaagcagcaaaagatcaaagaaaatcagaagacagatgtcttgtgcgcagacgaagaagaagactgccaggctgcatctttgctccagaagtatactgacaactccgagaaaccgagtggtaaaaggctatgtaaaactaagcacctgattccccaggagtctcgcaggggactgcctctcacaggggagtattacgtggagaatgccgacggtaaggttacagtcagacggttcaggaagaggcccgagcccagctcagactacgacctgagtccagcaaaacaggagcctaagcctttcgacagattacagcagctccttccagcttcccagtctactcagcttccatgtagcagctctccacaggagacaactcagagccggccaatgcctcctgaagcacgtcggctaattgtgaataaaaatgccggagaaaccttgttacagcgcgcagccagactgggctacgaggaggtggttttatactgccttgagaataagatctgcgacgtgaatcaccgtgataacgctggctactgtgcactccatgaagcatgcgccagaggatggttaaatatcgttcgccacctgctagagtacggggctgacgtcaattgttctgcccaagatggaacaaggcctctccacgacgctgtggaaaacgaccacctcgagatagttagattgctcctgagctatggagctgaccctactcttgcaacctacagcgggaggaccatcatgaaaatgacacattccgagctaatggagaagtttcttaccgactacctcaacgatctccagggaaggaatgatgacgacgcgagcggaacctgggacttctatggatcctcggtctgtgagcctgacgacgaatccgggtacgatgttttagccaatccacctggccctgaggatcaagatgatgatgatgatgcatacagcgatgtgtttgagtttgaattcagtgaaaccccattactgccgtgctacaatatccaggtatctgtagcccagggaccacgaaattggctgctcctgtccgacgttctcaagaagctgaagatgtctagccggatcttcagatgcaacttcccaaacgtagagatcgtcacaatcgcagaggcagagttctatcgccaggtctcagcttctcttctgtttagctgttccaaggacctcgaggcatttaatccagaatctaaagagctgctcgacttggttgagttcaccaatgaaattcagactttgttaggaagctctgtggagtggttgcaccccagtgacctagcatccgacaactactggta

SEQ ID NO: 284134 - DNA, 1869 bp, Artificial Sequence
  derived and/or modified sequence
atgccccattcaccaacattacgggtagaccgaaagcgcaaggtctccggtgattcatcccacacagagacaacagctgaagaggtgcccgaggaccccctgcttaaagcaaagcgcagacgagtgtcgaagggcctccatcccaagaagcagcgtcacctcctccacttgcgcgagcgttgggagcaacaggtgtccgcagccgacggaaagcccggacgccaatcccggaaggaggtgacacaagctacgcagcctgaggccattccccaggggactaacatcactgaggaaaagccgggtcggaaacgcgctgaagcaaagggcaatcggtcttggtccgaagagagtcttaagcctagcgacaacgagcagggcctacctgtttttagtggctccccgcctatgaaatctctttcctcaacatccgctggagggaagaagcaagcccagccctcctgcgcaccggctagcaggcctcccgctaagcagcagaagatcaaagagaaccagaagacggatgtgctctgcgctgatgaagaggaggattgtcaagccgcttctctcttgcagaagtacaccgataactctgagaagccatccggaaagcggttgtgtaagactaagcatctgatcccccaggagtcgaggcgcggactgcccttgactggggagtactacgttgaaaacgccgatggcaaagtcacagtgcggaggtttagaaaacgtcctgagcccagctccgattatgacctgtctccagcaaaacaggagcctaagccctttgacagactccagcagctgttaccggctagtcagtctacgcagctaccttgtagctcttctccacaggaaacaactcagtctaggccaatgcctcctgaagccagacggctcattgtgaacaagaacgcaggcgaaaccttgctgcagagggcagccagactcggctatgaggaagtagtattgtattgtttggagaacaagatatgcgacgtgaatcatcgtgacaacgccggatactgcgctttacacgaagcctgcgctcgcggttggttaaacatagttcgtcatttgctggagtacggcgctgacgtgaactgtagcgctcaggacggcacacgccctttgcatgatgccgtggagaatgatcatctggagatagtaagactgttgctgtcttatggagctgacccaacccttgcgacctactcaggcaggaccattatgaagatgacacatagtgagcttatggagaaatttctcacagattatctcaacgacctgcagggccgtaacgacgacgacgcctccggtacctgggatttttacggctcatccgtgtgcgaacccgacgacgagtccgggtacgatgtactggcgaatcctcctggccctgaagaccaggacgacgacgatgacgcatacagtgacgtcttcgagtttgaattctcagagacaccactgctgccatgctacaacatccaggtctctgtggcccagggccctcgtaattggctgttgttgtccgatgtactcaagaaactaaagatgagcagcagaattttcaggtgcaactttccaaatgtagagatagtgactatcgccgaggccgaattttatcgacaggtgtcagcctctctactattttcctgttcaaaagatctggaggcctttaacccagagtctaaggagctgctggatttagtggagtttaccaacgaaattcagacgctactgggctcgtctgtcgagtggcttcatccatccgacttggcttccgataattattggaagagccctcagattgcccgtggctccgtggagggtaaaaaaactgacgacaagacgtcgaaaaccgatttgtag

SEQ ID NO: 284135 - DNA, 1236 bp, Artificial Sequence
  derived and/or modified sequence
atgacgcgccctgctttccaaccgccagccacccctgccaaacacagcagctctacctctagcaaaggcgcaaaagctagcaatccggagccatccttcaaggcaaatgagaatggactgccaccgagttcaattttcttatccccaaacgaagcatttagatccccacccataccctatcctaggagctacctgccctacccggctccggaaggaattgcggtgagcccacttagcctgcatggtaagggccctgtgtatccccaccccgtcctcctccccaacgggtcactttttcctgggcatctggcccctaagcccggtcttccgtatggcctccccaccggccgacccgaatttgtgacataccaggacgccctggggcttggcatggtgcaccccatgctgattccacatacccctattgaaatcaccaaggaggagaagccagaaaggcggtcacggagtcacgagcgggcaagatacgaagaccctacgctgcggaaccgcttctccgagatcctcgaaacctctagcacaaaactgcaccccgacgtgccaaccgacaaaaatttgaagccaaacccaaactggaaccaaggaaagacagtggttaagtccgataaactagtttacgtagatttactgagagaggaacccgacgccaaaacggataccaacgtatcaaagccgtcctttgcagcggaaagtgtcggacaatccgccgagccgcctaagccttccgtcgagcccgcactccagcagcacagagacttcattgccctcagagaggaactgggaaggatttccgacttccacgaaacatatactttcaaacagccagtgtttacggttagtaaagattccgtgttggcgggtactaataaggagaatctggggcttcctgtcagtacacctttcttggaaccacccctggggtctgacggccctgctgtgacatttggtaaaacacaggaggaccctaaacctttctgcgtgggatctgctcccccttccgtggacgttaccccaacctatacaaaagacggcgctgacgaagccgagagcaacgacggcaaggtgcttaagcccaagccatccaagctagctaaaagaatcgcgaattccgcgggttatgttggggatagatttaagtgcgttacgactgaattatatgctgatagttctcaactgagtagagagcaacgggcactccaggtgtctccacccacatag

SEQ ID NO: 284136 - DNA, 6338 bp, Artificial Sequence
  derived and/or modified sequence
ggtatttccgaagctggccaggccctctgctgctgaccctggaaatcgggtcacactagacaaggctgcatgtgcggggagaaggcgggggggctcctttgcacgcggctgctcgcgtttccccaaggcctccaaatagtctaaaaactcacctcggaggaggagaaagagcgtgaagtggctctttcgatctgagacaccccctcccggagaactcgccccctcccccccagcccagagcggagtgaaatcttagaagccgtggctgctgggtttgaacggaatgctggagtcagtggaagacggagctggtcggcccgaagactagacgcttgaagcaaagctgccatcccagaagacgacatgctctcagcaacccccctgtatgggaacgttcacagctggatgaacagcgagagggtccgcatgtgtggggcgagcgaagacaggaaaatccttgtaaatgatggtgacgcttcaaaagccagactggaactgagggaagagaatcccttgaaccacaacgtggtggatgcgagcacggcccataggatcgatggcctggcagcactgagcatggaccgcactggcctgatccgggaagggctgcgggtcccgggaaacatcgtctattctagcttgtgtggactgggctcagagaaaggtcgggaggctgccacaagcactctaggtggccttgggttttcttcggaaagaaatccagagatgcagttcaaaccgaatacacccgagacagtggaggcttctgccgtctctggaaaacccccaaatggcttcagtgctatatacaaaacaccgcctggaatacaaaaaagtgctgtagccacagcagaagcgctgggcttggacaggcctgccagcgacaaacagagccctctcaacatcaatggtgctagttatctgcggctgccctgggtcaatccttacatggagggtgccacgccagccatctaccctttcctcgactcgccaaataagtattcactgaacatgtacaaggccttgctacctcagcagtcctacagcttggcccagccgctgtattctccagtctgcaccaatggggagcgctttctctacctgccgccacctcactacgtcggtccccacatcccatcgtccttggcatcacccatgaggctctcgacaccttcggcctccccagccatcccgcctctcgtccattgcgcagacaaaagcctcccgtggaagatgggcgtcagccctgggaatcctgttgattcccacgcctatcctcacatccagaacagtaagcagcccagggttccctctgccaaggcggtcaccagtggcctgccgggggacacagctctcctgttgcccccctcgcctcggccgtcaccccgagtccaccttcccacccagcctgctgcagacacctactcggagttccacaagcactatgccaggatctccacctctccttcagttgccctgtcaaagccatacatgacagttagcagcgagttccccgcggccaggctctccaatggcaagtatcccaaggctccggaagggggcgaaggtgcccagccagtgcccgggcatgcccggaagacagcggttcaagacagaaaagatggcagctcacctcctctgttggagaagcagaccgttaccaaagacgtcacagataagccactagacttgtcttctaaagtggtggatgtagatgcttccaaagctgaccacatgaaaaagatggctcccacggtcctggttcacagcagggctggaagtggcttagtgctctccggaagtgagattccgaaagaaacactatctcctccaggaaatggttgtgctatctatagatctgaaatcatcagcactgctccctcatcctgggtggtgcccgggccaagtcctaacgaagagaacaatggcaaaagcatgtcgctgaaaaacaaggcattggactgggcgataccacagcagcggagttcatcatgcccgcgcatgggcggcaccgatgctgtcatcactaacgtttcagggtcagtgtcgagtgcaggccgcccagcctccgcatcacccgcccccaatgccaatgcagatggcaccaaaaccagcaggagctctgtagaaaccacaccatccgttattcagcacgtgggccagcccccggccactcctgccaagcacagtagcagcaccagcagcaagggcgccaaagccagcaacccagaaccgagtttcaaagcaaacgagaacggccttccaccaagctctatatttctgtctccaaatgaggcattcaggtccccaccaattccctaccccaggagttacctcccttacccagcccctgagggcattgctgtaagtcccctctccttacatggcaaaggacctgtctaccctcacccagttttgttacccaatggcagtctgtttcctgggcaccttgccccaaagcctgggctgccctatgggcttcccaccggccgtccagagtttgtgacctaccaagatgccctggggttgggcatggtgcatcccatgttgataccacacacgcccatagagattactaaagaggagaaaccagagaggagatcccggtcccatgagagagcccgttacgaggacccaaccctccggaatcggttttccgagattttggaaactagcagcaccaagttacatccagatgtccccaccgacaagaacctaaagccgaaccccaactggaatcaagggaagactgttgtcaaaagcgacaagcttgtctacgtagaccttctccgagaagaaccagatgctaaaactgacacaaacgtgtccaaacccagctttgcagcagagagtgttggccagagcgctgagccccccaagccctcagttgagccggccctgcagcagcaccgtgatttcatcgccctgagagaggagttggggcgcatcagtgacttccacgaaacttatactttcaaacagccagtcttcaccgtaagcaaggacagtgttctggcaggtaccaacaaagagaacctagggttgccagtctcgactccattcctggagccacctctggggagcgatggccctgctgtaacttttggtaaaacccaagaggatcccaaaccattttgtgtgggcagtgccccaccaagtgtggatgtgacccccacctataccaaagatggagctgatgaggctgaatcaaatgatggcaaagttctgaaaccgaagccatctaagctggcaaagagaatcgccaactcagcgggttacgtgggtgaccgattcaaatgtgtcactaccgaactgtatgcagattccagtcagctcagccgggagcaacgggcattgcagcgtgcaatgatgcgcttctcagagttggagatgaaagaaagagaaggtggccacccagcaaccaaagactccgagatgtgcaaattcagcccagccgactgggaaaggttgaaaggaaatcaggacaaaaagccaaagtcggtcaccctggaggaggccattgcagaacagaacgaaagtgagagatgcgagtatagtgttggaaacaagcaccgtgatccctttgaagccccagaggacaaagatcttcctgtggagaagtactttgtggagaggcagcctgtgagcgagcctcccgcagaccaggtggcctcggacatgcctcacagccccaccctccgggtggacaggaaacgcaaagtctcaggtgacagcagccacactgagaccactgcggaggaggtgccagaggaccctctgctgaaagccaaacgccgacgagtctctaaagggctccatcctaaaaaacaacgccacttgctgcaccttagagaacgatgggagcagcaggtgtcggcagcagatggcaaacctggccggcaaagcaggaaggaagtgacccaggccactcagcctgaggccattcctcaggggactaacatcactgaagagaaacctggcaggaaaagggcagaggccaaaggcaacagaagctggtcggaagagtctcttaaacccagtgacaatgaacaaggcttgcctgtgttctccggctctccgcccatgaagagtctttcatccaccagtgcaggcggcaaaaagcaggctcagccaagctgcgcaccagcctccaggccgcctgccaaacagcagaaaattaaagaaaaccagaagacagatgtgctgtgtgcagacgaagaagaggattgccaggctgcctccctgctgcagaaatacaccgacaacagcgagaagccatccgggaagagactgtgcaaaaccaaacacttgatccctcaggagtccaggcggggattgccactgacaggggaatactacgtggagaatgccgatggcaaggtgactgtccggagattcagaaagcggccggagcccagttcggactatgatctgtcaccagccaagcaggagccaaagcccttcgaccgcttgcagcaactgctaccagcctcccagtccacacagctgccatgctcaagttcccctcaggagaccacccagtctcgccctatgccgccggaagcacggagacttattgtcaataagaacgctggcgagacccttctgcagcgggcagccaggcttggctatgaggaagtggtcctgtactgcttagagaacaagatttgtgatgtaaatcatcgggacaacgcaggttactgcgccctgcatgaagcttgtgctaggggctggctcaacattgtgcgacacctccttgaatatggcgctgatgtcaactgtagtgcccaggatggaaccaggcctctgcacgatgctgttgagaacgatcacttggaaattgtccgactacttctctcttatggtgctgaccccaccttggctacgtactcaggtagaaccatcatgaaaatgacccacagtgaacttatggaaaagttcttaacagattatttaaatgacctccagggtcgcaatgatgatgacgccagtggcacttgggacttctatggcagctctgtttgtgaaccagatgatgaaagtggctatgatgttttagccaaccccccaggaccagaagaccaggatgatgatgacgatgcctatagcgatgtgtttgaatttgaattttcagagacccccctcttaccgtgttataacatccaagtatctgtggctcaggggccacgaaactggctactgctttcggatgtccttaagaaattgaaaatgtcctcccgcatatttcgctgcaattttccaaacgtggaaattgtcaccattgcagaggcagaattttatcggcaggtttctgcaagtctcttgttctcttgctccaaagacctggaagccttcaaccctgaaagtaaggagctgttagatctggtggaattcacgaacgaaattcagactctgctgggctcctctgtagagtggctccaccccagtgatctggcctcagacaactactggtgagcaagctggacccaccatgtacagtgtgttatagtgttaatccttgtgcatatgtgtcataatacaactatttctgtaaagaaaggacactattacatatgaaaatatctcttctttatataagagaaattactccagtcagaaggacttagaaacatgtttttttccttttaaacttttaagtcagtttttatgaagttgttataatgtttctttacttttcaatgcacacatgctttgggatacgtttgtttttacttggaacatttgtttcttttcttttttaaggagaaaaaaaaatgagtaaaaggagctccacactttgacttaatttcatacaaagctctgatgacaggccatgactgtagagtggtcagaactgtgtggttggtttgagggagcgaattcggggaaggcacttggtgatataactttgttttgtttacagagtacctgctcgggccaggtaaatgctattggatgtaatccagtagtgtgtaatataaattcaaaccatatccacacacaacaactaattgtatgaaacttttatatcctaatttaaaagctgtgaaattagttttcacgcatcaaaccggattgtttatatgtttaaacattttatgctcttatttaaagaagactttgagctatttttttctgtaccctgtaaaatattgaaaactaacataatatgttgaggttgcttggaaatgtacataaaactaaaattttctgaatcgtgtgtttatgtttgaaatctgtgttttaactttgtaagtaaattctctgcctttgtatttatattttacaaaaattttcttaaaaggcaataaaactgttgaggaaaggagaaaattgaa

SEQ ID NO: 284137 - DNA, 2230 bp, Artificial Sequence
  derived and/or modified sequence
atgtatgtgctgtgccttataggaccatgatgcaaggagaaagtggtagacggtgtaggactcagccatgttcacatctgcctagatctcatgaccaaaggcacatggcattccactcacagaagggctgcgagtatagtgttggaaacaagcaccgtgatccctttgaagccccagaggacaaagatcttcctgtggagaagtactttgtggagaggcagcctgtgagcgagcctcccgcagaccaggtggcctcggacatgcctcacagccccaccctccgggtggacaggaaacgcaaagtctcaggtgacagcagccacactgagaccactgcggaggaggtgccagaggaccctctgctgaaagccaaacgccgacgagtctctaaagggctccatcctaaaaaacaacgccacttgctgcaccttagagaacgatgggagcagcaggtgtcggcagcagatggcaaacctggccggcaaagcaggaaggaagtgacccaggccactcagcctgaggccattcctcaggggactaacatcactgaagagaaacctggcaggaaaagggcagaggccaaaggcaacagaagctggtcggaagagtctcttaaacccagtgacaatgaacaaggcttgcctgtgttctccggctctccgcccatgaagagtctttcatccaccagtgcaggcggcaaaaagcaggctcagccaagctgcgcaccagcctccaggccgcctgccaaacagcagaaaattaaagaaaaccagaagacagatgtgctgtgtgcagacgaagaagaggattgccaggctgcctccctgctgcagaaatacaccgacaacagcgagaagccatccgggaagagactgtgcaaaaccaaacacttgatccctcaggagtccaggcggggattgccactgacaggggaatactacgtggagaatgccgatggcaaggtgactgtccggagattcagaaagcggccggagcccagttcggactatgatctgtcaccagccaagcaggagccaaagcccttcgaccgcttgcagcaactgctaccagcctcccagtccacacagctgccatgctcaagttcccctcaggagaccacccagtctcgccctatgccgccggaagcacggagacttattgtcaataagaacgctggcgagacccttctgcagcgggcagccaggcttggctatgaggaagtggtcctgtactgcttagagaacaagatttgtgatgtaaatcatcgggacaacgcaggttactgcgccctgcatgaagcttgtgctaggggctggctcaacattgtgcgacacctccttgaatatggcgctgatgtcaactgtagtgcccaggatggaaccaggcctctgcacgatgctgttgagaacgatcacttggaaattgtccgactacttctctcttatggtgctgaccccaccttggctacgtactcaggtagaaccatcatgaaaatgacccacagtgaacttatggaaaagttcttaacagattatttaaatgacctccagggtcgcaatgatgatgacgccagtggcacttgggacttctatggcagctctgtttgtgaaccagatgatgaaagtggctatgatgttttagccaaccccccaggaccagaagaccaggatgatgatgacgatgcctatagcgatgtgtttgaatttgaattttcagagacccccctcttaccgtgttataacatccaagtatctgtggctcaggggccacgaaactggctactgctttcggatgtccttaagaaattgaaaatgtcctcccgcatatttcgctgcaattttccaaacgtggaaattgtcaccattgcagaggcagaattttatcggcaggtttctgcaagtctcttgttctcttgctccaaagacctggaagccttcaaccctgaaagtaaggagctgttagatctggtggaattcacgaacgaaattcagactctgctgggctcctctgtagagtggctccaccccagtgatctggcctcagacaactactggaagtcccctcaaatagctagggggagtgttgaagggaaaaaaacagacgacaagaccagtaaaacagacctgtagaaatgatttaagcagaagaggactggtgaagctgaactaccatcaaagctacgagagatcctacacacccagatttaaaaaataataaaaacttaagggca

SEQ ID NO: 284138 - DNA, 288 bp, Artificial Sequence
  derived and/or modified sequence
tccattcatgcactgaagcgcgtgcagagctgctgatcgctgccattgttactcgcgggcggtgtgggagctgagcctccactctggcgagagataaatggcctctgacagcccctcctcgccaagagagctcctcggatttcaccgcgcggcggctctcagactagacgcttgaagcaaagctgccatcccagaagacgacatgctctcagcaacccccctgtatgggaacgttcacagctggatgaacagcgagagggtccgcatgtgtggggcgagcgaagacag

SEQ ID NO: 284139 - DNA, 2618 bp, Artificial Sequence
  derived and/or modified sequence
aagcaaagctgccatcccagaagacgacatgctctcagcaacccccctgtatgggaacgttcacagctggatgaacagcgagagggtccgcatgtgtggggcgagcgaagacaggtgaatgcgcccatctgggccgggcctgagtggagcccacgcccatgctgaagcccccctcaacttctcacagccaccgtgggcccaaaaggggtgggagagaaagagcttcccgcctagtaggccgctcttgatttacagttttaacaggcaacctggctcagtgaagcattgccgccctttaaaagattagcccctaaagcggcctttcagtgcactttcgtccttaatttattatttcatatttatgaaggagaattaatcccagtctatatactgctttaactctaaatgtcaggagtgtgggcccaggtggagcagcattctatgtgcttttaaaacaaatagtttgctcagtaataaatggggagagagccaccgttttccttcattgaagcccaggatctctcattgtcctctgctgcctgttcccagaggccactggcgcctgcttttggtcgtcagacagctctgttatgcttcctaatcagtaattttggagttgtggggtggaggcagctaagcagtagatgattgaagctgctcttcggggtaatgaggaaacttttcctctgccgcttgtcagcgatttttatcctggggatttggaagttggcaccaagcactttctttatcgatgctctctgataacaagtcccagggcagccgcagcagcctggcacagatgtgcagcttccttttcagcctggaacagctgacatttgtatgatactagtgtgtatccccctgtcattttgacaaaggcagtcaaatatggcttttttatcaccatggaaaccagtttcgtaggacatggtccctaactttgttttggaaaaagttttgaaagcctaccctcctgggtaacacggaagtggttgatgacacgaccagccttccagcccccggccactcctgccaagcacagtagcagcaccagcagcaagggcgccaaagccagcaacccagaaccgagtttcaaagcaaacgagaacggccttccaccaagctctatatttctgtctccaaatgaggcattcaggtccccaccaattccctaccccaggagttacctcccttacccagcccctgagggcattgctgtaagtcccctctccttacatggcaaaggacctgtctaccctcacccagttttgttacccaatggcagtctgtttcctgggcaccttgccccaaagcctgggctgccctatgggcttcccaccggccgtccagagtttgtgacctaccaagatgccctggggttgggcatggtgcatcccatgttgataccacacacgcccatagagattactaaagaggagaaaccagagaggagatcccggtcccatgagagagcccgttacgaggacccaaccctccggaatcggttttccgagattttggaaactagcagcaccaagttacatccagatgtccccaccgacaagaacctaaagccgaaccccaactggaatcaagggaagactgttgtcaaaagcgacaagcttgtctacgtagaccttctccgagaagaaccagatgctaaaactgacacaaacgtgtccaaacccagctttgcagcagagagtgttggccagagcgctgagccccccaagccctcagttgagccggccctgcagcagcaccgtgatttcatcgccctgagagaggagttggggcgcatcagtgacttccacgaaacttatactttcaaacagccagtcttcaccgtaagcaaggacagtgttctggcaggtaccaacaaagagaacctagggttgccagtctcgactccattcctggagccacctctggggagcgatggccctgctgtaacttttggtaaaacccaagaggatcccaaaccattttgtgtgggcagtgccccaccaagtgtggatgtgacccccacctataccaaagatggagctgatgaggctgaatcaaatgatggcaaagttctgaaaccgaagccatctaagctggcaaagagaatcgccaactcagcgggttacgtgggtgaccgattcaaatgtgtcactaccgaactgtatgcagattccagtcagctcagccgggagcaacgggcattgcaggtgagcccccccacctgaatttcagttactttaccagttgtcagttttttaatgtgtaaacaggattgggggagtatggtagggcagggcaccaggcagatttggtgaatgaagcttgtggtaatttgaatatatgcaatgtggccagtaagagaacgtgagtggtagcactgaggcgtgtctggatgctttaagttattctgtagattataagggaactccactcaattgctgataaccgatgttttaattattgtgaagggtatctaaagactgcatgacgtttacctatcaattgctttgatttctctgcctgtaagatagcaaatatacctagaagtgctgcttagaatgccttacttgatacctggtagagatgtgtagcagccgcatgtctgtgggatt

SEQ ID NO: 284140 - DNA, 5112 bp, Artificial Sequence
  derived and/or modified sequence
atgctgagcgccacccccctgtacggcaacgtgcacagctggatgaacagcgagagagtgagaatgtgcggcgccagcgaggacagaaagatcctggtgaacgacggcgacgccagcaaggccagactggagctgagagaggagaaccccctgaaccacaacgtggtggacgccagcaccgcccacagaatcgacggcctggccgccctgagcatggacagaaccggcctgatcagagagggcctgagagtgcccggcaacatcgtgtacagcagcctgtgcggcctgggcagcgagaagggcagagaggccgccaccagcaccctgggcggcctgggcttcagcagcgagagaaaccccgagatgcagttcaagcccaacacccccgagaccgtggaggccagcgccgtgagcggcaagccccccaacggcttcagcgccatctacaagaccccccccggcatccagaagagcgccgtggccaccgccgaggccctgggcctggacagacccgccagcgacaagcagagccccctgaacatcaacggcgccagctacctgagactgccctgggtgaacccctacatggagggcgccacccccgccatctaccccttcctggacagccccaacaagtacagcctgaacatgtacaaggccctgctgccccagcagagctacagcctggcccagcccctgtacagccccgtgtgcaccaacggcgagagattcctgtacctgccccccccccactacgtgggcccccacatccccagcagcctggccagccccatgagactgagcacccccagcgccagccccgccatcccccccctggtgcactgcgccgacaagagcctgccctggaagatgggcgtgagccccggcaaccccgtggacagccacgcctacccccacatccagaacagcaagcagcccagagtgcccagcgccaaggccgtgaccagcggcctgcccggcgacaccgccctgctgctgccccccagccccagacccagccccagagtgcacctgcccacccagcccgccgccgacacctacagcgagttccacaagcactacgccagaatcagcaccagccccagcgtggccctgagcaagccctacatgaccgtgagcagcgagttccccgccgccagactgagcaacggcaagtaccccaaggcccccgagggcggcgagggcgcccagcccgtgcccggccacgccagaaagaccgccgtgcaggacagaaaggacggcagcagcccccccctgctggagaagcagaccgtgaccaaggacgtgaccgacaagcccctggacctgagcagcaaggtggtggacgtggacgccagcaaggccgaccacatgaagaagatggcccccaccgtgctggtgcacagcagagccggcagcggcctggtgctgagcggcagcgagatccccaaggagaccctgagcccccccggcaacggctgcgccatctacagaagcgagatcatcagcaccgcccccagcagctgggtggtgcccggccccagccccaacgaggagaacaacggcaagagcatgagcctgaagaacaaggccctggactgggccatcccccagcagagaagcagcagctgccccagaatgggcggcaccgacgccgtgatcaccaacgtgagcggcagcgtgagcagcgccggcagacccgccagcgccagccccgcccccaacgccaacgccgacggcaccaagaccagcagaagcagcgtggagaccacccccagcgtgatccagcacgtgggccagccccccgccacccccgccaagcacagcagcagcaccagcagcaagggcgccaaggccagcaaccccgagcccagcttcaaggccaacgagaacggcctgccccccagcagcatcttcctgagccccaacgaggccttcagaagcccccccatcccctaccccagaagctacctgccctaccccgcccccgagggcatcgccgtgagccccctgagcctgcacggcaagggccccgtgtacccccaccccgtgctgctgcccaacggcagcctgttccccggccacctggcccccaagcccggcctgccctacggcctgcccaccggcagacccgagttcgtgacctaccaggacgccctgggcctgggcatggtgcaccccatgctgatcccccacacccccatcgagatcaccaaggaggagaagcccgagagaagaagcagaagccacgagagagccagatacgaggaccccaccctgagaaacagattcagcgagatcctggagaccagcagcaccaagctgcaccccgacgtgcccaccgacaagaacctgaagcccaaccccaactggaaccagggcaagaccgtggtgaagagcgacaagctggtgtacgtggacctgctgagagaggagcccgacgccaagaccgacaccaacgtgagcaagcccagcttcgccgccgagagcgtgggccagagcgccgagccccccaagcccagcgtggagcccgccctgcagcagcacagagacttcatcgccctgagagaggagctgggcagaatcagcgacttccacgagacctacaccttcaagcagcccgtgttcaccgtgagcaaggacagcgtgctggccggcaccaacaaggagaacctgggcctgcccgtgagcacccccttcctggagccccccctgggcagcgacggccccgccgtgaccttcggcaagacccaggaggaccccaagcccttctgcgtgggcagcgccccccccagcgtggacgtgacccccacctacaccaaggacggcgccgacgaggccgagagcaacgacggcaaggtgctgaagcccaagcccagcaagctggccaagagaatcgccaacagcgccggctacgtgggcgacagattcaagtgcgtgaccaccgagctgtacgccgacagcagccagctgagcagagagcagagagccctgcagagagccatgatgagattcagcgagctggagatgaaggagagagagggcggccaccccgccaccaaggacagcgagatgtgcaagttcagccccgccgactgggagagactgaagggcaaccaggacaagaagcccaagagcgtgaccctggaggaggccatcgccgagcagaacgagagcgagagatgcgagtacagcgtgggcaacaagcacagagaccccttcgaggcccccgaggacaaggacctgcccgtggagaagtacttcgtggagagacagcccgtgagcgagccccccgccgaccaggtggccagcgacatgccccacagccccaccctgagagtggacagaaagagaaaggtgagcggcgacagcagccacaccgagaccaccgccgaggaggtgcccgaggaccccctgctgaaggccaagagaagaagagtgagcaagggcctgcaccccaagaagcagagacacctgctgcacctgagagagagatgggagcagcaggtgagcgccgccgacggcaagcccggcagacagagcagaaaggaggtgacccaggccacccagcccgaggccatcccccagggcaccaacatcaccgaggagaagcccggcagaaagagagccgaggccaagggcaacagaagctggagcgaggagagcctgaagcccagcgacaacgagcagggcctgcccgtgttcagcggcagcccccccatgaagagcctgagcagcaccagcgccggcggcaagaagcaggcccagcccagctgcgcccccgccagcagaccccccgccaagcagcagaagatcaaggagaaccagaagaccgacgtgctgtgcgccgacgaggaggaggactgccaggccgccagcctgctgcagaagtacaccgacaacagcgagaagcccagcggcaagagactgtgcaagaccaagcacctgatcccccaggagagcagaagaggcctgcccctgaccggcgagtactacgtggagaacgccgacggcaaggtgaccgtgagaagattcagaaagagacccgagcccagcagcgactacgacctgagccccgccaagcaggagcccaagcccttcgacagactgcagcagctgctgcccgccagccagagcacccagctgccctgcagcagcagcccccaggagaccacccagagcagacccatgccccccgaggccagaagactgatcgtgaacaagaacgccggcgagaccctgctgcagagagccgccagactgggctacgaggaggtggtgctgtactgcctggagaacaagatctgcgacgtgaaccacagagacaacgccggctactgcgccctgcacgaggcctgcgccagaggctggctgaacatcgtgagacacctgctggagtacggcgccgacgtgaactgcagcgcccaggacggcaccagacccctgcacgacgccgtggagaacgaccacctggagatcgtgagactgctgctgagctacggcgccgaccccaccctggccacctacagcggcagaaccatcatgaagatgacccacagcgagctgatggagaagttcctgaccgactacctgaacgacctgcagggcagaaacgacgacgacgccagcggcacctgggacttctacggcagcagcgtgtgcgagcccgacgacgagagcggctacgacgtgctggccaacccccccggccccgaggaccaggacgacgacgacgacgcctacagcgacgtgttcgagttcgagttcagcgagacccccctgctgccctgctacaacatccaggtgagcgtggcccagggccccagaaactggctgctgctgagcgacgtgctgaagaagctgaagatgagcagcagaatcttcagatgcaacttccccaacgtggagatcgtgaccatcgccgaggccgagttctacagacaggtgagcgccagcctgctgttcagctgcagcaaggacctggaggccttcaaccccgagagcaaggagctgctggacctggtggagttcaccaacgagatccagaccctgctgggcagcagcgtggagtggctgcaccccagcgacctggccagcgacaactactggtag

SEQ ID NO: 284141 - DNA, 1869 bp, Artificial Sequence
  derived and/or modified sequence
atgccccacagccccaccctgagagtggacagaaagagaaaggtgagcggcgacagcagccacaccgagaccaccgccgaggaggtgcccgaggaccccctgctgaaggccaagagaagaagagtgagcaagggcctgcaccccaagaagcagagacacctgctgcacctgagagagagatgggagcagcaggtgagcgccgccgacggcaagcccggcagacagagcagaaaggaggtgacccaggccacccagcccgaggccatcccccagggcaccaacatcaccgaggagaagcccggcagaaagagagccgaggccaagggcaacagaagctggagcgaggagagcctgaagcccagcgacaacgagcagggcctgcccgtgttcagcggcagcccccccatgaagagcctgagcagcaccagcgccggcggcaagaagcaggcccagcccagctgcgcccccgccagcagaccccccgccaagcagcagaagatcaaggagaaccagaagaccgacgtgctgtgcgccgacgaggaggaggactgccaggccgccagcctgctgcagaagtacaccgacaacagcgagaagcccagcggcaagagactgtgcaagaccaagcacctgatcccccaggagagcagaagaggcctgcccctgaccggcgagtactacgtggagaacgccgacggcaaggtgaccgtgagaagattcagaaagagacccgagcccagcagcgactacgacctgagccccgccaagcaggagcccaagcccttcgacagactgcagcagctgctgcccgccagccagagcacccagctgccctgcagcagcagcccccaggagaccacccagagcagacccatgccccccgaggccagaagactgatcgtgaacaagaacgccggcgagaccctgctgcagagagccgccagactgggctacgaggaggtggtgctgtactgcctggagaacaagatctgcgacgtgaaccacagagacaacgccggctactgcgccctgcacgaggcctgcgccagaggctggctgaacatcgtgagacacctgctggagtacggcgccgacgtgaactgcagcgcccaggacggcaccagacccctgcacgacgccgtggagaacgaccacctggagatcgtgagactgctgctgagctacggcgccgaccccaccctggccacctacagcggcagaaccatcatgaagatgacccacagcgagctgatggagaagttcctgaccgactacctgaacgacctgcagggcagaaacgacgacgacgccagcggcacctgggacttctacggcagcagcgtgtgcgagcccgacgacgagagcggctacgacgtgctggccaacccccccggccccgaggaccaggacgacgacgacgacgcctacagcgacgtgttcgagttcgagttcagcgagacccccctgctgccctgctacaacatccaggtgagcgtggcccagggccccagaaactggctgctgctgagcgacgtgctgaagaagctgaagatgagcagcagaatcttcagatgcaacttccccaacgtggagatcgtgaccatcgccgaggccgagttctacagacaggtgagcgccagcctgctgttcagctgcagcaaggacctggaggccttcaaccccgagagcaaggagctgctggacctggtggagttcaccaacgagatccagaccctgctgggcagcagcgtggagtggctgcaccccagcgacctggccagcgacaactactggaagagcccccagatcgccagaggcagcgtggagggcaagaagaccgacgacaagaccagcaagaccgacctgtag

SEQ ID NO: 284142 - DNA, 1236 bp, Artificial Sequence
  derived and/or modified sequence
atgaccagacccgccttccagccccccgccacccccgccaagcacagcagcagcaccagcagcaagggcgccaaggccagcaaccccgagcccagcttcaaggccaacgagaacggcctgccccccagcagcatcttcctgagccccaacgaggccttcagaagcccccccatcccctaccccagaagctacctgccctaccccgcccccgagggcatcgccgtgagccccctgagcctgcacggcaagggccccgtgtacccccaccccgtgctgctgcccaacggcagcctgttccccggccacctggcccccaagcccggcctgccctacggcctgcccaccggcagacccgagttcgtgacctaccaggacgccctgggcctgggcatggtgcaccccatgctgatcccccacacccccatcgagatcaccaaggaggagaagcccgagagaagaagcagaagccacgagagagccagatacgaggaccccaccctgagaaacagattcagcgagatcctggagaccagcagcaccaagctgcaccccgacgtgcccaccgacaagaacctgaagcccaaccccaactggaaccagggcaagaccgtggtgaagagcgacaagctggtgtacgtggacctgctgagagaggagcccgacgccaagaccgacaccaacgtgagcaagcccagcttcgccgccgagagcgtgggccagagcgccgagccccccaagcccagcgtggagcccgccctgcagcagcacagagacttcatcgccctgagagaggagctgggcagaatcagcgacttccacgagacctacaccttcaagcagcccgtgttcaccgtgagcaaggacagcgtgctggccggcaccaacaaggagaacctgggcctgcccgtgagcacccccttcctggagccccccctgggcagcgacggccccgccgtgaccttcggcaagacccaggaggaccccaagcccttctgcgtgggcagcgccccccccagcgtggacgtgacccccacctacaccaaggacggcgccgacgaggccgagagcaacgacggcaaggtgctgaagcccaagcccagcaagctggccaagagaatcgccaacagcgccggctacgtgggcgacagattcaagtgcgtgaccaccgagctgtacgccgacagcagccagctgagcagagagcagagagccctgcaggtgagcccccccacctag

SEQ ID NO: 284143 - DNA, 1443 bp, Artificial Sequence
  derived and/or modified sequence
atgagagagcctgaggaactaatgcctgactccggcgcggtcttcacatttggcaaatctaagttcgctgaaaataaccctggaaaattttggttcaaaaacgacgttccagttcacctgtcttgcggggacgaacactctgctgtggtgaccggaaataataagctctacatgttcggcagtaataactggggccaactgggcctcggatcaaagtccgccattagcaaaccgacatgtgtgaaggcactgaagccggaaaaggtgaaactcgccgcatgcgggcggaaccacacactggtttctacggaagggggtaatgtgtacgctaccgggggcaacaacgagggtcagctggggctgggagatacagaagagcgcaacactttccatgtgatctccttttttacgagcgagcataagatcaagcagctgtcagccggatcgaatacgtccgccgctcttacagaagacggccgcctctttatgtggggagacaactcagagggccagatcggactgaagaatgtgtccaacgtgtgtgtaccacagcaggtaacgattggcaaacccgtcagctggattagttgcggatactatcacagcgcttttgtgaccactgatggggaactgtatgtcttcggagaacctgagaacgggaagttggggcttccgaatcagctcctcgggaaccatagaaccccgcagctggtaagtgagattcccgagaaggtgatccaggtggcttgtggtggtgagcatacagtggtcctaaccgagaacgctgtttacaccttcggcctcggacagtttggccagctgggactgggcacttttctgtttgagactagtgaacccaaggtgatcgagaacatacgcgatcagaccatcagctatattagctgcggggaaaatcatactgctctgataacggacattggtctcatgtatacatttggggatggacggcacggcaaactcggccttgggctcgagaatttcacaaaccactttattccaaccttatgcagcaatttcctgcgattcatcgtcaagctggtggcgtgcggaggttgccacatggtggtgttcgctgcgccccatcgcggtgtggctaaagagatcgaatttgatgagattaatgacacatgtttgtcagtggcaaccttccttccttacagttcactgacttcaggtaatgtactccagaggactctttccgctcgcatgcgccgccgagagagagaaagatcaccagatagcttctctatgaggcggaccctcccacccatcgaggggactttgggcctgtctgcctgctttcttcctaactctgtgtttccgagatgtagtgagcgcaatcttcaggagagcgtgctgagtgaacaagacctcatgcagccagaggagcccgacacgcaccacgagcctgagtttcagtag

SEQ ID NO: 284144 - DNA, 1443 bp, Artificial Sequence
  derived and/or modified sequence
atgagggagcctgaggagctgatgccagattctggagctgtgttcaccttcggcaagagcaagtttgctgagaacaaccctgggaagttctggttcaagaatgatgtgcctgtgcacctgagctgtggagatgagcacagcgctgtggtgactggaaacaacaagctgtacatgtttggcagcaacaactggggccagctgggcctgggcagcaagagcgccatcagcaagcccacctgtgtgaaggccctgaagccagagaaggtgaagctggccgcctgtggcaggaaccacaccctggtgtccacagaaggaggaaatgtgtatgccactggaggcaacaatgaaggccagctgggcctgggggacacagaggagaggaacaccttccacgtgatctccttcttcaccagcgagcacaagatcaagcagctgtctgctggcagcaacaccagcgctgccctgacagaagatggccgcctcttcatgtggggagacaacagcgagggccagatcggcctgaagaatgtgtccaatgtgtgtgtgccccagcaggtgaccatcggcaagcctgtgtcctggatcagctgtggctactaccacagcgcctttgtgaccacagatggagagctgtatgtgtttggagagccagaaaatggcaagctgggcctgcccaaccagctgctgggcaaccacaggaccccccagctggtgtctgagatccctgagaaggtgatccaggtggcctgtggcggggagcacacagtggtgctgacagaaaatgctgtgtacaccttcggcctgggccagtttggccagctgggcctgggcaccttcctgtttgagaccagcgagcccaaggtgattgagaacatccgggaccagaccatctcctacatcagctgtggggagaaccacacagccctgatcacagacatcggcctgatgtacacctttggagatggccgccacggcaagctgggcctgggcctggagaacttcaccaaccacttcatccccaccctgtgcagcaacttcctgcgcttcatcgtgaagctggtggcctgtggcggctgccacatggtggtgtttgctgccccccaccggggcgtggccaaggagattgaatttgatgagatcaatgacacctgcctgtctgtggccaccttcctgccctacagcagcctgaccagcggaaatgtgctgcagaggaccctgagcgccaggatgagaagaagagagcgggagaggagcccagacagcttctccatgaggaggaccctgccccccatcgagggcaccctgggcctgagcgcctgcttcctgcccaacagcgtcttcccccgctgcagcgagaggaacctgcaggagagcgtgctgtctgagcaggacctgatgcagcctgaggagccagacacccaccacgagcctgagttccagtag

SEQ ID NO: 284145 - DNA, 1443 bp, Artificial Sequence
  derived and/or modified sequence
atgcgggagcccgaggagctgatgcccgacagcggcgccgtgttcacgtttggcaagtctaaattcgcagaaaacaaccccggaaaattttggttcaagaatgacgtgccagtgcacctctcttgcggagacgagcattcggccgtcgtgactgggaacaataaactctacatgtttggttccaacaactggggccaactggggctcggctcgaagtctgcaatcagcaagcctacttgtgtgaaagctttgaaacccgagaaagttaagctcgccgcgtgcggacggaaccacaccctggtctccacggaaggtggaaatgtatacgcgaccggcggcaacaacgagggtcaactcgggctgggtgatactgaagaacggaatactttccacgttatctcattcttcaccagcgagcacaagattaaacaactgagcgctggttccaatacctctgcagctctgacagaagacggacggctgttcatgtggggtgataactcggaagggcaaattggcctaaagaatgtctcaaatgtctgcgtgccccagcaggtgacaatcggtaagccagtgagctggatttcatgtgggtactaccacagtgcatttgtgaccacggacggagagctgtacgtgtttggagagccagagaatggaaagcttggcctaccaaaccagttactggggaaccacaggacccctcaattagtttccgagattcctgagaaggtcatccaggttgcttgcggcggggaacataccgtcgtcctgacggagaacgccgtctacactttcgggctaggacagtttggccaacttggtttgggaacctttctcttcgaaacatcagaacccaaggtgatcgaaaacataagggaccagactatttcttatataagctgcggcgagaaccataccgcgctgataacagacattgggctgatgtacacgttcggggacggaaggcacggcaaactgggcctagggctggagaactttaccaaccactttatccccacactgtgctcaaattttttaaggttcatagttaaattagtcgcctgtggagggtgccacatggtggtgttcgccgctccccaccgcggagtcgccaaggagatagagttcgacgagatcaacgatacatgccttagcgttgcaacctttctaccatactcgtcactcactagcggaaatgttttgcagcgcactctctcggcccggatgcgccggagggagcgagagcggagcccagattccttctcaatgcgaagaaccctgcctccgatcgaggggacattgggactgtctgcatgcttcctgcccaatagtgtgtttccaaggtgtagtgaaagaaatctccaggaaagtgtgctcagcgaacaggatctgatgcagcctgaagaacctgatactcatcatgaaccagaatttcagtag

SEQ ID NO: 284146 - DNA, 1443 bp, Artificial Sequence
  derived and/or modified sequence
atgcgtgaacccgaggagctcatgcctgattcaggcgctgttttcacctttgggaaaagtaagttcgcagagaataatcccggtaagttctggttcaagaacgacgttcccgtgcacctcagctgtggcgacgagcattcggccgtggtcacgggaaataacaaactttacatgttcggatctaataactgggggcagctcggactgggatcaaagtcagcaatctctaaacccacctgcgtcaaagcgcttaaaccggagaaggtgaagctggctgcctgcgggaggaaccacaccctcgtatctacggaggggggtaatgtgtatgctactgggggtaataatgagggccagctggggctgggagataccgaggaaagaaataccttccacgtgatttcctttttcactagcgagcacaaaatcaagcagctgtctgctggctccaacacgtctgcagcattgaccgaggatgggaggctattcatgtggggggacaactcagagggacaaatcgggctgaagaacgtgagcaatgtgtgtgtccctcagcaggtgacaattgggaagccggtgtcctggatctcctgtggctactaccattctgcttttgtgacaacagacggggagctctatgtctttggggagcctgaaaacgggaaactgggactgccaaaccagctattaggcaaccacagaactccgcagttagtcagcgagatcccagagaaagtgatccaggtagcttgcggtggtgaacatacagtggtgcttaccgagaatgcagtgtacacattcggactgggacagttcggccaactggggttggggactttcctattcgaaactagtgagcctaaagtcatagagaacatcagagaccagactatttcttatattagctgtggtgaaaaccacactgctctcatcaccgacatcggcttgatgtacacgttcggcgatggtcgccacggcaaactgggtctcggtcttgagaattttaccaaccacttcatcccaacactttgttctaattttttgcggtttatagtgaagctggtggcttgcggaggttgccacatggtggttttcgcggctccacaccgaggggttgctaaagaaatcgagttcgatgagattaacgacacgtgcctttctgtagctaccttcttgccctactccagcctgacatctggaaacgtgctgcagcgcaccctcagcgcacggatgagaagacgtgagagggaaagatcccctgactcattctccatgcgccgaacacttccgcctatcgagggaactctgggcctgagtgcctgctttctccccaactcggttttcccaaggtgttctgagcgaaacctccaagaaagtgtgttaagtgagcaagatcttatgcaacctgaagaacctgacacgcaccatgagccggaatttcagtag

SEQ ID NO: 284147 - DNA, 2979 bp, Artificial Sequence
  derived and/or modified sequence
gtttgttgacttccgggagcgcggttgtagttgatctccggagtttcgccatgcggaacttgggggctttcgcggcccgcgtcggtgcggagtagctgctttagccccgaccaaaccgtcctctacagcctcctggccccggcgcaggctgcccgtactgcccgtggcatgagggagccggaagagctgatgcccgattcgggtgctgtgtttacatttgggaaaagtaaatttgctgaaaataatcccggtaaattctggtttaaaaatgatgtccctgtacatctttcatgtggagatgaacattctgctgttgttaccggaaataataaactttacatgtttggcagtaacaactggggtcagttaggattaggatcaaagtcagccatcagcaagccaacatgtgtcaaagctctaaaacctgaaaaagtgaaattagctgcctgtggaaggaaccacaccctggtgtcaacagaaggaggcaatgtatatgcaactggtggaaataatgaaggacagttggggcttggtgacaccgaagaaagaaacacttttcatgtaattagcttttttacatccgagcataagattaagcagctgtctgctggatctaatacttcagctgccctaactgaggatggaagactttttatgtggggtgacaattccgaagggcaaattggtttaaaaaatgtaagtaatgtctgtgtccctcagcaagtgaccattgggaaacctgtctcctggatctcttgtggatattaccattcagcttttgtaacaacagatggtgagctatatgtgtttggagaacctgagaatgggaagttaggtcttcccaatcagctcctgggcaatcacagaacaccccagctggtgtctgaaattccggagaaggtgatccaagtagcctgtggtggagagcatactgtggttctcacggagaatgctgtgtatacctttgggctgggacaatttggtcagctgggtcttggcacttttctttttgaaacttcagaacccaaagtcattgagaatattagggatcaaacaataagttatatttcttgtggagaaaatcacacagctttgataacagatatcggccttatgtatacttttggagatggtcgccacggaaaattaggacttggactggagaattttaccaatcacttcattcctactttgtgctctaattttttgaggtttatagttaaattggttgcttgtggtggatgtcacatggtagtttttgctgctcctcatcgtggtgtggcaaaagaaattgaattcgatgaaataaatgatacttgcttatctgtggcgacttttctgccgtatagcagtttaacctcaggaaatgtactgcagaggactctatcagcacgtatgcggcgaagagagagggagaggtctccagattctttttcaatgaggagaacactacctccaatagaagggactcttggcctttctgcttgttttctccccaattcagtctttccacgatgttctgagagaaacctccaagagagtgtcttatctgaacaggacctcatgcagccagaggaaccagacacacatcatgagcctgaattccaatgaaaagtcattaaaattatcaccagttcagaaacaaaagaaacaacaaacaattggggaactgacgcaggatacagctcttactgaaaacgatgatagtgatgaatatgaagaaatgtcagaaatgaaagaagggaaagcatgtaaacaacatgtgtcacaagggattttcatgacgcagccagctacgactatcgaagcattttcagatgaggaagtagagatcccagaggagaaggaaggagcagaggattcaaaaggaaatggaatagaggagcaagaggtagaagcaaatgaggaaaatgtgaaggtgcatggaggaagaaaggagaaaacagagatcctatcagatgaccttacagacaaagcagaggatcatgaattttctaaaactgaggaactaaaactagaagatgtggatgaggaaattaatgctgaaaatgtggaaagcaagaagaaaactgtgggagatgatgaaagtgttcctacaggttatcacagtaaaacagaaggagcagaaagaaccaatgatgatagctcagctgaaactattgaaaagaaagaaaaagccaacctagaggaacgggccatttgtgagtacaatgaaaacccaaaaggatacatgcttgatgatgcagatagcagttcattagaaatcctagaaaacagtgaaacaacaccaagcaaagacatgaaaaaaacaaagaagatttttctgttcaaaagagtcccctcaataaatcaaaagattgtcaagaataacaatgagccgctcccagagataaaatccataggagaccagatcattttaaaaagtgataataaagatgccgaccagaaccacatgagtcagaatcatcagaatatcccaccaacaaatacagagagaagatcaaaatcctgtacaatactataaatatatatttatgttttcacagtcaccaagtgtattgtaatgtatacttgaaaaatgttataacttatgaagtaaagtttctgatagtagtctttaaaagatataagacttaatatgttttattcagcttctataagtgtgaccagttttgatatttatttatgctaatatttttaacaagtcatttcaaaatatgtgtatctcaaattctccctaaagtgttgtggccttaactgttcagtattgcaataaaaaatatatttttatatgtggaaaattgaaataagatatttcctagtttttactaaacaattttacttctttataattttataaggcaatatttgcaatcttacgacactgtaacagtttttgatgtatttacaatttttacaaaactgaggtaaaattgtttataatgaacatattttaataaactatatctggtcagttcc

SEQ ID NO: 284148 - DNA, 1443 bp, Artificial Sequence
  derived and/or modified sequence
atgagagagcccgaggagctgatgcccgacagcggcgccgtgttcaccttcggcaagagcaagttcgccgagaacaaccccggcaagttctggttcaagaacgacgtgcccgtgcacctgagctgcggcgacgagcacagcgccgtggtgaccggcaacaacaagctgtacatgttcggcagcaacaactggggccagctgggcctgggcagcaagagcgccatcagcaagcccacctgcgtgaaggccctgaagcccgagaaggtgaagctggccgcctgcggcagaaaccacaccctggtgagcaccgagggcggcaacgtgtacgccaccggcggcaacaacgagggccagctgggcctgggcgacaccgaggagagaaacaccttccacgtgatcagcttcttcaccagcgagcacaagatcaagcagctgagcgccggcagcaacaccagcgccgccctgaccgaggacggcagactgttcatgtggggcgacaacagcgagggccagatcggcctgaagaacgtgagcaacgtgtgcgtgccccagcaggtgaccatcggcaagcccgtgagctggatcagctgcggctactaccacagcgccttcgtgaccaccgacggcgagctgtacgtgttcggcgagcccgagaacggcaagctgggcctgcccaaccagctgctgggcaaccacagaaccccccagctggtgagcgagatccccgagaaggtgatccaggtggcctgcggcggcgagcacaccgtggtgctgaccgagaacgccgtgtacaccttcggcctgggccagttcggccagctgggcctgggcaccttcctgttcgagaccagcgagcccaaggtgatcgagaacatcagagaccagaccatcagctacatcagctgcggcgagaaccacaccgccctgatcaccgacatcggcctgatgtacaccttcggcgacggcagacacggcaagctgggcctgggcctggagaacttcaccaaccacttcatccccaccctgtgcagcaacttcctgagattcatcgtgaagctggtggcctgcggcggctgccacatggtggtgttcgccgccccccacagaggcgtggccaaggagatcgagttcgacgagatcaacgacacctgcctgagcgtggccaccttcctgccctacagcagcctgaccagcggcaacgtgctgcagagaaccctgagcgccagaatgagaagaagagagagagagagaagccccgacagcttcagcatgagaagaaccctgccccccatcgagggcaccctgggcctgagcgcctgcttcctgcccaacagcgtgttccccagatgcagcgagagaaacctgcaggagagcgtgctgagcgagcaggacctgatgcagcccgaggagcccgacacccaccacgagcccgagttccagtag

SEQ ID NO: 284149 - DNA, 1848 bp, Artificial Sequence
  derived and/or modified sequence
gctggtcccggccttgcggcctgcgggggaggctgcccggaggaggcagcggcggcggcagcgcgtcctcggtccccaggaccacggcttctttcctgccagatctatccatctggccatccatccgtgggggtctgcaatggccacctttagccgccaggaatttttccagcagctactgcaaggctgtctcctgcctactgcccagcagggccttgaccagatctggctgctccttgccatctgcctcgcctgccgcctcctctggaggctcgggttgccatcctacctgaagcatgcaagcaccgtggcaggcgggttcttcagcctctaccacttcttccagctgcacatggtttgggtcgtgctgctcagcctcctgtgctacctcgtgctgttcctctgccgacattcctcccatcgaggcgtcttcctatccgtcaccatcctcatctacctactcatgggtgagatgcacatggtagacaccgtgacatggcacaagatgcgaggggcacagatgattgtggccatgaaggcagtgtctctgggcttcgacctggaccggggcgaggtgggtacggtgccctcgccagtggagttcatgggctacctctacttcgtgggcaccatcgtcttcgggccctggatatccttccacagctacctacaagctgtccaaggccgcccactgagctgccggtggctgcagaaggtggcccggagcctggcactggccctgctgtgccttgtgctgtccacttgcgtgggcccctacctcttcccgtacttcatccccctcaacggtgaccgcctccttcgcaacaagaaacgcaaagccaggtggctgcgagcctacgagagtgctgtctccttccacttcagcaactattttgtgggctttctttccgaggccacggccacgttggcgggggctggctttaccgaggagaaggatcacctggaatgggacctgacggtgtccaagccactgaatgtggagctgcctcggtcaatggtggaagttgtcacaagctggaacctgcccatgtcttattggctaaataactatgttttcaagaatgctctccgcctggggaccttctcggctgtgctggtcacctatgcagccagcgccctcctacatggcttcagtttccacctggctgcggtcctgctgtccctggcttttatcacttacgtggagcatgtcctccggaagcgcctggctcggatcctcagtgcctgtgtcttgtcaaagcggtgcccgccagactgttcgcaccagcatcgcttgggcctgggggtgcgagccttaaacttgctctttggagctctggccatcttccacctggcctacctgggctccctgtttgatgtcgatgtggatgacaccacagaggagcagggctacggcatggcatacactgtccacaagtggtcagagctcagctgggccagtcactgggtcacttttggatgctggatcttctaccgtctcataggctgaggcacatctgtggaccctcataaccctcttaagacccctctcagggtgccactgatgggggatgagggaaggccctctctctactccttgaccccctccatccttgacccccaacacctcaacacacacacacacacacacacacaaaatcacaccattttcatgcctgtcaatccccaccccaccacaaggcaggaagggggtggtgcctgctggggcctagagggggatgcttggggaaacagagaaggggagatccagggcctccccgccttccttcttcctttttatatacaatttgttattgtcaaataaaagtaggaaatattcaataggct

SEQ ID NO: 284150 - DNA, 1672 bp, Artificial Sequence
  derived and/or modified sequence
ggaggaggcagcggcggcggcagcgcgtcctcggtccccaggaccacggcttctttcctgccagatctatccatctggccatccatccgtgggggtctgcaatggccacctttagccgccaggaatttttccagcagctactgcaaggctgtctcctgcctactgcccagcagggccttgaccagatctggctgctccttgccatctgcctcgcctgccgcctcctctggaggctcgggttgccatcctacctgaagcatgcaagcaccgtggcaggcgggttcttcagcctctaccacttcttccagctgcacatggtttgggtcgtgctgctcagcctcctgtgctacctcgtgctgttcctctgccgacattcctcccatcgaggcgtcttcctatccgtcaccatcctcatctacctactcatgggtgagatgcacatggtagacaccgtgacatggcacaagatgcgaggggcacagatgattgtggccatgaaggcagtgtctctgggcttcgacctggaccggggcgaggtgggtacggtgccctcgccagtggagttcatgggctacctctacttcgtgggcaccatcgtcttcgggccctggatatccttccacagctacctacaagctgtccaaggccgcccactgagctgccggtggctgcagaaggtggcccggagcctggcactggccctgctgtgccttgtgctgtccacttgcgtgggcccctacctcttcccgtacttcatccccctcaacggtgaccgcctccttcgcaagtggctgcgagcctacgagagtgctgtctccttccacttcagcaactattttgtgggctttctttccgaggccacggccacgttggcgggggctggctttaccgaggagaaggatcacctggaatgggacctgacggtgtccaagccactgaatgtggagctgcctcggtcaatggtggaagttgtcacaagctggaacctgcccatgtcttattggctaaataactatgttttcaagaatgctctccgcctggggaccttctcggctgtgctggtcacctatgcagccagcgccctcctacatggcttcagtttccacctggctgcggtcctgctgtccctggcttttatcacttacgtggagcatgtcctccggaagcgcctggctcggatcctcagtgcctgtgtcttgtcaaagcggtgcccgccagactgttcgcaccagcatcgcttgggcctgggggtgcgagccttaaacttgctctttggagctctggccatcttccacctggcctacctgggctccctgtttgatgtcgatgtggatgacaccacagaggagcagggctacggcatggcatacactgtccacaagtggtcagagctcagctgggccagtcactgggtcacttttggatgctggatcttctaccgtctcataggctgaggcacatctgtggaccctcataaccctcttaagacccctctcagggtgccactgatgggggatgagggaaggccctctctctactccttgaccccctccatccttgacccccaacacctcaacacacacacacacacacacacacaaaatcacaccattttcatgcctgtcaatccccaccccaccacaaggcaggaagggggtggtgcctgctgggg

SEQ ID NO: 284151 - DNA, 558 bp, Artificial Sequence
  derived and/or modified sequence
gaggctgcccggaggaggcagcggcggcggcagcgcgtcctcggtccccaggaccacggcttctttcctgccagagcgactctaccttggaaaccagggattccccttcccgtcgcccgccccatttgatatatgggcctgaaatgtatgccatcccatcaccatcggactggactgttcacagcactggagagacagaggtccttcattcactccaggtcacaggctatctatccatctggccatccatccgtgggggtctgcaatggccacctttagccgccaggaatttttccagcagctactgcaaggctgtctcctgcctactgcccagcagggccttgaccagatctggctgctccttgccatctgcctcgcctgccgcctcctctggaggctcgggttgccatcctacctgaagcatgcaagcaccgtggcaggcgggttcttcagcctctaccacttcttccagctgcacatggtttgggtcgtgctgctcagcctcctgtgctacctcgtgctgttcctctgccgacattcctcccatcgaggcgtctt

SEQ ID NO: 284152 - protein, 261 aa, Artificial Sequence
  derived and/or modified sequence
MPLTSGSSTPPPWRVSADTSTGPTTAARSFSLLVRHRPRALCHTNQSLGRGLATTRGRGSDGNGPTGNGDHPNFSLSEGRAFGSLAAQPITSCLSVPAPPFSLGKLQDGLLHITTCSFVAPWNSLSLAQRRGFTKTYTVGCEECTVSAWTLTSNGRSFPGPFPKSWACFLLPLAILCPCGCSPTLRAVPDLSCYFPKPETAPLQILAAPFPCVQYRVITCPSLVPLILPCDYSVIPLPVPEPPGLFLGSPECSPRTQSAVP

SEQ ID NO: 284153 - protein, 165 aa, Artificial Sequence
  derived and/or modified sequence
  misc_feature (1)..(1): Xaa can be any naturally occurring amino acid
XPRALCHTNQSLGRGLATTRGRGSDGNGPTGNGDHPNFSLSEGRAFGSLAAQPITSCLSVPAPPFSLGKLQDGLLHITTCSFVAPWNSLSLAQRRGFTKTYTVGCEECTVFPCLSIPCKLQSGTHCLWTDQLLQGSEKGFQSRHLACLPREPGLCTWQSLRSQIA

SEQ ID NO: 284154 - DNA, 786 bp, Artificial Sequence
  derived and/or modified sequence
atgcccctgaccagcggcagcagcaccccccccccctggagagtgagcgccgacaccagcaccggccccaccaccgccgccagaagcttcagcctgctggtgagacacagacccagagccctgtgccacaccaaccagagcctgggcagaggcctggccaccaccagaggcagaggcagcgacggcaacggccccaccggcaacggcgaccaccccaacttcagcctgagcgagggcagagccttcggcagcctggccgcccagcccatcaccagctgcctgagcgtgcccgccccccccttcagcctgggcaagctgcaggacggcctgctgcacatcaccacctgcagcttcgtggccccctggaacagcctgagcctggcccagagaagaggcttcaccaagacctacaccgtgggctgcgaggagtgcaccgtgagcgcctggaccctgaccagcaacggcagaagcttccccggccccttccccaagagctgggcctgcttcctgctgcccctggccatcctgtgcccctgcggctgcagccccaccctgagagccgtgcccgacctgagctgctacttccccaagcccgagaccgcccccctgcagatcctggccgcccccttcccctgcgtgcagtacagagtgatcacctgccccagcctggtgcccctgatcctgccctgcgactacagcgtgatccccctgcccgtgcccgagccccccggcctgttcctgggcagccccgagtgcagccccagaacccagagcgccgtgccctag

SEQ ID NO: 284155 - DNA, 786 bp, Artificial Sequence
  derived and/or modified sequence
atgccactgacctctggctcctcaacaccccctccctggagagtgtccgcagatacttcaacagggcctactacagccgctcggtctttcagcttgctggtgaggcacaggccaagagccctgtgccatacaaaccagagtctgggacgagggttggccacgactagaggacgcggctctgatgggaacgggccaacaggtaatggtgatcatcccaatttctccctgagcgagggccgagcatttggaagcctggctgctcagcctatcacttcctgtctgtctgtgcccgcgccgccattctctctcgggaaactgcaggacggcctgctgcacattactacctgctctttcgtcgccccttggaattcgctctctcttgctcagagacgtggattcaccaaaacttatacggtgggatgtgaagagtgcactgtaagtgcctggactttaacttctaatggcagatctttccccggacccttccccaaaagctgggcgtgcttccttctcccactcgccattctctgtccttgcggctgcagccctactctgagagccgttccagatctgtcatgctatttccccaaaccagagaccgctcccctgcaaattctggctgccccttttccttgtgtccaatacagagtcataacctgcccatctctcgtgccgcttattctcccctgcgattactctgttatccccctcccagtccccgaacccccaggtctcttcctcggctcccccgagtgttcccctagaacacagtcagcagtgccatag

SEQ ID NO: 284156 - DNA, 786 bp, Artificial Sequence
  derived and/or modified sequence
atgcccctgaccagcggcagcagcaccccaccaccctggagggtgtctgctgacaccagcacaggccccaccacagctgcccgctccttcagcctgctggtgcgccaccggccccgggccctgtgccacaccaaccagagcctgggccggggcctggccaccacccggggccggggcagtgatggaaatggccccactggaaatggagaccaccccaacttcagcctgtctgagggccgggccttcggcagcctggccgcccagcccatcaccagctgcctgtctgtgcctgccccacccttcagcctgggcaagctgcaggacggcctgctgcacatcaccacctgcagctttgtggccccctggaacagcctgagcctggcccagaggcggggcttcaccaagacctacacagtgggctgtgaagaatgtactgtgtctgcctggaccctgaccagcaatggccgctccttccctggccccttccccaagtcctgggcctgcttcctgctgcccctggccatcctgtgcccctgtggctgcagccccaccctgcgggctgtgcctgacctgagctgctacttccccaagccagagacagcccccctgcagatcctggccgcccccttcccctgtgtgcagtacagagtcatcacctgccccagcctggtgcccctcatcctgccctgtgactacagcgtcatccccctgcctgtgcctgagcccccaggcctcttcctgggcagcccagaatgtagccccaggacccagagcgctgtgccctag

SEQ ID NO: 284157 - DNA, 786 bp, Artificial Sequence
  derived and/or modified sequence
atgcccctgaccagcggcagcagcaccccccccccctggcgggtgagcgccgatacctccaccggaccaactacagctgctcggtcctttagccttctcgttaggcaccgaccacgcgcgctgtgtcacacgaaccagagcttagggcgtggcctcgctacaacacgagggagaggctccgacggaaacggccccactggcaatggcgatcacccgaatttttccctgtctgaaggccgggccttcggatctctggccgctcagcccattactagctgtttgagcgtccccgcgccacccttttcactgggtaagctccaagatggtctgctgcacataacaacctgtagcttcgtggccccgtggaattccttaagcctggctcagagaagaggatttactaagacatataccgtgggctgtgaggagtgtaccgtttcagcatggactctaacatccaacggccggtcttttcctggcccctttccaaagagctgggcctgctttctcctgcccctggcaatcctctgcccttgcggttgtagtccgactcttagagcagtgcctgatctgtcctgttacttccctaaacccgaaactgctccacttcagattctggctgccccattcccctgtgttcagtatcgggtgattacgtgcccaagcctcgtgcccctgatcctgccttgcgattattcagtgatccctttgccagtgcccgagccaccgggcctttttttgggatcacctgagtgtagtccccggacccagtccgctgtgccctag

SEQ ID NO: 284158 - DNA, 786 bp, Artificial Sequence
  derived and/or modified sequence
atgcccctgaccagcggttctagcacccctcctccatggcgagtgagcgccgacacctcgactggcccaactaccgcggctcgctctttctccttattagtaagacatcgcccaagagcactttgtcacaccaatcagtctctggggcgtgggctggcaacaactcgaggacggggaagtgacggaaacgggcctacgggcaacggagaccaccctaacttttccctcagcgaaggtcgggcttttggtagtttagccgcacagcccatcaccagttgtttgagtgtgcccgctccacccttcagccttgggaagctacaagatgggctgttacacataacaacgtgtagtttcgttgccccttggaacagtctgagtctggcccagaggaggggcttcactaagacttatactgtgggttgtgaggaatgtacggtgagcgcatggacactgacaagtaacgggagatcatttcctggcccatttcctaaatcctgggcttgctttttactgcccctggccatcctgtgtccctgcgggtgctctccaaccctccgggctgtgccagacttgagttgttacttcccaaaaccggagacagcccctctccagatcttggctgctccattcccatgcgtgcagtatcgcgtgatcacatgcccttcactggtcccccttatcctgccttgtgactactctgtcatccccttgcccgtgcccgagccacctgggctattcctcggcagcccagagtgttctccaaggacccagtcagctgttccttag

SEQ ID NO: 284159 - DNA, 1415 bp, Artificial Sequence
  derived and/or modified sequence
agtaatgcatccaggaagcctggaggcctgtggtttccgcacccgctgccacccccgcccctagcgtggacatttatcctctagcgctcaggccctgccgccatcgccgcagatccagcgcccagagagacaccagagaacccaccatggccccctttgagcccctggcttctggcatcctgttgttgctgtggctgatagcccccagcagggcctgcacctgtgtcccaccccacccacagacggccttctgcaattccgacctcgtcatcagggccaagttcgtggggacaccagaagtcaaccagaccaccttataccagcgttatgagatcaagatgaccaaggtatcccctgcccccgcctctttcccagcattttctaacatcttcctcctggtcaaaacagaaacttctggccactggttggtgcgagaaagttggctgtgatcttgggatgctatatgacttcagggaagaacctggagtgggaggattatgtcagtaaaagagacacttcccctcatccatcaacagatgtataaagggttccaagccttaggggatgccgctgacatccggttcgtctacacccccgccatggagagtgtctgcggatacttccacaggtcccacaaccgcagcgaggagtttctcattgctggtgaggcaccgtccccgcgccctgtgccacaccaaccagtccctggggcgcggcctagcaaccacgagggggcgaggctctgatgggaatggtcccactggaaatggggaccaccccaatttcagtctatcagaaggccgggcctttggcagcttggcagctcagccaatcacaagctgcttgtcggtccccgccccgcctttctccttaggaaaactgcaggatggactcttgcacatcactacctgcagttttgtggctccctggaacagcctgagcttagctcagcgccggggcttcaccaagacctacactgttggctgtgaggaatgcacagtgagtgcctggaccctgacctccaacgggagatccttcccggggccattccctaaatcgtgggcttgtttcttgctccctctggctattctgtgtccctgtggctgctccccaaccctaagggctgtccctgatctctcttgctatttccccaagcccgagactgctcccttacaaattctggctgctccctttccctgtgtccaataccgtgtgatcacctgtccctccctggtccctctaattctcccttgtgactattctgtaatcccactccccgttcctgagcccccgggattgtttcttggttccccagaatgttctccaagaacccaaagtgctgttccctaatcccactgacccttcctcagcacatctgcttgttgctctgcagctctgactattccagacaccag

SEQ ID NO: 284160 - DNA, 1095 bp, Artificial Sequence
  derived and/or modified sequence
atttatcctctagcgctcaggccctgccgccatcgccgcagatccagcgcccagagagacaccagagaacccaccatggccccctttgagcccctggcttctggcatcctgttgttgctgtggctgatagcccccagcagggcctgcacctgtgtcccaccccacccacagacggccttctgcaattccgacctcgtcatcagggccaagttcgtggggacaccagaagtcaaccagaccaccttataccagcgttatgagatcaagatgaccaagatgtataaagggttccaagccttaggggatgccgctgacatccggttcgtctacacccccgccatggagagtgtctgcggatacttccacaggtcccacaaccgcagcgaggagtttctcattgctggtgaggcaccgtccccgcgccctgtgccacaccaaccagtccctggggcgcggcctagcaaccacgagggggcgaggctctgatgggaatggtcccactggaaatggggaccaccccaatttcagtctatcagaaggccgggcctttggcagcttggcagctcagccaatcacaagctgcttgtcggtccccgccccgcctttctccttaggaaaactgcaggatggactcttgcacatcactacctgcagttttgtggctccctggaacagcctgagcttagctcagcgccggggcttcaccaagacctacactgttggctgtgaggaatgcacagtgagtgcctggaccctgacctccaacgggagatccttcccggggccattccctaaatcgtgggcttgtttcttgctccctctggctattctgtgtccctgtggctgctccccaaccctaagggctgtccctgatctctcttgctatttccccaagcccgagactgctcccttacaaattctggctgctccctttccctgtgtccaataccgtgtgatcacctgtccctccctggtccctctaattctcccttgtgactattctgtaatcccactccccgttcctgagcccccgggattgtttcttggttccccagaatgttctccaagaacccaaagtgctgttccctaatccca

SEQ ID NO: 284161 - protein, 224 aa, Artificial Sequence
  derived and/or modified sequence
  misc_feature (1)..(1): Xaa can be any naturally occurring amino acid
XLQAYICAVQLDHGHAAAWMDLGTLYESCNQPQDAIKCYLNATRSKSCSNTSALAARIKYLQAQLCNLPQGSLQNKTKLLPSIEEAWSLPIPAELTSRQGAMNTAQQNTSDNWSGGHAVSHPPVQQQAHSWCLTPQKLQMRPTGVAQVRSTGIPNGPTADSSLPTNSVSGQQPQLALTRVPSVSQPGVRPACPGQPLANGPFSAGHVPCSTSRTLGSTDTILIG

SEQ ID NO: 284162 - DNA, 675 bp, Artificial Sequence
  derived and/or modified sequence
taacttcaggcgtacatttgtgccgtgcaattagaccacggccatgccgccgcttggatggacttagggacactttatgaatcttgcaatcagcctcaggacgccattaaatgctaccttaacgccacaaggtccaagagttgcagtaatacctccgccctcgccgcaaggatcaaatacctacaggcccagctgtgtaatttgccccagggctcattgcagaataagaccaagctgctgccgtctattgaggaagcctggagcttgcccattcctgcagaacttaccagcaggcagggcgcaatgaatacagctcagcaaaacactagcgataactggtctgggggacatgctgtgagccatccacccgtacaacaacaagcccacagctggtgcctgacccctcagaagttacagatgcgccctactggagtggcgcaggttcggtcaactgggatccccaacgggccaactgccgattcttccctccctaccaacagcgtatctgggcagcagccccaattagccctgactcgggtcccgagcgttagtcagcctggagtgcgccccgcttgtcccggccagccgttggccaacggaccgttttccgcagggcatgtgccctgcagcactagtcggactttgggctcaaccgacaccattctgattggctag

SEQ ID NO: 284163 - DNA, 675 bp, Artificial Sequence
  derived and/or modified sequence
tgactgcaggcctacatctgtgctgtgcagctggaccacggccacgccgccgcctggatggacctgggcaccctgtatgagagctgcaaccagccccaggatgccatcaagtgctacctgaatgccaccaggagcaagagctgcagcaacaccagcgccctggccgcccgcatcaagtacctgcaggcccagctgtgcaacctgccccagggcagcctgcagaacaagaccaagctgctgcccagcattgaggaggcctggagcctgcccatcccagctgagctgaccagccggcagggcgccatgaacacagcccagcagaacaccagtgacaactggagcggcggccatgctgtgagccacccccctgtgcagcagcaggcccacagctggtgcctgaccccccagaagctgcagatgaggcccactggagtggcccaggtgcgcagcacaggcatccccaacggccccacagctgacagcagcctgcccaccaacagcgtgtctggccagcagccccagctggccctgaccagggtgcccagcgtgtcccagcccggggtgcggcctgcctgccccggccagcccctggccaacggccccttctctgctggccacgtgccctgcagcaccagcaggaccctgggcagcacagacaccatcctgattggatag

SEQ ID NO: 284164 - DNA, 671 bp, Artificial Sequence
  derived and/or modified sequence
ctttacaggcctatatttgtgctgtacaattggaccatggccatgctgcagcctggatggacctaggcactctctatgaatcctgcaaccagcctcaggatgccattaaatgctacttaaatgcaactagaagcaaaagttgtagtaatacctctgcacttgcagcacgaattaagtatttacaggctcagttgtgtaaccttccacaaggtagtctacagaataaaactaaattacttcctagtattgaggaggcgtggagcctaccaattcccgcagagcttacctccaggcagggtgccatgaacacagcacagcagaatacttctgacaattggagtggtggacatgctgtgtcacatcctccagtacagcaacaagctcattcatggtgtttgacaccacagaaattacagatgagaccaacaggagttgcacaggtacgatctactggaattcctaatgggccaacagctgactcatcactgcctacaaactcagtctctggccagcagccacagcttgctctgaccagagtgcctagcgtctctcagcctggagtccgtcctgcctgccctgggcagcctttggccaatggacccttttctgcaggccatgttccctgtagcacatcaagaacgctgggaagtacagacactattttgataggc

SEQ ID NO: 284165 - DNA, 675 bp, Artificial Sequence
  derived and/or modified sequence
tgactgcaggcctacatctgcgccgtgcagctggaccacggccacgctgccgcctggatggatctgggaaccctgtacgaatcatgcaatcaacctcaggatgcgatcaagtgctacttaaatgctaccagaagcaaaagttgtagtaatacttctgccctggcagcaagaattaaatacctgcaggcccagctgtgcaacctgccccagggttctctgcagaataaaacgaaactgcttccaagcatcgaagaggcctggtcattacccattccggcggaactcacaagtcggcagggcgcaatgaataccgcacagcagaacacaagcgataactggtctggcggtcatgctgtgtcccatcccccagttcagcagcaggcccacagttggtgcctcacaccacagaagttgcagatgcggcctacgggcgtggcccaagtgagatccacgggaattcccaatggtccaacagccgactcaagcctccccaccaacagcgtgagtggccagcagccccagctggctctgactcgggtgccctctgtgagccagccgggcgtgagaccggcatgtccagggcagcctctggctaacgggccatttagtgccggccacgtgccgtgctcaacctcacggaccctgggctccaccgacacaatactgattggctag

SEQ ID NO: 284166 - DNA, 675 bp, Artificial Sequence
  derived and/or modified sequence
taacttcaagcatatatttgtgccgttcagctcgatcacggccatgccgcagcttggatggaccttggaactttatacgaatcttgtaaccagccccaggacgcgatcaaatgttacctgaatgctacacgttcaaaaagctgttccaataccagcgcattggccgcacgcattaaatacctgcaggctcagctgtgcaatcttccccagggatccttgcagaacaagacaaaactgctcccttcaattgaagaggcctggtccctccctatccctgccgagctcacatctcggcagggcgctatgaatacagcccaacagaacacttctgacaattggagcggaggtcacgcagtctcacatcctccagtgcagcaacaggctcattcctggtgcctcactccacagaaattacagatgaggcccactggagtggcccaagtgaggagtaccggcattccaaacggaccaactgcggacagcagcctgccaacaaatagcgtgtccggccagcaacctcagcttgccctgacgagggtacccagtgtctcccagcccggtgttaggcctgcctgccctggccagcccttagcaaatggaccattcagtgctggccatgttccatgctctaccagccgaaccctaggctccacagatacaatactcattggttag

SEQ ID NO: 284167 - DNA, 675 bp, Artificial Sequence
  derived and/or modified sequence
tgactgcaggcctacatctgcgccgtgcagctggaccacggccacgccgccgcctggatggacctgggcaccctgtacgagagctgcaaccagccccaggacgccatcaagtgctacctgaacgccaccagaagcaagagctgcagcaacaccagcgccctggccgccagaatcaagtacctgcaggcccagctgtgcaacctgccccagggcagcctgcagaacaagaccaagctgctgcccagcatcgaggaggcctggagcctgcccatccccgccgagctgaccagcagacagggcgccatgaacaccgcccagcagaacaccagcgacaactggagcggcggccacgccgtgagccacccccccgtgcagcagcaggcccacagctggtgcctgaccccccagaagctgcagatgagacccaccggcgtggcccaggtgagaagcaccggcatccccaacggccccaccgccgacagcagcctgcccaccaacagcgtgagcggccagcagccccagctggccctgaccagagtgcccagcgtgagccagcccggcgtgagacccgcctgccccggccagcccctggccaacggccccttcagcgccggccacgtgccctgcagcaccagcagaaccctgggcagcaccgacaccatcctgatcggctag

SEQ ID NO: 284168 - protein, 853 aa, Artificial Sequence
  derived and/or modified sequence
MEYERRGGRGDRTGRYGATDRSQDDGGENRSRDHDYRDMDYRSYPREYGSQEGKHDYDDSSEEQSAEIRGQLQSHGVQAREVRLMRNKSSGQSRGFAFVEFSHLQDATRWMEANQHSLNILGQKVSMHYSDPKPKINEDWLCNKCGVQNFKRREKCFKCGVPKSEAEQKLPLGTRLDQQTLPLGGRELSQGLLPLPQPYQAQGVLASQALSQGSEPSSENANDTIILRNLNPHSTMDSILGALAPYAVLSSSNVRVIKDKQTQLNRGFAFIQLSTIVEAAQLLQILQALHPPLTIDGKTINVEFAKGSKRDMASNEGSRISAASVASTAIAAAQWAISQASQGGEGTWATSEEPPVDYSYYQQDEGYGNSQGTESSLYAHGYLKGTKGPGITGTKGDPTGAGPEASLEPGADSVSMQAFSRAQPGAAPGIYQQSAEASSSQGTAANSQSYTIMSPAVLKSELQSPTHPSSALPPATSPTAQESYSQYPVPDVSTYQYDETSGYYYDPQTGLYYDPNSQYYYNAQSQQYLYWDGERRTYVPALEQSADGHKETGAPSKEGKEKKEKHKTKTAQQIAKDMERWARSLNKQKENFKNSFQPISSLRDDERRESATADAGYAILEKKGALAERQHTSMDLPKLASDDRPSPPRGLVAAYSGESDSEEEQERGGPEREEKLTDWQKLACLLCRRQFPSKEALIRHQQLSGLHKQNLEIHRRAHLSENELEALEKNDMEQMKYRDRAAERREKYGIPEPPEPKRRKYGGISTASVDFEQPTRDGLGSDNIGSRMLQAMGWKEGSGLGRKKQGIVTPIEAQTRVRGSGLGARGSSYGVTSTESYKETLHKTMVTRFNEAQ

SEQ ID NO: 284169 - DNA, 3108 bp, Artificial Sequence
  derived and/or modified sequence
gtgactgtggccggctgggagtaggcggcagtgagtttccctgggagggcagcgcgcttggcgcttctcccctccccccgatctgcctccagtctcggacttggttgttgcgcgctccggctccggctgagctgggagagttggaggaggtggcggcgggcagaggtgatgtctgggagcccttccttgacagcccgggccgagaagagtccctgcaggaagcatcacccaggctggcagatcatggtagcagcagcgggggtggctgggaagtgaaacggagccagcggctgaggaggggccccagcagcccccgaaggccctatcaggacatggagtatgaaagacgtggtggtcgtggtgacaggactggccgctatggagccactgaccgctcgcaggatgatggtggggagaaccgcagccgagaccacgactaccgggacatggactaccgttcatatcctcgcgagtatggcagccaggagggcaagcatgactatgacgactcatctgaggagcagagtgcggagatccgtggccagctgcagtcgcacggcgtgcaagcacgggaggttcggctgatgcggaacaaatcttcaggtcagagccggggcttcgccttcgtcgagtttagtcacttgcaggacgctacacgatggatggaagccaatcagcactccctcaacatcctgggccagaaggtgtcgatgcactacagtgaccccaagcccaagatcaatgaggactggctgtgcaataagtgtggcgtccagaacttcaaacgccgagagaagtgcttcaaatgtggcgtgcccaagtcagaggcagagcagaagctgcccctcggcacgaggctggatcagcagacactgccactgggtggccgggagctgagccagggcctgcttcccctgccgcagccctaccaggcccagggagtcctggcctcccaagccctgtcacagggctcggagccaagctcagagaacgccaatgacaccatcattttgcgcaacctgaacccacacagcaccatggattccatcctgggggccctggcaccctacgcggtgctgtcctcctccaacgtgcgcgtcataaaggacaagcagacccaactgaaccgcggctttgccttcatccagctctccaccatcgtggaggcagcccagctgctgcagatcctgcaggccctgcacccaccactcactatcgacggcaagaccatcaatgttgagtttgccaagggttctaagagggacatggcctccaatgaaggcagtcgcatcagtgctgcctctgtggccagcactgccattgctgcggcccagtgggccatctcacaggcctcccaaggtggggagggtacctgggccacctccgaggagccgccggtcgactacagctactaccaacaggatgagggctatggcaacagccagggcacagagtcttccctctatgcccatggctacctcaagggcaccaagggccctggcatcactggaaccaaaggggatcccactggagcaggtcccgaggcctccctagagcctggggccgactctgtgtcgatgcaggctttctctcgcgcccagcctggtgctgctcctggcatctaccaacaatcagccgaggcgagcagtagccagggcactgctgccaacagccagtcgtataccatcatgtcacccgctgtgctcaaatctgagctccagagccctacccatcctagttctgctctcccaccggctaccagccccactgcccaggaatcctacagccagtaccctgttcccgacgtctctacctaccagtacgatgagacctccggctactactatgacccccagaccggcctctactatgaccccaactcccagtattactacaatgctcagagccagcagtacctgtactgggatggggagaggcggacctatgttcccgccctggagcagtcggccgacggacataaggagacaggggcaccctcgaaggagggcaaagagaagaaggagaagcacaagaccaagacagctcaacagattgccaaggacatggaacgctgggcccgcagtctcaacaaacaaaaagaaaacttcaaaaatagcttccagcctatcagctccctgcgagatgacgagaggcgggagtcagccactgcagatgctggctatgccatcctcgagaagaagggagcactagccgagagacagcacaccagcatggatctcccgaaattggccagtgacgaccgcccaagccctccgcgaggactggtggcagcctacagcggggagagtgacagtgaggaggagcaggagcgtgggggccctgagcgggaggagaagctcaccgactggcagaagctggcctgtctgctctgccgacgccagttccccagcaaagaggcgctcatccggcaccagcagctctcagggctccacaagcaaaaccttgagattcaccggcgagcccacttgtcagaaaacgagctagaagcactagagaagaatgacatggagcaaatgaagtaccgggaccgtgcagctgaacgcagagaaaagtatggcatccccgagccgccagagcccaagaggaggaagtacggcggcatatccacagcctctgtagacttcgagcagcctactcgggacgggctgggcagtgacaacattggcagtcggatgctgcaggccatgggctggaaagagggcagcggcctgggccgcaagaagcagggcattgtaacgcctatcgaggcccaaacacgggtgcggggctccggcctgggtgcacggggcagctcctacggggtcacctcaaccgagtcctacaaggagacactgcacaagacaatggtgacccgcttcaacgaggcccagtgagcagcttcaagagcaacttctccacatgttgggtgtccatcctggggcagggaaggacagagtgttggatggctgggacggggccttgctcttgtcggccagcccactccccagccagagagggcttgaccaaatcaaattgaggtggtgacttttgttggaaaattgggctgggatcacgtcctgttttgtaataaaagctgaaaagtctgca

SEQ ID NO: 284170 - DNA, 2562 bp, Artificial Sequence
  derived and/or modified sequence
atggaatacgaacgccgggggggtaggggggatagaaccggacgttatggggccactgacaggtcacaagatgatggaggcgaaaataggagcagggaccatgactaccgagacatggattacaggtcctacccaagggagtatggcagtcaggaaggtaagcatgactacgatgattcgtccgaggaacaaagcgccgagatcagggggcagctccagagtcatggggttcaggcccgggaggttcgccttatgcggaataagtcctccgggcagagccggggcttcgctttcgtggaattcagccatcttcaggacgctactcggtggatggaggctaaccagcattccctcaatattctgggccaaaaagttagcatgcattatagcgaccccaaacccaagattaacgaagattggttatgcaacaaatgtggcgtacagaacttcaaacgaagggagaaatgttttaagtgtggagttccaaaaagcgaggccgagcagaagctgccccttggcacaaggttagaccaacaaacgttacccctgggaggacgcgagcttagccagggactccttcctctgccacagccataccaggcccaaggagtgttggcctcccaggcactgtctcaaggatcagagccctcatccgagaatgccaacgataccatcattttaaggaatttgaatccacacagcaccatggatagtatcctgggagcgctcgccccttatgctgtgttgagtagcagcaatgtccgagtgatcaaggacaaacagacacagctcaaccggggatttgcattcattcagctgtccacaatcgtagaggcagctcagcttcttcaaattctgcaggctctccatccccctctgactattgacgggaaaactatcaacgtagaattcgcaaaaggatccaaacgggacatggcctcgaacgaaggctctagaattagtgctgcctcggtagcttcgactgcgattgccgccgcacagtgggctatatctcaggcttcacagggaggggagggcacctgggccacctccgaagagccccccgttgactacagttactatcagcaggatgagggctatggaaattctcagggcaccgagtctagcctgtatgcccacggataccttaagggaacaaaaggacctggcatcactggtaccaagggggatccaaccggggccggacccgaagcaagcctcgaacctggcgcggatagcgtcagtatgcaagctttctcccgggcgcagcccggggccgcccctggtatttaccagcagtcggcagaggccagtagctcgcaaggaacggctgccaactcccagtcctatacaattatgtcacccgccgtgctcaagtcagaactccaaagcccaacccatccctcatcagcactccctcccgctacctccccgacggcacaagagtcttactcccagtaccctgtgccggacgtgtcaacatatcaatacgacgagacaagcggctactactacgatccacaaactgggctctattacgacccgaactcccagtactactacaacgcacagtctcagcagtatctttactgggatggggagagaagaacctacgtccctgccctggaacaaagcgccgatggtcacaaggagacaggggcccccagtaaagaaggtaaagaaaagaaggagaaacataagaccaagaccgctcagcagattgccaaagatatggaaagatgggcccgctcgctgaacaaacagaaagagaatttcaagaattcctttcagcccatttctagtttacgagacgacgaacgcagagagtcggcaacggccgacgcgggctacgcaatactagagaaaaagggagccctggctgagagacagcatacaagcatggacctacctaagctcgccagcgacgatcggccctcaccacccagaggcctggtggctgcctattctggagagagcgatagcgaggaggagcaagaaaggggaggtccagagagagaagagaagttgactgactggcagaagcttgcttgtctcttatgcaggagacagttcccttctaaagaggccctcatcaggcaccagcaactgagcggactgcataagcaaaacctggagattcatagaagagcgcacctaagtgaaaacgaactggaagcactggagaagaacgatatggaacagatgaaatacagagaccgcgccgctgaaagacgggagaaatatggaatccctgaacctccagagcccaaaaggcgcaaatacggaggcatcagtacagcctccgtggatttcgagcaacctacacgggacggcctcgggagcgataatatagggtctcgcatgttgcaggccatggggtggaaggagggatccggattggggcgcaaaaaacaggggatcgtgaccccaattgaagcacagacccgcgttcgcggatcagggctgggggctcgggggtcgtcttacggcgtaacgtccacggagagctacaaagagactctgcataaaaccatggtgacacggttcaacgaagctcagtag

SEQ ID NO: 284171 - DNA, 2562 bp, Artificial Sequence
  derived and/or modified sequence
atggagtatgaaagaagaggaggccgcggggacagaacaggccgctacggggccacagacaggagccaggatgatggaggagagaacagaagccgggaccatgactacagagacatggactaccgcagctacccccgggagtatggcagccaggagggcaagcatgactatgatgacagcagcgaggagcagagcgctgagatccggggccagctgcagagccatggagtgcaggcccgggaggtgcggctgatgaggaacaagagcagcggccagagccggggctttgcctttgtggagttcagccacctgcaggatgccacccgctggatggaggccaaccagcacagcctgaacatcctgggccagaaggtgtccatgcactacagcgaccccaagcccaagatcaatgaagactggctgtgcaacaagtgtggggtgcagaacttcaagaggcgggagaagtgcttcaagtgtggggtgcccaagtctgaggccgagcagaagctgcccctgggcacccggctggaccagcagaccctgcccctgggcggccgggagctgagccagggcctgctgcccctgccccagccctaccaggcccagggcgtgctggccagccaggccctgagccagggcagcgagcccagcagtgaaaatgccaatgacaccatcatcctgaggaacctgaacccccacagcaccatggacagcatcctgggcgccctggccccctatgctgtgctgagcagcagcaatgtgcgggtcatcaaggacaagcagacccagctgaacagaggatttgccttcatccagctgagcaccatcgtggaggccgcccagctgctgcagatcctgcaggccctgcacccccccctgaccattgatggcaagaccatcaacgtggagtttgccaagggcagcaagagggacatggccagcaatgaaggcagccgcatctctgctgcctctgtggccagcacagccatcgccgccgcccagtgggccatcagccaggccagccagggcggggagggcacctgggccaccagcgaggagccccctgtggactacagctactaccagcaggatgagggctacggcaacagccagggcacagagagcagcctgtatgcccacggctacctgaagggcaccaagggccctggcatcaccggcaccaagggggaccccactggagctggccctgaggccagcctggagcctggagctgacagcgtgtccatgcaggccttcagccgggcccagcccggggccgcccctggcatctaccagcagagcgctgaggccagcagcagccagggcacagctgccaacagccagagctacaccatcatgagccctgctgtgctgaagtctgagctgcagagccccacccaccccagcagcgccctgcccccagccaccagccccacagcccaggagagctacagccagtaccctgtgcctgatgtgtccacctaccagtatgatgagaccagcggctactactatgacccccagacaggcctgtactatgaccccaacagccagtactactacaatgcccagagccagcagtacctgtactgggatggagagaggaggacctacgtgcctgccctggagcagagcgcagatggccacaaggagaccggggcccccagcaaggagggcaaggagaagaaggagaagcacaagaccaagacagcccagcagatcgccaaggacatggagcgctgggcccggagcctgaacaagcagaaggagaacttcaagaacagcttccagcccatcagcagcctgagagatgatgaaagaagagagagcgccacagcagatgctggctacgccatcctggagaagaagggggccctggccgagcggcagcacacctccatggacctgcccaagctggccagtgatgaccggcccagccccccccggggcctggtggccgcctacagcggggagagtgacagcgaggaggagcaggagcggggcggccctgagcgggaggagaagctgacagactggcagaagctggcctgcctgctgtgccggcggcagttccccagcaaggaggccctgatccgccaccagcagctgagcggcctgcacaagcagaacctggagatccacagaagagcccacctgtctgaaaatgagctggaggccctggagaagaatgacatggagcagatgaagtacagagacagagctgctgagcggcgggagaagtatggcatccctgagcccccagagcccaagaggaggaaatatggaggcatcagcacagcctctgtggactttgagcagcccaccagagatggcctgggcagtgacaacatcggcagcaggatgctgcaggccatgggctggaaggagggcagcggcctgggcaggaagaagcagggcatcgtgacccccatcgaggcccagaccagggtgcggggcagcggcctgggcgcccggggcagcagctatggagtgaccagcacagagagctacaaggagaccctgcacaagaccatggtgacccgcttcaatgaggcccagtag

SEQ ID NO: 284172 - DNA, 2562 bp, Artificial Sequence
  derived and/or modified sequence
atggagtacgagcggcggggcggccggggcgaccggaccggccggtacggggccacagatcgctcgcaagacgacgggggggagaatagatctcgggatcacgattacagagatatggattacagaagttatccccgtgaatacggcagtcaggaagggaaacacgattatgatgattcatctgaggagcagtcagccgagattcgtggccagcttcagtcgcacggtgtccaggccagagaagtacggcttatgaggaacaagtccagtggacagagccgcggttttgcatttgtggagttttcgcacttacaggatgcaactcgctggatggaagccaaccagcactcactgaatatcctaggacagaaggtaagcatgcactacagcgacccgaagccaaagataaatgaagactggctctgtaacaagtgcggcgtgcagaacttcaaaaggagggagaaatgtttcaaatgcggtgtgcccaagtcggaggccgagcagaagctgccactgggaactaggttggatcaacagacacttccactgggcgggcgtgagctgtcacagggccttctgccccttcctcaaccataccaggcccagggcgttctcgctagtcaggctctcagtcagggctctgagccaagttctgagaacgccaatgacacaattattcttcgcaatctaaacccccatagtaccatggacagcatactaggggcactggcgccttacgctgttctgtcatcatctaacgtgagagtcattaaggacaaacagactcagctgaaccggggcttcgctttcatccagctgtccaccattgttgaagcggcacaactgctacagatacttcaggcacttcatcccccattaacgatcgacggcaaaactattaacgtagaattcgctaaaggctcaaaacgggatatggcctccaatgaaggatccaggatttccgctgcctctgtggcatctaccgctatcgcggcagcccagtgggccatcagtcaggcctcccaagggggcgaaggcacttgggcgacctctgaggagccccccgtcgattattcttattaccagcaagatgaaggatacggcaactctcagggtactgaaagtagcctgtacgctcacggttacttgaaagggacaaaagggccaggaatcactggaacaaaaggagatcccaccggcgcagggcctgaggcaagcctggagcctggcgccgatagtgtttccatgcaagcttttagtagagcccaaccgggagcggctcctgggatttatcagcaaagtgccgaagcctcttcctcacaaggcaccgccgctaactcacagagctatacgatcatgtcgccggccgtccttaagagtgaattgcaatccccaacacacccgtcctccgctcttccacctgcaacctcgcctaccgctcaggaatcttacagtcagtatcccgtgcccgacgtgagcacataccagtacgatgaaacatcagggtattattacgacccccagactgggctgtactacgatccaaatagccagtattactataatgcccagtcacagcagtatctgtattgggatggcgagcgcaggacttacgtgcccgctctggagcagtctgctgatggccataaagaaacaggcgcaccctctaaggaggggaaggagaaaaaggaaaagcacaaaaccaagactgctcaacagatcgctaaagacatggagcgctgggccaggagtctgaacaagcagaaggaaaacttcaaaaacagctttcagccaatcagtagcctccgggatgatgaaaggcgagagagcgcaacagccgacgccggatatgccatcctggaaaagaaaggtgccctcgccgaacgccagcatacctctatggatctcccaaaactcgctagtgatgaccgacccagcccaccaagaggactcgttgccgcttactctggggaaagtgattccgaagaagagcaggagaggggcgggcccgaacgggaagaaaagttaacagactggcaaaagcttgcttgtttactctgcagaagacagtttccttccaaagaggcactgattagacaccagcagctttccgggttgcacaaacaaaaccttgaaatacatagacgggcccatcttagtgagaacgagctcgaggccttagagaaaaatgatatggaacagatgaagtacagagaccgagccgccgaacgacgtgaaaaatatggaatccccgagcctccggagcccaagaggagaaagtacggcggaataagcaccgcaagtgtggactttgagcaacccacacgtgacggcctaggctccgataatatcggctcacggatgctccaggctatgggttggaaggaaggatccgggttgggccggaagaaacagggcatcgtaaccccgatagaggctcaaacccgggtgaggggctctggcctcggagcccgagggtcgtcttacggtgttacctccactgagtcctacaaggagactctgcataagacaatggtgacacggtttaacgaagcgcaatag

SEQ ID NO: 284173 - DNA, 2562 bp, Artificial Sequence
  derived and/or modified sequence
atggagtatgagcgcagaggtggaaggggcgacagaacaggtagatatggtgctacagacagaagtcaggatgacgggggtgagaatcggtcccgcgaccatgattacagagacatggactacaggtcttatccacgagagtacggcagtcaggaaggcaagcatgactacgatgactccagtgaagaacaatctgcggaaattagagggcagctgcagtcgcacggggtccaggcaagagaagttcggttaatgcgcaataagtcgagtggacagagtaggggctttgccttcgtcgagttctcacacctccaagatgccacgaggtggatggaggcaaatcagcacagtctgaacatcttaggacaaaaggtgtccatgcattactcagatccaaagcctaagattaacgaagactggctctgcaacaaatgtggagtgcagaatttcaagcgaagagaaaagtgcttcaagtgcggagtccccaagagtgaagctgaacagaagctgccattgggaacacggctcgaccagcagacgcttccgctgggagggcgtgagttgagtcaggggctccttccgcttccccagccataccaggcccagggcgtgcttgcaagtcaggccctcagccagggtagtgagccgagcagcgagaacgcgaatgacaccatcattctacgaaacctgaacccccactctaccatggatagtattctgggtgccctggcaccttacgctgtgctctcttcctccaacgtgagggtgatcaaggataaacaaacacagctgaatagaggttttgccttcattcaactgagcacaattgtcgaggcagcccagctgcttcaaatccttcaggcactacaccccccactgaccatcgatggcaaaaccatcaatgtggagtttgcaaagggaagtaaacgggatatggcatctaacgagggttcacggataagcgccgcttctgtggccagcactgcaatcgcagcagcccagtgggccatttcacaggcctcccaggggggagaagggacctgggccactagtgaggagccacccgtggattattcctactaccagcaggatgagggatacggcaacagccagggaacagagagcagtctgtatgcccacggatatctgaagggcactaaagggcctggcatcacgggcacgaagggggaccctactggggcaggtcctgaagcctccctggaacctggcgcagactcagtctccatgcaagcttttagtcgggctcagcctggggctgctccagggatttaccagcagagcgccgaggcatccagttcccagggaacggcagccaatagtcagagctatactattatgtcccctgcagtcctcaaatctgaactgcagtctcctactcacccatctagcgcactccctcccgctaccagtccaacagcccaagaaagctacagccagtatcccgtgccagatgtgagcacgtatcaatacgacgagaccagcggatactactacgatccacaaactggcctgtactatgatcccaactcgcagtactattacaatgcgcagagtcagcagtacctctactgggatggggagcgaagaacatacgtgccggcactggagcagtctgcagacggccataaggagactggtgcaccttccaaggaaggcaaggagaagaaggaaaagcacaaaaccaagaccgcacagcaaatcgccaaggatatggagcgctgggcccgatcactcaataagcagaaagagaatttcaagaattcctttcagcccatttcctcactgcgggacgatgagcgcagagaatctgcaaccgcggacgcgggatacgcaattctggaaaaaaaaggggctttagccgagcgccagcacaccagcatggatctacccaaactggcaagtgacgataggccgtctccaccacgcggactggtggctgcttactcaggcgagagcgacagcgaggaggaacaagaacgcggtggccctgagagagaagagaagttgaccgactggcagaaactggcatgtctgctgtgtcggaggcagtttccgtcgaaggaagcactgatacggcaccagcagctgtccggtctgcacaagcagaatctcgagatacacaggcgagcccacctttcagagaacgagcttgaggcactggagaaaaacgatatggagcagatgaagtaccgggaccgcgctgcagaaaggagggaaaaatacggcattcccgagccacccgagccaaagcggagaaaatatggcggaatctctacagccagcgtggatttcgaacaacctacccgagatggcctgggcagcgataacatcggatccaggatgctgcaggccatgggctggaaggaggggtcaggactggggagaaagaagcagggaatcgtgacgcccatagaggcacagactagggtgcggggaagcggccttggggcaaggggaagctcttatggggtgacgagcactgagtcatataaagaaacgcttcataagaccatggtaacacgattcaacgaagcccagtag

SEQ ID NO: 284174 - DNA, 2562 bp, Artificial Sequence
  derived and/or modified sequence
atggagtacgagagaagaggcggcagaggcgacagaaccggcagatacggcgccaccgacagaagccaggacgacggcggcgagaacagaagcagagaccacgactacagagacatggactacagaagctaccccagagagtacggcagccaggagggcaagcacgactacgacgacagcagcgaggagcagagcgccgagatcagaggccagctgcagagccacggcgtgcaggccagagaggtgagactgatgagaaacaagagcagcggccagagcagaggcttcgccttcgtggagttcagccacctgcaggacgccaccagatggatggaggccaaccagcacagcctgaacatcctgggccagaaggtgagcatgcactacagcgaccccaagcccaagatcaacgaggactggctgtgcaacaagtgcggcgtgcagaacttcaagagaagagagaagtgcttcaagtgcggcgtgcccaagagcgaggccgagcagaagctgcccctgggcaccagactggaccagcagaccctgcccctgggcggcagagagctgagccagggcctgctgcccctgccccagccctaccaggcccagggcgtgctggccagccaggccctgagccagggcagcgagcccagcagcgagaacgccaacgacaccatcatcctgagaaacctgaacccccacagcaccatggacagcatcctgggcgccctggccccctacgccgtgctgagcagcagcaacgtgagagtgatcaaggacaagcagacccagctgaacagaggcttcgccttcatccagctgagcaccatcgtggaggccgcccagctgctgcagatcctgcaggccctgcacccccccctgaccatcgacggcaagaccatcaacgtggagttcgccaagggcagcaagagagacatggccagcaacgagggcagcagaatcagcgccgccagcgtggccagcaccgccatcgccgccgcccagtgggccatcagccaggccagccagggcggcgagggcacctgggccaccagcgaggagccccccgtggactacagctactaccagcaggacgagggctacggcaacagccagggcaccgagagcagcctgtacgcccacggctacctgaagggcaccaagggccccggcatcaccggcaccaagggcgaccccaccggcgccggccccgaggccagcctggagcccggcgccgacagcgtgagcatgcaggccttcagcagagcccagcccggcgccgcccccggcatctaccagcagagcgccgaggccagcagcagccagggcaccgccgccaacagccagagctacaccatcatgagccccgccgtgctgaagagcgagctgcagagccccacccaccccagcagcgccctgccccccgccaccagccccaccgcccaggagagctacagccagtaccccgtgcccgacgtgagcacctaccagtacgacgagaccagcggctactactacgacccccagaccggcctgtactacgaccccaacagccagtactactacaacgcccagagccagcagtacctgtactgggacggcgagagaagaacctacgtgcccgccctggagcagagcgccgacggccacaaggagaccggcgcccccagcaaggagggcaaggagaagaaggagaagcacaagaccaagaccgcccagcagatcgccaaggacatggagagatgggccagaagcctgaacaagcagaaggagaacttcaagaacagcttccagcccatcagcagcctgagagacgacgagagaagagagagcgccaccgccgacgccggctacgccatcctggagaagaagggcgccctggccgagagacagcacaccagcatggacctgcccaagctggccagcgacgacagacccagcccccccagaggcctggtggccgcctacagcggcgagagcgacagcgaggaggagcaggagagaggcggccccgagagagaggagaagctgaccgactggcagaagctggcctgcctgctgtgcagaagacagttccccagcaaggaggccctgatcagacaccagcagctgagcggcctgcacaagcagaacctggagatccacagaagagcccacctgagcgagaacgagctggaggccctggagaagaacgacatggagcagatgaagtacagagacagagccgccgagagaagagagaagtacggcatccccgagccccccgagcccaagagaagaaagtacggcggcatcagcaccgccagcgtggacttcgagcagcccaccagagacggcctgggcagcgacaacatcggcagcagaatgctgcaggccatgggctggaaggagggcagcggcctgggcagaaagaagcagggcatcgtgacccccatcgaggcccagaccagagtgagaggcagcggcctgggcgccagaggcagcagctacggcgtgaccagcaccgagagctacaaggagaccctgcacaagaccatggtgaccagattcaacgaggcccagtag

SEQ ID NO: 284175 - DNA, 3151 bp, Artificial Sequence
  derived and/or modified sequence
ggtggtcggagcgccgactcccttctcgtcgtcgccattttgagctggtgactgtggccggctgggagtaggcggcagtgagtttccctgggagggcagcgcgcttggcgcttctcccctccccccgatctgcctccagtctcggacttggttgttgcgcgctccggctccggctgagctgggagagttggaggaggtggcggcgggcagaggtgatgtctgggagcccttccttgacagcccgggccgagaagagtccctgcaggaagcatcacccaggctggcagatcatggtagcagcagcgggggtggctgggaagtgaaacggagccagcggctgaggaggggccccagcagcccccgaaggccctatcaggacatggagtatgaaagacgtggtggtcgtggtgacaggactggccgctatggagccactgaccgctcgcaggatgatggtggggagaaccgcagccgagaccacgactaccgggacatggactaccgttcatatcctcgcgagtatggcagccaggagggcaagcatgactatgacgactcatctgaggagcagagtgcggagatccgtggccagctgcagtcgcacggcgtgcaagcacgggaggttcggctgatgcggaacaaatcttcaggtcagagccggggcttcgccttcgtcgagtttagtcacttgcaggacgctacacgatggatggaagccaatcagcactccctcaacatcctgggccagaaggtgtcgatgcactacagtgaccccaagcccaagatcaatgaggactggctgtgcaataagtgtggcgtccagaacttcaaacgccgagagaagtgcttcaaatgtggcgtgcccaagtcagaggcagagcagaagctgcccctcggcacgaggctggatcagcagacactgccactgggtggccgggagctgagccagggcctgcttcccctgccgcagccctaccaggcccagggagtcctggcctcccaagccctgtcacagggctcggagccaagctcagagaacgccaatgacaccatcattttgcgcaacctgaacccacacagcaccatggattccatcctgggggccctggcaccctacgcggtgctgtcctcctccaacgtgcgcgtcataaaggacaagcagacccaactgaaccgcggctttgccttcatccagctctccaccatcgaggcagcccagctgctgcagatcctgcaggccctgcacccaccactcactatcgacggcaagaccatcaatgttgagtttgccaagggttctaagagggacatggcctccaatgaaggcagtcgcatcagtgctgcctctgtggccagcactgccattgctgcggcccagtgggccatctcacaggcctcccaaggtggggagggtacctgggccacctccgaggagccgccggtcgactacagctactaccaacaggatgagggctatggcaacagccagggcacagagtcttccctctatgcccatggctacctcaagggcaccaagggccctggcatcactggaaccaaaggggatcccactggagcaggtcccgaggcctccctagagcctggggccgactctgtgtcgatgcaggctttctctcgcgcccagcctggtgctgctcctggcatctaccaacaatcagccgaggcgagcagtagccagggcactgctgccaacagccagtcgtataccatcatgtcacccgctgtgctcaaatctgagctccagagccctacccatcctagttctgctctcccaccggctaccagccccactgcccaggaatcctacagccagtaccctgttcccgacgtctctacctaccagtacgatgagacctccggctactactatgacccccagaccggcctctactatgaccccaactcccagtattactacaatgctcagagccagcagtacctgtactgggatggggagaggcggacctatgttcccgccctggagcagtcggccgacggacataaggagacaggggcaccctcgaaggagggcaaagagaagaaggagaagcacaagaccaagacagctcaacagattgccaaggacatggaacgctgggcccgcagtctcaacaaacaaaaagaaaacttcaaaaatagcttccagcctatcagctccctgcgagatgacgagaggcgggagtcagccactgcagatgctggctatgccatcctcgagaagaagggagcactagccgagagacagcacaccagcatggatctcccgaaattggccagtgacgaccgcccaagccctccgcgaggactggtggcagcctacagcggggagagtgacagtgaggaggagcaggagcgtgggggccctgagcgggaggagaagctcaccgactggcagaagctggcctgtctgctctgccgacgccagttccccagcaaagaggcgctcatccggcaccagcagctctcagggctccacaagcaaaaccttgagattcaccggcgagcccacttgtcagaaaacgagctagaagcactagagaagaatgacatggagcaaatgaagtaccgggaccgtgcagctgaacgcagagaaaagtatggcatccccgagccgccagagcccaagaggaggaagtacggcggcatatccacagcctctgtagacttcgagcagcctactcgggacgggctgggcagtgacaacattggcagtcggatgctgcaggccatgggctggaaagagggcagcggcctgggccgcaagaagcagggcattgtaacgcctatcgaggcccaaacacgggtgcggggctccggcctgggtgcacggggcagctcctacggggtcacctcaaccgagtcctacaaggagacactgcacaagacaatggtgacccgcttcaacgaggcccagtgagcagcttcaagagcaacttctccacatgttgggtgtccatcctggggcagggaaggacagagtgttggatggctgggacggggccttgctcttgtcggccagcccactccccagccagagagggcttgaccaaatcaaattgaggtggtgacttttgttggaaaattgggctgggatcacgtcctgttttgtaataaaagctgaaaagtctgc

SEQ ID NO: 284176 - DNA, 708 bp, Artificial Sequence
  derived and/or modified sequence
tttctgagatacctccttcccaaggagtaagcgcgggagggagctggggtttcttcagagacgctgtacctacaagacaggggctccaggctcgggtggggattgcagagacacccccaccccaggaaactcggatggaactgcaggatccaaagatgaatggagccctcccttcggatgctgtgggctacaggcaagaacgtgagggcttcctgcccagtcgtggtcctgctcctgggagcaagccggtccagttcatggatttcgaggggaagacatcgtttggaatgtcagtgttcaacctcagcaacgccatcatgggcagcggcatcctggggctggcctatgccatggcccacacgggggtcatcttcttcctggccctgctgctgtgcattgcgcttctgtcgtcctactccatccacctcctgctgacctgtgctggtattgcaggcatccgagcctatgagcagctgggacagagggcattcgggcctgcggggaaggtagtggtggccacagtcatctgtctgcacaatgttggggccatgtccagttacctgttcatcatcaaatctgagctccccctggttatcggcaccttcctgtacatggaccccgagggggactggttcttgaagggaaacctcctcatcatcatcgtcagtgtgttaatcatcctgcccctcgccctcatgaaacacttgg

SEQ ID NO: 284177 - DNA, 656 bp, Artificial Sequence
  derived and/or modified sequence
ctgcctccctctgggggcccccaagatctagggtcctctcgtgcctaggctgtctgcctgaggaaaaaaaaaaaagtaccgctccagagcaggagcctaggcagccgagagggtgcccgaacctgagtctgagttgcggccacttcaggagctgagaggagcaggatggaactgcaggatccaaagatgaatggagccctcccttcggatgctgtgggctacaggcaagaacgtgagggcttcctgcccagtcgtggtcctgctcctgggagcaagccggtccagttcatggatttcgaggggaagacatcgtttggaatgtcagtgttcaacctcagcaacgccatcatgggcagcggcatcctggggctggcctatgccatggcccacacgggggtcatcttcttcctggccctgctgctgtgcattgcgcttctgtcgtcctactccatccacctcctgctgacctgtgctggtattgcaggcatccgagcctatgagcagctgggacagagggcattcgggcctgcggggaaggtagtggtggccacagtcatctgtctgcacaatgttggggccatgtccagttacctgttcatcatcaaatctgagctccccctggttatcggcaccttcctgtacatggaccccgaggg

SEQ ID NO: 284178 - protein, 219 aa, Artificial Sequence
  derived and/or modified sequence
MELQDPKMNGALPSDAVGYRQEREGFLPSRGPAPGSKPVQFMDFEGKTSFGMSVFNLSNAIMGSGILGLAYAMAHTGVIFFLALLLCIALLSSYSIHLLLTCAGIAGIRAYEQLGQRAFGPAGKVVVATVICLHNVGAMSSYLFIIKSELPLVIGTFLYMDPEGDWFLKGNLLIIIVSVLIILPLALMKHLGYLGYTSGLSLTCMLFFLVSVIYKKFQL

SEQ ID NO: 284179 - protein, 191 aa, Artificial Sequence
  derived and/or modified sequence
MELQDPKMNGALPSDAVGYRQEREGFLPSRGPAPGSKPVQFMDFEGKTSFGMSVFNLSNAIMGSGILGLAYAMAHTGVIFFLALLLCIALLSSYSIHLLLTCAGIAGIRAYEQLGQRAFGPAGKVVVATVICLHNVGAMSSYLFIIKSELPLVIGTFLYMDPEGDWFLKGNLLIIIVSVLIILPLALMKHL

SEQ ID NO: 284180 - protein, 164 aa, Artificial Sequence
  derived and/or modified sequence
MELQDPKMNGALPSDAVGYRQEREGFLPSRGPAPGSKPVQFMDFEGKTSFGMSVFNLSNAIMGSGILGLAYAMAHTGVIFFLALLLCIALLSSYSIHLLLTCAGIAGIRAYEQLGQRAFGPAGKVVVATVICLHNVGAMSSYLFIIKSELPLVIGTFLYMDPEG

SEQ ID NO: 284181 - protein, 279 aa, Artificial Sequence
  derived and/or modified sequence
MELQDPKMNGALPSDAVGYRQEREGFLPSRGPAPGSKPVQFMDFEGKTSFGMSVFNLSNAIMGSGILGLAYAMAHTGVIFFLALLLCIALLSSYSIHLLLTCAGIAGIRAYEQLGQRAFGPAGKVVVATVICLHNVGAMSSYLFIIKSELPLVIGTFLYMDPEGDWFLKGNLLIIIVSVLIILPLALMKHLGYLGYTSGLSLTCMLFFLVSVIYKKFQLGCAIGHNETAMESEALVGLPSQGLNSSCEAQMFTVDSQMSYTVPIMAFAFVCHPEVLPIY

SEQ ID NO: 284182 - protein, 272 aa, Artificial Sequence
  derived and/or modified sequence
MELQDPKMNGALPSDAVGYRQEREGFLPSRGPAPGSKPVQFMDFEGKTSFGMSVFNLSNAIMGSGILGLAYAMAHTGVIFFLALLLCIALLSSYSIHLLLTCAGIAGIRAYEQLGQRAFGPAGKVVVATVICLHNVGAMSSYLFIIKSELPLVIGTFLYMDPEGDWFLKGNLLIIIVSVLIILPLALMKHLGYLGYTSGLSLTCMLFFLVSVIYKKFQLGCAIGHNETAMESEALVGLPSQGLNSSCEAQMFTVDSQMSYTVPIMAFAFVCH

SEQ ID NO: 284183 - DNA, 741 bp, Artificial Sequence
  derived and/or modified sequence
ggccacgcggtgagggtggagggaaggagagggggtggcgcgggggaccggggaatgaaagacacagatggcaagagagacagcgatggaactgcaggatccaaagatgaatggagccctcccttcggatgctgtgggctacaggcaagaacgtgagggcttcctgcccagtcgtggtcctgctcctgggagcaagccggtccagttcatggatttcgaggggaagacatcgtttggaatgtcagtgttcaacctcagcaacgccatcatgggcagcggcatcctggggctggcctatgccatggcccacacgggggtcatcttcttcctggccctgctgctgtgcattgcgcttctgtcgtcctactccatccacctcctgctgacctgtgctggtattgcaggcatccgagcctatgagcagctgggacagagggcattcgggcctgcggggaaggtagtggtggccacagtcatctgtctgcacaatgttggggccatgtccagttacctgttcatcatcaaatctgagctccccctggttatcggcaccttcctgtacatggaccccgagggggactggttcttgaagggaaacctcctcatcatcatcgtcagtgtgttaatcatcctgcccctcgccctcatgaaacacttgggctacctggggtacaccagtggtctctctctgacctgcatgctgtttttccttgtttcggtcatctacaagaagttccaact

SEQ ID NO: 284184 - protein, 98 aa, Artificial Sequence
  derived and/or modified sequence
VCGSTQEKTVFRLEAMLERTAGVQSKEAALEEEAVLKVEDIMAEVEVVVEVEVVVEVEPDVGWQKEGQRAQPGPGPSTPGPSMDSLEVLHLELGSVNA

SEQ ID NO: 284185 - protein, 264 aa, Artificial Sequence
  derived and/or modified sequence
MRPEGSLTYRVPERLRQGFCGVGRAAQALVCASAKEGTAFRMEAVQEGAAGVESEQAALGEEAVLLLDDIMAEVEVVAEVEVVAEEEGLVERREEAQRAQQAVPGPGPMTPESALEELLAVQVELEPVNAQARKAFSRQREKMERRRKPHLDRRGAVIQSVPGFWANVIANHPQMSALITDEDEDMLSYMVSLEVEEEKHPVHLCKIMLFFRSNPYFQNKVITKEYLVNITGDRWLPGWVVEGRWWVDHCQRDPAPFPQKLLSL

SEQ ID NO: 284186 - protein, 300 aa, Artificial Sequence
  derived and/or modified sequence
MRPEGSLTYRVPERLRQGFCGVGRAAQALVCASAKEGTAFRMEAVQEGAAGVESEQAALGEEAVLLLDDIMAEVEVVAEVEVVAEEEGLVERREEAQRAQQAVPGPGPMTPESALEELLAVQVELEPVNAQARKAFSRQREKMERRRKPHLDRRGAVIQSVPGFWANVIANHPQMSALITDEDEDMLSYMVSLEVEEEKHPVHLCKIMLFFRSNPYFQNKVITKEYLVNITEYRASHSTPIEWYPDYEVEAYRRRHHNSSLNFFNWFSDHNFAGSNKIAESPDRSYVRTCGAIPCNTTRG

SEQ ID NO: 284187 - DNA, 297 bp, Artificial Sequence
  derived and/or modified sequence
gtgtgcggcagcacccaggagaagaccgtgttcagactggaggccatgctggagagaaccgccggcgtgcagagcaaggaggccgccctggaggaggaggccgtgctgaaggtggaggacatcatggccgaggtggaggtggtggtggaggtggaggtggtggtggaggtggagcccgacgtgggctggcagaaggagggccagagagcccagcccggccccggccccagcacccccggccccagcatggacagcctggaggtgctgcacctggagctgggcagcgtgaacgcctag

SEQ ID NO: 284188 - DNA, 795 bp, Artificial Sequence
  derived and/or modified sequence
atgagacccgagggcagcctgacctacagagtgcccgagagactgagacagggcttctgcggcgtgggcagagccgcccaggccctggtgtgcgccagcgccaaggagggcaccgccttcagaatggaggccgtgcaggagggcgccgccggcgtggagagcgagcaggccgccctgggcgaggaggccgtgctgctgctggacgacatcatggccgaggtggaggtggtggccgaggtggaggtggtggccgaggaggagggcctggtggagagaagagaggaggcccagagagcccagcaggccgtgcccggccccggccccatgacccccgagagcgccctggaggagctgctggccgtgcaggtggagctggagcccgtgaacgcccaggccagaaaggccttcagcagacagagagagaagatggagagaagaagaaagccccacctggacagaagaggcgccgtgatccagagcgtgcccggcttctgggccaacgtgatcgccaaccacccccagatgagcgccctgatcaccgacgaggacgaggacatgctgagctacatggtgagcctggaggtggaggaggagaagcaccccgtgcacctgtgcaagatcatgctgttcttcagaagcaacccctacttccagaacaaggtgatcaccaaggagtacctggtgaacatcaccggcgacagatggctgcccggctgggtggtggagggcagatggtgggtggaccactgccagagagaccccgcccccttcccccagaagctgctgagcctgtag

SEQ ID NO: 284189 - DNA, 903 bp, Artificial Sequence
  derived and/or modified sequence
atgagacccgagggcagcctgacctacagagtgcccgagagactgagacagggcttctgcggcgtgggcagagccgcccaggccctggtgtgcgccagcgccaaggagggcaccgccttcagaatggaggccgtgcaggagggcgccgccggcgtggagagcgagcaggccgccctgggcgaggaggccgtgctgctgctggacgacatcatggccgaggtggaggtggtggccgaggtggaggtggtggccgaggaggagggcctggtggagagaagagaggaggcccagagagcccagcaggccgtgcccggccccggccccatgacccccgagagcgccctggaggagctgctggccgtgcaggtggagctggagcccgtgaacgcccaggccagaaaggccttcagcagacagagagagaagatggagagaagaagaaagccccacctggacagaagaggcgccgtgatccagagcgtgcccggcttctgggccaacgtgatcgccaaccacccccagatgagcgccctgatcaccgacgaggacgaggacatgctgagctacatggtgagcctggaggtggaggaggagaagcaccccgtgcacctgtgcaagatcatgctgttcttcagaagcaacccctacttccagaacaaggtgatcaccaaggagtacctggtgaacatcaccgagtacagagccagccacagcacccccatcgagtggtaccccgactacgaggtggaggcctacagaagaagacaccacaacagcagcctgaacttcttcaactggttcagcgaccacaacttcgccggcagcaacaagatcgccgagagccccgacagaagctacgtgagaacctgcggcgccatcccctgcaacaccaccagaggctag

SEQ ID NO: 284190 - DNA, 297 bp, Artificial Sequence
  derived and/or modified sequence
gtctgtggtagcacacaggagaagaccgtgttcagactggaggccatgcttgagaggaccgccggtgtacagtcaaaggaggccgcactcgaagaggaggccgtgctgaaggtggaggatatcatggctgaggtagaggtggtggttgaagtcgaggttgttgtggaggtcgagcctgacgtgggctggcagaaagaagggcaacgagctcagccaggcccgggtccttcaacgccgggaccatcaatggatagcctcgaggtgcttcatctcgaactgggctccgtgaacgcctag

SEQ ID NO: 284191 - DNA, 795 bp, Artificial Sequence
  derived and/or modified sequence
atgcggcccgagggtagtctgacgtaccgggtacccgaacgcctgcgccaggggttctgtggtgtcgggcgagccgcccaggccctggtctgcgcgagcgcaaaggaggggacagcatttcgcatggaggcagttcaggagggcgccgcaggagttgaaagtgaacaggcggcactgggtgaagaggccgtgctattgttagacgatataatggccgaggtggaagtggtcgcagaggtggaagtggtggccgaggaggaggggcttgtcgaacgtagagaggaagcccaacgagcacagcaggcagtgcccgggcctggacccatgacccccgaaagcgcccttgaagagttgctggctgttcaggtggagttggagcccgtcaacgcgcaggcacggaaggcattttctagacagcgggagaagatggagcgcagacgtaagcctcacctagatcggcgcggagccgttatccagagcgttcctgggttttgggcgaacgtgatcgcgaatcacccacagatgtccgctctcattacagatgaagacgaggacatgctgtcgtatatggtgtccctcgaagtggaggaggagaagcatcctgtgcacctctgtaagattatgttgttcttccgcagcaatccctactttcaaaataaggtcatcaccaaggaatacctcgtgaatattacaggagacaggtggctgccaggctgggtcgtggagggaaggtggtgggttgaccactgtcaacgtgatccggcaccattcccccagaagctactaagtttgtag

SEQ ID NO: 284192 - DNA, 903 bp, Artificial Sequence
  derived and/or modified sequence
atgagacccgagggctctttgacctatcgagtgcctgagcgcttgaggcaagggttttgtggtgtgggacgtgctgcccaagctcttgtgtgtgcaagcgccaaagaagggacagcatttcgtatggaggcggttcaggaaggagcagctggggtcgagagtgaacaggcagcactgggggaggaagcagtcctgctgctcgatgatatcatggccgaagtggaagtagtagcagaggtggaagtcgtggccgaggaggaaggcttagtagaaaggcgagaggaggcccagcgcgctcaacaggcggtgcctggtcccgggcccatgacgccggaatccgccctcgaggagcttctggccgtgcaggtagagttggaaccagttaatgcccaagccaggaaggcgtttagcaggcagcgcgagaaaatggaacgaagacgaaagccacacctcgaccgcagaggtgcagttatccagtccgtgcctggtttttgggccaacgttatcgccaaccatcctcagatgtcggccctcatcactgatgaagatgaagatatgctgagttacatggtgtcattagaagtggaggaagagaagcatccggttcatctgtgcaaaataatgctcttttttaggagtaatccctactttcagaacaaggtcatcacgaaggaatacctcgtaaacatcacagaatatagagcaagccatagcacacccattgagtggtacccagattatgaagtcgaagcttacagaaggagacaccacaattcatcactaaatttctttaactggttttccgaccataactttgcagggtctaacaagatcgcagagtcacccgatagaagctatgtgagaacctgcggggcaatcccctgcaacaccaccagaggctag

SEQ ID NO: 284193 - DNA, 297 bp, Artificial Sequence
  derived and/or modified sequence
gtgtgtggcagcacccaggagaagacagtgttccggctggaggccatgctggagaggacagctggggtgcagagcaaggaggccgccctggaggaggaggccgtgctgaaggtggaggacatcatggccgaggtggaggtggtggtggaggtggaggtggtggtggaggtggagccagatgtgggctggcagaaggagggccagagggcccagcccggccctggccccagcaccccaggccccagcatggacagcctggaggtgctgcacctggagctgggctctgtgaatgcctag

SEQ ID NO: 284194 - DNA, 795 bp, Artificial Sequence
  derived and/or modified sequence
atgaggcctgagggcagcctgacctacagagtgcctgagcggctgcggcagggcttctgtggggtgggccgggccgcccaggccctggtgtgtgccagcgccaaggagggcacagccttcaggatggaggccgtgcaggagggcgccgccggcgtggagagcgagcaggccgccctgggggaggaggccgtgctgctgctggatgacatcatggccgaggtggaggtggtggccgaggtggaggtggtggccgaggaggagggcctggtggagcggcgggaggaggcccagagggcccagcaggccgtgcccggccctggccccatgaccccagagagcgccctggaggagctgctggccgtgcaggtggagctggagcctgtgaatgcccaggccaggaaggccttcagccggcagcgggagaagatggagaggaggaggaagccccacctggacagaagaggagctgtgatccagagcgtgcccggcttctgggccaacgtgattgccaaccacccccagatgtctgccctgatcacagatgaagatgaggacatgctgagctacatggtgtccctggaggtggaggaggagaagcaccctgtgcacctgtgcaagatcatgctgttcttccgcagcaacccctacttccagaacaaggtgatcaccaaggagtacctggtgaacatcactggagaccgctggctgcccggctgggtggtggagggccgctggtgggtggaccactgccagagggaccctgcccccttcccccagaagctgctgagcctgtag

SEQ ID NO: 284195 - DNA, 903 bp, Artificial Sequence
  derived and/or modified sequence
atgaggcctgagggcagcctgacctacagagtgcctgagcggctgcggcagggcttctgtggggtgggccgggccgcccaggccctggtgtgtgccagcgccaaggagggcacagccttcaggatggaggccgtgcaggagggcgccgccggcgtggagagcgagcaggccgccctgggggaggaggccgtgctgctgctggatgacatcatggccgaggtggaggtggtggccgaggtggaggtggtggccgaggaggagggcctggtggagcggcgggaggaggcccagagggcccagcaggccgtgcccggccctggccccatgaccccagagagcgccctggaggagctgctggccgtgcaggtggagctggagcctgtgaatgcccaggccaggaaggccttcagccggcagcgggagaagatggagaggaggaggaagccccacctggacagaagaggagctgtgatccagagcgtgcccggcttctgggccaacgtgattgccaaccacccccagatgtctgccctgatcacagatgaagatgaggacatgctgagctacatggtgtccctggaggtggaggaggagaagcaccctgtgcacctgtgcaagatcatgctgttcttccgcagcaacccctacttccagaacaaggtgatcaccaaggagtacctggtgaacatcacagagtaccgggccagccacagcacccccatcgagtggtacccagactatgaggtggaggcctacagaagaagacaccacaacagcagcctgaacttcttcaactggttcagtgaccacaactttgctggcagcaacaagattgctgagagcccagacaggagctatgtgaggacctgtggggccatcccctgcaacaccacccggggctag

SEQ ID NO: 284196 - DNA, 297 bp, Artificial Sequence
  derived and/or modified sequence
gtgtgcggcagcacccaggagaagaccgtgttccggctggaggccatgctggaaagaactgccggcgtgcagagtaaagaggcagccctggaagaagaggctgtgctgaaagtggaagacataatggccgaggtggaggtcgtggtcgaagttgaggtcgtcgttgaagtggaaccagatgtgggttggcagaaggaaggacagcgcgcccagcccggccctggcccttcaacccccggtccaagtatggattctctcgaggtgcttcacttggaactcggctcagtgaatgcttag

SEQ ID NO: 284197 - DNA, 795 bp, Artificial Sequence
  derived and/or modified sequence
atgcggcccgagggcagcctgacctaccgggtgcccgagcggctgcgccaggggttctgcggtgtcgggagagctgcccaggctctcgtttgcgcctctgccaaagagggtacagccttccggatggaggcggtgcaagaaggggcagccggggtggagtctgaacaggccgccctcggcgaagaagctgtcctgttgctggacgacatcatggcggaggtggaggtcgtggccgaggtggaagtggtggctgaggaagagggcctagttgagaggagagaagaggctcagagggctcagcaggcagtgcctggtccggggcccatgaccccggaatcagctctggaagaactgctggcagtccaagtggaattagagcctgtgaacgcccaggcgcgaaaggcattctcccggcagcgagagaagatggaaagacggagaaaacctcatctcgataggagaggtgccgtgatccaaagcgttccaggattctgggcaaacgtcatcgctaaccacccccagatgagcgctctcattaccgatgaagacgaggatatgctgagctacatggtcagcctggaggtggaggaagaaaaacacccagtccacctctgtaagatcatgctcttctttaggagtaacccttactttcagaacaaagttatcacgaaagagtacttggttaatatcactggcgataggtggctccccggctgggtggtggaaggtcgctggtgggtcgatcattgtcagcgagacccggccccattccctcagaagcttctgagcctgtag

SEQ ID NO: 284198 - DNA, 903 bp, Artificial Sequence
  derived and/or modified sequence
atgcggcccgagggcagcctgacctaccgggtgcccgagcggctgcgccaggggttctgcggagtaggtcgggctgctcaggcgctcgtctgcgccagtgcgaaagagggcactgccttcagaatggaagcagtgcaggaaggcgcggctggtgtggaaagtgagcaggccgccctgggcgaagaggctgtactactcctcgacgatataatggccgaggttgaggttgttgcggaagtggaggtcgtggccgaggaggaggggctggtagagcggcgtgaggaagcccagcgggcccaacaggccgtgcctggacccggacccatgacaccagaatctgccctagaggaactgctggctgtccaagttgagctcgaaccagtaaatgcgcaggcacgaaaagctttctctcgccagagagagaagatggagagaaggcgtaagccccatcttgatcgaagaggagccgtcatccagtccgttccaggtttctgggcaaatgtgatcgccaaccatccgcagatgtctgctttgattactgacgaagatgaggacatgttgtcgtacatggtcagccttgaagtcgaagaggagaagcatccagtgcacctgtgcaaaataatgctgttcttcaggtcaaacccatacttccagaataaagtcattaccaaggagtacttagtgaatatcactgagtacagggcgagtcactctacgccgattgaatggtaccctgactacgaagtcgaggcctatcgtaggagacatcacaactcctctttgaacttttttaactggttctccgaccataatttcgcaggcagcaataagatcgccgaatcacctgaccgttcttatgtgagaacttgcggggccataccctgcaataccacacgaggctag

SEQ ID NO: 284199 - DNA, 297 bp, Artificial Sequence
  derived and/or modified sequence
gtgtgcggtagcacacaagaaaaaactgtattcaggttagaagctatgctggaacggactgccggagtacagtctaaggaggccgctctggaggaagaagccgtgcttaaggtggaggatattatggccgaggtagaggtggtggtggaggtggaagtcgtggttgaggtcgagcctgatgtcgggtggcagaaagaaggccaaagagctcagcccggacccggaccatccactcctggccctagcatggacagtctcgaggttctgcacctggagctaggatccgtcaacgcctag

SEQ ID NO: 284200 - DNA, 795 bp, Artificial Sequence
  derived and/or modified sequence
atgcggccagaaggcagcttgacataccgagttcccgagcggctgcggcaaggcttctgcggggttggtcgggcagctcaggcactggtgtgtgcctccgccaaagagggcacagcttttagaatggaggctgtgcaggaaggtgccgcaggagtcgagtcagagcaagctgccctgggtgaagaggcagttctgctcctggatgatattatggctgaggtggaagtggtggccgaagtagaagtagtggccgaagaagaggggcttgtggaacgacgagaggaagctcagagagcccagcaggccgtgccaggtcccggaccaatgactcctgagagtgctctcgaggaactactggccgtgcaggtagagctggagcccgtcaatgctcaggcacggaaagccttcagccgccagagggaaaagatggaaaggagacgcaagccacacctggatagaaggggcgcagttattcagtctgtccccggtttctgggccaatgtgatcgccaatcaccctcagatgtcagctttgatcactgacgaggatgaggacatgctgtcttatatggtgagtctggaggttgaagaggagaaacatcctgtgcacctttgcaagattatgctcttcttcaggtctaatccctactttcaaaataaggtgatcaccaaagagtacctggtgaatatcaccggagaccgatggttgcccggatgggtggttgaggggaggtggtgggttgatcattgtcagcgagatcctgccccatttccacagaaattgctgtctttgtag

SEQ ID NO: 284201 - DNA, 903 bp, Artificial Sequence
  derived and/or modified sequence
atgagaccagagggcagcctcacatatcgtgtaccggaaaggctgaggcagggtttctgtggagtcgggcgtgctgcccaggcacttgtctgcgcaagtgctaaagagggcaccgctttccggatggaagcggtacaggagggtgctgcaggcgtcgaatccgagcaggccgctcttggagaggaggctgtgctcctgttggatgatatcatggctgaggtcgaggtagtggccgaggtcgaggtggtggccgaagaggaaggcttagtcgagcggagagaggaagcacaaagagcccagcaggcagttcctggcccaggtcccatgactcccgaatcggcgttggaagaactgctggctgtacaggtggagctggagcccgtgaatgcccaggcaaggaaagcattttcacgccagcgggaaaaaatggagcgcaggagaaagccacatttagataggcggggtgcagtgatccaatccgtgcctggattttgggcgaacgtgatcgcaaaccacccccagatgtcggcgctgatcactgacgaagacgaggacatgctgtcctatatggtgagcctggaggtggaagaagaaaaacacccagtccacctgtgtaaaatcatgctatttttccgaagtaacccctactttcaaaataaagtcatcactaaggagtacctggtcaatatcacggagtaccgcgcatctcatagcactcccattgaatggtacccggattacgaggtggaagcttatcggagaaggcatcacaatagttccctcaacttttttaattggttctcagatcataattttgccggttctaataagatagccgagagccctgaccggtcttacgtgcggacttgtggtgccattccttgcaataccacccggggttag

SEQ ID NO: 284202 - DNA, 294 bp, Artificial Sequence
  derived and/or modified sequence
gtctgtgggagcacccaggagaaaaccgtgttcaggctggaggcaatgctggagaggacggccggggtacagagcaaggaggcggccttggaagaggaggcggtgctgaaggtggaagacatcatggctgaggtggaggtggtggttgaggtggaggtggtggttgaggtggagcccgacgtggggtggcagaaggagggccagcgggcacagcctggccctggaccgagcacaccggggccgtcaatggactcgctggaggtccttcacttggagctgggctccgtgaatgcc

SEQ ID NO: 284203 - DNA, 1143 bp, Artificial Sequence
  derived and/or modified sequence
atgcgccctgagggctcgctgacctaccgggtgccagagaggctgcggcagggtttctgtggcgtgggtcgggcagcacaggccttggtgtgtgcgagtgccaaggagggcaccgccttcaggatggaggctgtacaggagggggcggccggggtggagagtgagcaggcggctttgggggaggaggcggtgctgctgttggatgacataatggcggaggtggaggtggtggcggaggtggaggtggtggcggaggaggagggcctcgtggagcggcgggaggaggcccagcgggcacagcaggctgtgcctggccctgggcccatgaccccagagtctgcactggaggagctgctggccgttcaggtggagctggagccggttaatgcccaagccaggaaggccttttctcggcagcgggaaaagatggagcggaggcgcaagccccacctagaccgcagaggcgccgtcatccagagcgtccctggcttctgggccaatgttattgcaaaccacccccagatgtcagccctgatcactgacgaagatgaagacatgctgagctacatggtcagcctggaggtggaagaagagaagcatcctgttcatctctgcaagatcatgttgttctttcggagtaacccctacttccagaataaagtgattaccaaggaatatctggtgaacatcacagaatacagggcttctcattccactccaattgagtggtatccggattatgaagtggaggcctatcgccgcagacaccacaacagcagccttaacttcttcaactggttctctgaccacaacttcgcaggatctaacaagattgctgagtcccctgacagatcctatgtaaggacctgtggcgcaatcccctgcaatactacaagaggatgaagccacctgaagagggaacagagacgtcaggggactcccagttgttgagttgaatatgatggagcatcagattttacctaatacagcagaactcctaaaaagttacagccatatgcaggacggcagtactcagcatggtcttatgcacaggaactaaaggaaaaagagatcgagtcacaaaaattcaggaagagggggtaaatgtggattgtatggaatgaaaaataaacattctcaagg

SEQ ID NO: 284204 - protein, 213 aa, Artificial Sequence
  derived and/or modified sequence
  misc_feature (1)..(1): Xaa can be any naturally occurring amino acid
XPDPPPGRVPGAFTEHAYDGKDYISLNEDLRSWTAADTVAQITQRFYEAEEYAEEFRTYLEGECLELLRRYLENGKETLQRADPPKAHVAHHPISDHEATLRCWALGFYPAEITLTWQRDGEEQTQDTELVETRPAGDGTFQKWAAVVVPSGEEQRYTCHVQHEGLPQPLILRWEQSPQPTIPIVGIVAGLVVLGAVVTGAVVAAVMWRKKSS

SEQ ID NO: 284205 - protein, 532 aa, Artificial Sequence [sequence omitted]

SEQ ID NO: 284206 - protein, 641 aa, Artificial Sequence
  derived and/or modified sequence
MATAKGIAIGIDLGTTYSCVGVFQHGKVEIIANDQGNRTTPSYVAFTDTERLIGDAAKNQVAMNPQNTVFDAKRLIGRKFNDPVVQADMKLWPFQVINEGGKPKVLVSYKGENKAFYPEEISSMVLTKLKETAEAFLGHPVTNAVITVPAYFNDSQRQATKDAGVIAGLNVLRIINEPTAAAIAYGLDKGGQGERHVLIFDLGGGTFDVSILTIDDGIFEVKATAGDTHLGGEDFDNRLVSHFVEEFKRKHKKDISQNKRAVRRLRTACERAKRTLSSSTQANLEIDSLYEGIDFYTSITRARFEELCADLFRGTLEPVEKALRDAKMDKAKIHDIVLVGGSTRIPKVQRLLQDYFNGRDLNKSINPDEAVAYGAAVQAAILMGDKSEKVQDLLLLDVAPLSLGLETAGGVMTALIKRNSTIPTKQTQIFTTYSDNQPGVLIQVYEGERAMTKDNNLLGRFDLTGIPPAPRGVPQIEVTFDIDANGILNVTAMDKSTGKVNKITITNDKGRLSKEEIERMVLDAEKYKAEDEVQREKIAAKNALESYAFNMKSVVSDEGLKGKISESDKNKILDKCNELLSWLEVNQLAEKDEFDHKRKELEQMCNPIITKLYQGGCTGPACGTGYVPGRPATGPTIEEVD

SEQ ID NO: 284207 - protein, 295 aa, Artificial Sequence [sequence omitted]

SEQ ID NO: 284208 - DNA, 888 bp, Artificial Sequence
  derived and/or modified sequence
atggccagtctctcaagacccagcctccctagttgtctgtgctcattcctgctgctgttattgcttcaggtgtctagctcctacgccgggcagtttagggttatcgggcctcgccaccccatccgtgcactcgttggggacgaagtcgaactgccctgcaggatcagccccggcaaaaacgcaaccggtatggaagtgggctggtaccgaccaccattctccagggttgtgcacctgtacagaaacggcaaggaccaagatggggatcaggctccagagtatagagggaggacagaactgctcaaggatgcaattggcgagggcaaagttactctacggatcaggaacgtaagatttagcgacgaaggcgggttcacctgtttcttcagggatcattcttaccaggaggaagcagctatggaacttaaagtcgaggacccattttactgggtctctccaggcgttctggtgctactcgctgtcctccctgtcctgctccttcaaataacagtgggtctcgtgtttttgtgtctccagtatcgattacgcggcaaactgcgggcagagattgagaacctgcacaggactttcgatccacatttcctcagggtcccctgctggaagatcacgctgtttgtaattgtccctgtactcggacccctcgtcgcgttgattatttgctataattggttacacagacgattagcagggcagtttctggaagagctacgtaagtttagttcactgtgttataagcagcgcataaagagccaggaaagagagaccgaagccactcgcggcagaggcggactcttacgggatcacatccctcgcggtaaggaggagctcgagtctctcggaggcggcaaaacaccgcccgggcggtag

SEQ ID NO: 284209 - DNA, 888 bp, Artificial Sequence
  derived and/or modified sequence
atggcctcactttctagaccttcactgccaagctgtctatgttccttcttgctgctgctgttactccaggtttctagctcatatgctggacaatttagggttattggtccgcgacaccccatccgcgctctagtgggggacgaagtggaactgccttgtaggatatcccccggaaagaacgcaacgggcatggaagtaggctggtatcgaccgcctttttcccgggttgtccacctgtataggaatggtaaggaccaagatggcgatcaggcccctgagtacaggggcaggaccgagctactgaaggacgcgattggcgaaggcaaggtgactctccgaatccgaaacgtccgtttttccgatgaggggggttttacttgcttttttcgcgatcacagctaccaggaggaggccgcaatggagctcaaggtagaggatccattttactgggtgtcacccggagtacttgttctcctggccgtactcccggtgctgctcctgcagatcaccgttgggttagtcttcctttgtctgcagtatcggctgagaggtaagttgagagctgagattgagaacctccaccggactttcgatccacacttcctgagggtcccatgctggaagattacattgtttgtcatcgtgcctgttcttggtccactagtcgccctaatcatatgttacaattggttacaccggcgtctggctggccaattcctggaggaactcagaaaattttcttccctgtgctataagcagagaattaaaagtcaggagcgggagactgaggccactaggggaagaggcggactccttagagatcacatcccacgagggaaagaagaactggagagtctgggcggagggaagacaccccctggccggtag

SEQ ID NO: 284210 - DNA, 888 bp, Artificial Sequence
  derived and/or modified sequence
atggcgtccctaagcaggcctagcctgccgtcttgtctttgctcattcttgctattactgctgctgcaggtgtccagctcctatgctggccagtttcgggtaatcgggcctaggcacccaatccgggctctcgttggagacgaggtggaactcccatgtagaatcagcccaggaaaaaacgctacaggcatggaagtggggtggtatcgtccccccttttctcgtgtggtgcacttgtatcgcaatggaaaggatcaggacggggaccaggcgcccgaatatcgcggacggaccgagctactgaaggacgcgatcggagagggaaaagtgaccctgagaatacgaaacgtcagattttctgacgaaggggggtttacctgcttcttccgcgatcattcttaccaggaggaggctgcaatggaattgaaggtggaagaccccttttactgggtgagccccggcgtgctagtacttctggctgtacttcccgtgctgctactacagattactgttggactcgtttttctgtgtctgcagtacaggctccgcggcaaattgcgggcggagattgagaatctgcaccggactttcgaccctcatttccttagggtcccttgttggaaaataaccttatttgtgattgtgcctgtgctagggccgctcgtagcgctgatcatctgctataactggctccaccgccgactggccggtcagttcctggaggaactgcgtaagtttagtagcttgtgttataagcaaaggatcaagtcccaagagagggagactgaggccaccagagggcgcggcggcttgttgagggatcatataccacgcggaaaagaggagctcgaaagccttggtgggggtaaaactccgcctggccgttag

SEQ ID NO: 284211 - DNA, 888 bp, Artificial Sequence
  derived and/or modified sequence
atggccagcctctccaggccatccctcccaagttgtctgtgcagcttcctgctcctcctccttctgcaggtgtcctcaagctacgctggacagttccgagtgattggtccacgtcaccctattagggctctcgtgggggatgaagtcgagctaccatgtagaatcagccccggcaaaaacgccacgggtatggaagtaggctggtataggcctccgttttccagggtcgtgcatctctacaggaatggcaaagaccaagacggcgatcaggctcccgaatatcgcggccggaccgaactcctcaaggatgctattggggagggaaaggtcaccctgcgcatacgtaacgtgaggttcagtgacgagggagggttcacgtgttttttcagggaccactcttatcaggaggaggcagccatggagctgaaagttgaggatcccttctattgggtatcaccaggcgtattggtcctactggccgtactcccagtgctcctgctccaaatcaccgtgggcttagtctttctgtgtctgcaatataggctccgcgggaaactcagagccgaaatcgaaaacctacatcggacatttgatccccactttcttagggtgccgtgttggaaaatcacgttattcgtgattgtccctgtgctggggcctcttgtggctctgatcatctgctataactggctgcataggcgccttgccggtcagtttttggaggagctgcgaaagttctcgtcactctgctataagcagcgcattaagtcacaggagagagagacggaggcaactagaggacgagggggactattacgtgaccacattcccagaggaaaggaggagttagaatccctcggtgggggtaagacccctcctgggcggtag

SEQ ID NO: 284212 - DNA, 888 bp, Artificial Sequence
  derived and/or modified sequence
atggcaagtctgtctagacccagcctgccttcatgtctgtgttcattcctgttactacttttactgcaggtcagtagcagctatgcaggccagttccgcgtcatcgggcccaggcatcctattcgggcacttgtgggcgacgaagttgagctcccatgccgaataagtcctgggaagaacgctaccggaatggaagtcggatggtatcgcccacccttctctcgcgtggttcacctttatagaaacggtaaggatcaagacggggatcaggcgccagagtatagggggaggaccgagctgcttaaggacgcaattggtgagggcaaagtgactttaagaatccgcaacgtgcgattcagtgatgagggaggattcacctgttttttcagggaccatagttaccaggaagaggcggcaatggagctgaaggttgaggatcctttctattgggtttccccgggagtgctggtgttactcgcggtgctgccggtgcttctgctgcaaatcaccgtggggttggtgttcctctgtctgcagtacaggctaagaggcaaactgagagccgaaatcgagaacctgcataggacttttgatccacacttcctacgggttccatgttggaagataactttgtttgtcatagtccccgtgctcgggccactggtggccctaatcatctgctacaactggttacacagacgattggccggacagtttctcgaggagttgaggaaatttagctcactgtgctacaagcaacgaataaaaagccaggagagggagacggaagcgacaagaggccggggcggccttcttcgggaccacatcccgcggggcaaagaagagctggaatctctggggggcggcaaaacaccaccaggcagatag

SEQ ID NO: 284213 - DNA, 888 bp, Artificial Sequence
  derived and/or modified sequence
atggccagcctcagtcgtcccagcttaccctcctgcttatgctccttcttgttgctgttgttgttgcaggtgagttcctcttacgccggtcagttccgcgtcattggaccaagacacccaatcagggcgcttgtgggcgacgaggttgagctgccttgtaggatttcccccggcaagaatgctacgggtatggaggttggctggtatcgtcctcctttttcccgcgtcgtgcacctctatcgaaacggcaaggatcaggatggggatcaggccccagaatatcgcggtcggacagagctccttaaagatgccattggcgaggggaaagtaactcttcgtataagaaacgtgaggtttagcgatgaaggcggctttacatgttttttccgcgaccacagttatcaggaggaagcagcgatggagttaaaggtggaggatccattttactgggtgtccccaggtgtgctggtcctcttggcagtgctgcccgtgctgcttcttcagataacagtgggccttgtgtttctttgtctccagtacagactgcgcgggaaactccgggctgaaatcgaaaacctgcataggacttttgatccccactttttaagggtgccctgctggaagataacactcttcgtcattgtacctgtgttggggcccctagtcgccctcatcatttgctataattggctgcatcgcagattagccggccagtttctggaggagctcagaaagttctcaagcttgtgctataaacaacgcatcaaatcgcaggaacgcgagacggaagctacacgcggccggggaggtctacttagggaccacatcccacgtggtaaggaggagctggaaagtctcggaggagggaagactccgcccgggcgctag

SEQ ID NO: 284214 - DNA, 888 bp, Artificial Sequence
  derived and/or modified sequence
atggccagcctgagccggcccagcctgcccagctgcctgtgcagcttcctgctgctgctgctgctgcaggtgagcagcagctatgccggccagttccgggtgattggccccaggcaccccatccgggccctggtgggagatgaggtggagctgccctgccgcatcagccctgggaagaatgccaccggcatggaggtgggctggtacagaccacccttcagccgggtggtgcacctgtacagaaatggcaaggaccaggatggagaccaggcccctgagtaccggggccgcacagagctgctgaaggatgccatcggggagggcaaggtgaccctgcgcatcagaaatgtgcgcttcagtgatgaaggaggcttcacctgcttcttccgggaccacagctaccaggaggaggccgccatggagctgaaggtggaggaccccttctactgggtgtccccaggagtgctggtgctgctggccgtgctgcctgtgctgctgctgcagatcaccgtgggcctggtgttcctgtgcctgcagtaccgcctgcggggcaagctgcgggcagaaattgagaacctgcacaggacctttgacccccacttcctgcgggtgccctgctggaagatcaccctcttcgtcatcgtgcctgtgctgggccccctggtggccctgatcatctgctacaactggctgcaccggcggctggccggccagttcctggaggagctgaggaagttcagcagcctgtgctacaagcagaggatcaagagccaggagcgggagacagaggccacccggggccggggcggcctgctgcgggaccacatcccccggggcaaggaggagctggagagcctgggcggcggcaagaccccacctggaagatag

SEQ ID NO: 284215 - DNA, 2503 bp, Artificial Sequence
  derived and/or modified sequence
agcactgccctccaagatcttcccttgggcttttcagcagtaaggggacatgcaccccaagggcctccacttggcctgaccttgctgcgggggctctctgtccccaggaacagtagagatggcaagcttatcgagaccctctctgcccagctgcctctgctccttcctcctcctcctcctcctccaagtgtcttccagctatgcagggcagttcagagtgataggaccaagacaccctatccgggctctggtcggggatgaagtggaattgccatgtcgcatatctcctgggaagaacgctacaggcatggaggtggggtggtaccgcccccccttctctagggtggttcatctctacagaaatggcaaggaccaagatggagaccaggcacctgaatatcggggccggacagagctgctgaaagatgctattggtgagggaaaggtgactctcaggatccggaatgtaaggttctcagatgaaggaggtttcacctgcttcttccgagatcattcttaccaagaggaggcagcaatggaattgaaagtagaagatcctttctactgggtgagccctggagtgctggttctcctcgcggtgctgcctgtgctcctcctgcagatcactgttggcctcgtcttcctctgcctgcagtacagactgagaggaaaacttcgagcagagatagagaatctccaccggacttttgatccccactttctgagggtgccctgctggaagataaccctgtttgtaattgtgccggttcttggacccttggttgccttgatcatctgctacaactggctacatcgaagactagcagggcaattccttgaagagctacgtaagttctcttctctctgttataagcagagaataaaaagccaggaaagggagacagaagcaacaagaggaagaggcgggctattgagggatcacattcccagaggaaaggaggagctggagagcctgggtggagggaagactcctcctgggaggtagagggcaaagaagccagctgttagagacacatttacaggtggcagagaagctggaggcactcctatctgccacctgatccattcctccttcactgcccctaagcaggaatccaaccctagctggtctcattgcccattccacagcaactgcccagtgcctcacctctcagatcaaccattgaggcaggaatggagacaagatgaccccaagggcttttcttctccctagttcaatggttttatgatacaaactactgacatacgtttttcaagttattttctccttcttctaggaaatcccttctgagtgatgtcacatcttggcaggggtggaggagagcctggttgcccagggatttgtccttggggacatctcatccatcaagttgcacactcactggcatctttgctatggggacattccaatttgcactttcaggaacactctgaattccaagtagaattgatttcccttcttctgtcatctaccttttctcttcattttcccatttttattacccttctttccatttctctctccagtcttccacctggaagccctctctggctaaggacaggcaggtgcccctctctccatcagaggacacctgtactggagagcaacacaggatggtctctgccatgaactggaggccaggaatctcctcactgaaaattacagtatggtaactttgcaaatggtggttgtttcttccaagactccagccctgattgcgcaaaactgaaaggcatgtgaagggaaggaagaggaagagtgcaaaacattgaagagagagctgagtgagctgaagagtgaggatatgagtagccccaacccaaacctggagatggggagaaacctacagaatactagccagagctcctccttgtcttggcagcctactagggacctggggaagcaaaaacgaaagctgggcaacatgcctgctttagaatgttttccttctacttacacatcttccacaggtctcagaatctttccttcctctcatccttttctcctatcttcatatctatcagagtatccactgtttattcaacaactactacttgatggtcagacacaaacaaacaagctaggtgctaattaataaagatatgagttttggccgggtgcggtggctcacgcctgtaatcccagcactttgggaggccgaggcgggcgaatcacgaggtcaggagttcgagaccagcctggccaacatggtgaaaccccatctctactaaaaatacaaacaattaactgagcatagtggtgggcacctataataccagctactccggaggctgaggcaggagaatcgcttgaacccaggaggcagaggttgcagtgagctgagatcgcgccactgcactctagccagagtgacagagtaagactctgtctcaaaaataaataaataaataaataaataaataaataaataaataaataaataaaaaataataatacaagttttcataagcacacttctaa

SEQ ID NO: 284216 - DNA, 2499 bp, Artificial Sequence
  derived and/or modified sequence
agcactgccctccaagatcttcccttgggcttttcagcagtaaggggacatgcaccccaagggcctccacttggcctgaccttgctgcgggggctctctgtccccaggaacagtagagatggcaagcttatcgagaccctctctgcccagctgcctctgctccttcctcctcctcctcctcctccaagtgtcttccagctatgcagggcagttcagagtgataggaccaagacaccctatccgggctctggtcggggatgaagtggaattgccatgtcgcatatctcctgggaagaacgctacaggcatggaggtggggtggtaccgcccccccttctctagggtggttcatctctacagaaatggcaaggaccaagatggagaccaggcacctgaatatcggggccggacagagctgctgaaagatgctattggtgagggaaaggtgactctcaggatccggaatgtaaggttctcagatgaaggaggtttcacctgcttcttccgagatcattcttaccaagaggaggcagcaatggaattgaaagtagaagatcctttctactgggtgagccctggagtgctggttctcctcgcggtgctgcctgtgctcctcctgcagatcactgttggcctcgtcttcctctgcctgcagtacagactgagaggaaaacttcgagcagagatagagaatctccaccggacttttgatccccactttctgagggtgccctgctggaagataaccctgtttgtaattgtgccggttcttggacccttggttgccttgatcatctgctacaactggctacatcgaagactagcagggcaattccttgaagagctacgtaagttctcttctctctgttataagcagagaataaaaagccaggaaagggagacagaagcaacaagaggaagaggcgggctattgagggatcacattcccagaggaaaggaggagctggagagcctgggtggagggaagactcctcctgggaggtagagggcaaagaagccagctgttagagacacatttacaggtggcagagaagctggaggcactcctatctgccacctgatccattcctccttcactgcccctaagcaggaatccaaccctagctggtctcattgcccattccacagcaactgcccagtgcctcacctctcagatcaaccattgaggcaggaatggagacaagatgaccccaagggcttttcttctccctagttcaatggttttatgatacaaactactgacatacgtttttcaagttattttctccttcttctaggaaatcccttctgagtgatgtcacatcttggcaggggtggaggagagcctggttgcccagggatttgtccttggggacatctcatccatcaagttgcacactcactggcatctttgctatggggacattccaatttgcactttcaggaacactctgaattccaagtagaattgatttcccttcttctgtcatctaccttttctcttcattttcccatttttattacccttctttccatttctctctccagtcttccacctggaagccctctctggctaaggacaggcaggtgcccctctctccatcagaggacacctgtactggagagcaacacaggatggtctctgccatgaactggaggccaggaatctcctcactgaaaattacagtatggtaactttgcaaatggtggttgtttcttccaagactccagccctgattgcgcaaaactgaaaggcatgtgaagggaaggaagaggaagagtgcaaaacattgaagagagagctgagtgagctgaagagtgaggatatgagtagccccaacccaaacctggagatggggagaaacctacagaatactagccagagctcctccttgtcttggcagcctactagggacctggggaagcaaaaacgaaagctgggcaacatgcctgctttagaatgttttccttctacttacacatcttccacaggtctcagaatctttccttcctctcatccttttctcctatcttcatatctatcagagtatccactgtttattcaacaactactacttgatggtcagacacaaacaaacaagctaggtgctaattaataaagatacgagttttggccgggtgcggtggctcacgcctgtaatcccagcactttgggaggccgaggcgggcgaatcacgaggtcaggagttcaagaccagcctggccaacatggtgaaaccccatctctactaaaaatacaaacaattaactgagcatagtggtgggcacctataataccagctactccggaggctgaggcaggagaatcgcttgaacccaggaggcagaggttgcagtgagctgagatcgcgccactgcactctagccggagtgacagagtaagactctgtctcaaaaataaataaataaataaataaataaataaataaataaataaataaaaaataataatacaagttttcataagcacacttctaa

SEQ ID NO: 284217 - DNA, 2499 bp, Artificial Sequence
  derived and/or modified sequence
agcactgccctccaagatcttcccttgggcttttcagcagtaaggggacatgcaccccaagggcctccacttggcctgaccttgctgcgggggctctctgtccccaggaacagtagagatggcaagcttatcgagaccctctctgcccagctgcctctgctccttcctcctcctcctcctcctccaagtgtcttccagctatgcagggcagttcagagtgataggaccaagacaccctatccgggctctggtcggggatgaagtggaattgccatgtcgcatatctcctgggaagaacgctacaggcatggaggtggggtggtaccgcccccccttctctagggtggttcatctctacagaaatggcaaggaccaagatggagaccaggcacctgaatatcggggccggacagagctgctgaaagatgctattggtgagggaaaggtgactctcaggatccggaatgtaaggttctcagatgaaggaggtttcacctgcttcttccgagatcattcttaccaagaggaggcagcaatggaattgaaagtagaagatcctttctactgggtgagccctggagtgctggttctcctcgcggtgctgcctgtgctcctcctgcagatcactgttggcctcgtcttcctctgcctgcagtacagactgagaggaaaacttcgagcagagatagagaatctccaccggacttttgatccccactttctgagggtgccctgctggaagataaccctgtttgtaattgtgccggttcttggacccttggttgccttgatcatctgctacaactggctacatcgaagactagcagggcaattccttgaagagctacgtaagttctcttctctctgttataagcagagaataaaaagccaggaaagggagacagaagcaacaagaggaagaggcgggctattgagggatcacattcccagaggaaaggaggagctggagagcctgggtggagggaagactcctcctgggaggtagagggcaaagaagccagctgttagagacacatttacaggtggcagagaagctggaggcactcctatctgccacctgatccattcctccttcactgcccctaagcaggaatccaaccctagctggtctcattgcccattccacagcaactgcccagtgcctcacctctcagatcaaccattgaggcaggaatggagacaagatgaccccaagggcttttcttctccctagttcaatggttttatgatacaaactactgacatacgtttttcaagttattttctccttcttctaggaaatcccttctgagtgatgtcacatcttggcaggggtggaggagagcctggttgcccagggatttgtccttggggacatctcatccatcaagttgcacactcactggcatctttgctatggggacattccaatttgcactttcaggaacactctgaattccaagtagaattgatttcccttcttctgtcatctaccttttctcttcattttcccatttttattacccttctttccatttctctctccagtcttccacctggaagccctctctggctaaggacaggcaggtgcccctctctccatcagaggacacctgtactggagagcaacacaggatggtctctgccatgaactggaggccaggaatctcctcactgaaaattacagtatggtaactttgcaaatggtggttgtttcttccaagactccagccctgattgcgcaaaactgaaaggcatgtgaagggaaggaagaggaagagtgcaaaacattgaagagagagctgagtgagctgaagagtgaggatatgagtagccccaacccaaacctggagatggggagaaacctacagaatactagccagagctcctccttgtcttggcagcctactagggacctggggaagcaaaaacgaaagctgggcaacatgcctgctttagaatgttttccttctacttacacatcttccacaggtctcagaatctttccttcctctcatccttttctcctatcttcatatctatcagagtatccactgtttattcaacaactactacttgatggtcagacacaaacaaacaagctaggtgctaattaataaagatacgagttttggccgggtgcggtggctcacgcctgtaatcccagcactttgggaggccgaggcgggcgaatcacgaggtcaggagttcgagaccagcctggccaacatggtgaaaccccatctctactaaaaatacaaacaattaactgagcatagtggtgggcacctataataccagctactccggaggctgaggcaggagaatcgcttgaacccaggaggcagaggttgcagtgagctgagatcgcgccactgcactctagccagagtgacagagtaagactctgtctcaaaaataaataaataaataaataaataaataaataaataaataaataaaaaataataatacaagttttcataagcacacttctaa

SEQ ID NO: 284218 - DNA, 2507 bp, Artificial Sequence
  derived and/or modified sequence
agcactgccctccaagatcttcccttgggcttttcagcagtaaggggacatgcaccccaagggcctccacttggcctgaccttgctgcgggggctctctgtccccaggaacagtagagatggcaagcttatcgagaccctctctgcccagctgcctctgctccttcctcctcctcctcctcctccaagtgtcttccagctatgcagggcagttcagagtgataggaccaagacaccctatccgggctctggtcggggatgaagtggaattgccatgtcgcatatctcctgggaagaacgctacaggcatggaggtggggtggtaccgcccccccttctctagggtggttcatctctacagaaatggcaaggaccaagatggagaccaggcacctgaatatcggggccggacagagctgctgaaagatgctattggtgagggaaaggtgactctcaggatccggaatgtaaggttctcagatgaaggaggtttcacctgcttcttccgagatcattcttaccaagaggaggcagcaatggaattgaaagtagaagatcctttctactgggtgagccctggagtgctggttctcctcgcggtgctgcctgtgctcctcctgcagatcactgttggcctcgtcttcctctgcctgcagtacagactgagaggaaaacttcgagcagagatagagaatctccaccggacttttgatccccactttctgagggtgccctgctggaagataaccctgtttgtaattgtgccggttcttggacccttggttgccttgatcatctgctacaactggctacatcgaagactagcagggcaattccttgaagagctacgtaagttctcttctctctgttataagcagagaataaaaagccaggaaagggagacagaagcaacaagaggaagaggcgggctattgagggatcacattcccagaggaaaggaggagctggagagcctgggtggagggaagactcctcctgggaggtagagggcaaagaagccagctgttagagacacatttacaggtggcagagaagctggaggcactcctatctgccacctgatccattcctccttcactgcccctaagcaggaatccaaccctagctggtctcattgcccattccacagcaactgcccagtgcctcacctctcagatcaaccattgaggcaggaatggagacaagatgaccccaagggcttttcttctccctagttcaatggttttatgatacaaactactgacatacgtttttcaagttattttctccttcttctaggaaatcccttctgagtgatgtcacatcttggcaggggtggaggagagcctggttgcccagggatttgtccttggggacatctcatccatcaagttgcacactcactggcatctttgctatggggacattccaatttgcactttcaggaacactctgaattccaagtagaattgatttcccttcttctgtcatctaccttttctcttcattttcccatttttattacccttctttccatttctctctccagtcttccacctggaagccctctctggctaaggacaggcaggtgcccctctctccatcagaggacacctgtactggagagcaacacaggatggtctctgccatgaactggaggccaggaatctcctcactgaaaattacagtatggtaactttgcaaatggtggttgtttcttccaagactccagccctgattgcgcaaaactgaaaggcatgtgaagggaaggaagaggaagagtgcaaaacattgaagagagagctgagtgagctgaagagtgaggatatgagtagccccaacccaaacctggagatggggagaaacctacagaatactagccagagctcctccttgtcttggcagcctactagggacctggggaagcaaaaacgaaagctgggcaacatgcctgctttagaatgttttccttctacttacacatcttccacaggtctcagaatctttccttcctctcatccttttctcctatcttcatatctatcagagtatccactgtttattcaacaactactacttgatggtcagacacaaacaaacaagctaggtgctaattaataaagatacgagttttggccgggtgcggtggctcacgcctgtaatcccagcactttgggaggccgaggcgggcgaatcacgaggtcaggagttcaagaccagcctggccaacatggtgaaaccccatctctactaaaaatacaaacaattaactgagcatagtggtgggcacctataataccagctactccggaggctgaggcaggagaatcgcttgaacccaggaggcagaggttgcagtgagctgagatcgcgccactgcactctagccggagtgacagagtaagactctgtctcaaaaataaataaataaataaataaataaataaataaataaataaataaataaataaaaaataataatacaagttttcataagcacacttctaa

SEQ ID NO: 284219 - DNA, 2503 bp, Artificial Sequence
  derived and/or modified sequence
agcactgccctccaagatcttcccttgggcttttcagcagtaaggggacatgcaccccaagggcctccacttggcctgaccttgctgcgggggctctctgtccccaggaacagtagagatggcaagcttatcgagaccctctctgcccagctgcctctgctccttcctcctcctcctcctcctccaagtgtcttccagctatgcagggcagttcagagtgataggaccaagacaccctatccgggctctggtcggggatgaagtggaattgccatgtcgcatatctcctgggaagaacgctacaggcatggaggtggggtggtaccgcccccccttctctagggtggttcatctctacagaaatggcaaggaccaagatggagaccaggcacctgaatatcggggccggacagagctgctgaaagatgctattggtgagggaaaggtgactctcaggatccggaatgtaaggttctcagatgaaggaggtttcacctgcttcttccgagatcattcttaccaagaggaggcagcaatggaattgaaagtagaagatcctttctactgggtgagccctggagtgctggttctcctcgcggtgctgcctgtgctcctcctgcagatcactgttggcctcgtcttcctctgcctgcagtacagactgagaggaaaacttcgagcagagatagagaatctccaccggacttttgatccccactttctgagggtgccctgctggaagataaccctgtttgtaattgtgccggttcttggacccttggttgccttgatcatctgctacaactggctacatcgaagactagcagggcaattccttgaagagctacgtaagttctcttctctctgttataagcagagaataaaaagccaggaaagggagacagaagcaacaagaggaagaggcgggctattgagggatcacattcccagaggaaaggaggagctggagagcctgggtggagggaagactcctcctgggaggtagagggcaaagaagccagctgttagagacacatttacaggtggcagagaagctggaggcactcctatctgccacctgatccattcctccttcactgcccctaagcaggaatccaaccctagctggtctcattgcccattccacagcaactgcccagtgcctcacctctcagatcaaccattgaggcaggaatggagacaagatgaccccaagggcttttcttctccctagttcaatggttttatgatacaaactactgacatacgtttttcaagttattttctccttcttctaggaaatcccttctgagtgatgtcacatcttggcaggggtggaggagagcctggttgcccagggatttgtccttggggacatctcatccatcaagttgcacactcactggcatctttgctatggggacattccaatttgcactttcaggaacactctgaattccaagtagaattgatttcccttcttctgtcatctaccttttctcttcattttcccatttttattacccttctttccatttctctctccagtcttccacctggaagccctctctggctaaggacaggcaggtgcccctctctccatcagaggacacctgtactggagagcaacacaggatggtctctgccatgaactggaggccaggaatctcctcactgaaaattacagtatggtaactttgcaaatggtggttgtttcttccaagactccagccctgattgcgcaaaactgaaaggcatgtgaagggaaggaagaggaagagtgcaaaacattgaagagagagctgagtgagctgaagagtgaggatatgagtagccccaacccaaacctggagatggggagaaacctacagaatactagccagagctcctccttgtcttggcagcctactagggacctggggaagcaaaaacgaaagctgggcaacatgcctgctttagaatgttttccttctacttacacatcttccacaggtctcagaatctttccttcctctcatccttttctcctatcttcatatctatcagagtatccactgtttattcaacaactactacttgatggtcagacacaaacaaacaagctaggtgctaattaataaagatacgagttttggccgggtgcggtggctcacgcctgtaatcccagcactttgggaggccgaggcgggcgaatcacgaggtcaggagttcaagaccagcctggccaacatggtgaaaccccatctctactaaaaatacaaacaattaactgagcatagtggtgggcacctataataccagctactccggaggctgaggcaggagaatcgcttgaacccaggaggcagaggttgcagtgagctgagatcgcgccactgcactctagccggagtgacagagtaagactctgtctcaaaaataaataaataaataaataaataaataaataaataaataaataaataaaaaataataatacaagttttcataagcacacttctaa

SEQ ID NO: 284220 - DNA, 888 bp, Artificial Sequence
  derived and/or modified sequence
atggccagcctgagccggcccagcctgcccagctgcctgtgcagcttcctgctgctgctcctcctgcaggtgtcatcatcatacgccgggcagttcagagtgatcgggccaagacaccctatacgcgctttggttggcgatgaggtggaattaccgtgcaggatatctccaggcaagaatgctactgggatggaggtaggctggtatcgcccacctttctctcgtgttgtgcacctctatagaaatggtaaagaccaagacggcgaccaagcccctgagtacaggggaaggactgagttgctgaaagacgccatcggggagggcaaggtcaccctaagaatccgcaacgtcaggttttccgacgaggggggatttacatgcttcttccgggaccattcataccaagaagaagccgctatggaattgaaggttgaggaccccttctattgggtttcgccgggagtgctcgtgctgctcgctgtgttgcccgtacttctcctccagataactgtgggcctcgtgtttctgtgtctgcaataccgccttaggggaaaattgcgagccgagatcgaaaatttgcaccggacctttgatccgcattttcttcgcgtgccttgctggaagatcacactgttcgtgattgtgcccgtcctgggtccattagtggctctgattatctgctacaactggctccatcgtcgcctcgccgggcagttcctggaagagctccgaaaattttcaagcctatgctataagcagcgtattaagtcacaggaacgggaaactgaggccacccgcggacgaggaggactgctccgggatcacattccacgcgggaaggaggagctggagtccctgggaggaggcaagactcccccaggtaggtag

SEQ ID NO: 284221 - DNA, 888 bp, Artificial Sequence
  derived and/or modified sequence
atggccagcctgagccggcccagcctgcccagctgcctgtgcagcttccttctcctactgctgctgcaggtttcctcaagttacgcagggcagttccgcgttatagggcctagacaccctattcgtgcccttgtgggcgatgaagtagaactaccttgtaggatttcccccgggaaaaatgccactggcatggaggtggggtggtatcgtccgcctttttctcgagtcgtgcatctttaccggaacggaaaggaccaagatggcgatcaggcacctgagtacagaggtcgcacagagctgcttaaggacgctattggggagggcaaggtgaccctcaggatccgaaatgtacgtttttccgatgaaggagggtttacctgcttctttagagatcacagctatcaggaagaagccgcgatggagctcaaggtggaggacccattctactgggtatctcccggagtcctggtcttgctcgccgtgctacccgtactgctacttcagattaccgtcggcctcgtcttcttgtgtctgcagtacaggctgcggggcaagctcagagctgagattgaaaatctgcaccgcactttcgaccctcattttctccgagtgccatgttggaagatcacactgttcgtgattgttcctgtgcttggtccgctcgtcgccttgattatctgctacaactggttacaccgcaggctggcaggccagtttctggaggagcttcggaaattcagttctctctgctacaagcagcgaattaagagccaggagagagaaaccgaagccactagggggcgcggcgggctgttgagggatcacatccccagaggaaaggaggagctggagagccttggaggagggaaaaccccccccggaaggtag

SEQ ID NO: 284222 - DNA, 888 bp, Artificial Sequence
  derived and/or modified sequence
atggccagcctgagccggcccagcctgcccagctgcctgtgcagctttctgcttctcctactgcttcaggtgtccagcagctatgccgggcagtttcgagtgatcggcccaagacacccgataagggcacttgtgggcgacgaggtggagttgccgtgccgaatcagcccgggtaagaacgccacagggatggaagtgggctggtacaggccacccttttcacgggtggttcatctctacagaaatggcaaagaccaggacggcgaccaggcccctgagtacagagggagaacggaacttttaaaggatgcgataggggagggaaaagtgactcttagaatccgcaacgtgcggttcagcgatgaaggcggattcacatgcttcttcagggaccacagctatcaggaagaggctgccatggagctgaaggtcgaggacccattctactgggtctcgcccggggtcctggtcctccttgccgtgctccctgtgctattattacagatcactgtgggactggtatttctatgcctgcagtacagattaaggggcaagcttcgagccgagattgaaaaccttcaccggacctttgacccgcacttccttcgggttccctgctggaaaataaccttgttcgttattgtccctgtgctgggcccactggtggcgctgatcatctgttataactggttacaccggcgtctggctgggcagtttctagaagagctgagaaagttctcctctttatgttataagcagcgaatcaagtcgcaagaacgagaaactgaagctactaggggaagggggggactcttgcgcgatcacatccccaggggcaaagaggagctggagtccctgggtgggggcaaaacacccccaggtagatag

SEQ ID NO: 284223 - DNA, 888 bp, Artificial Sequence
  derived and/or modified sequence
atggccagcctgagccggcccagcctgcccagctgcctgtgcagctttctgttgcttcttctcctacaagtgtcctcttcgtacgctggccagttccgagtgatcggacctcggcacccgatccgggcattggttggcgacgaagtggagctgccttgtaggattagccccggaaagaacgcaactgggatggaagtgggctggtatcggcctcccttttccagagtggtgcatttgtataggaatgggaaagaccaggacggggaccaagccccagagtacagaggaagaactgagctgttgaaggacgccattggtgagggaaaggtcacgctgagaattagaaatgtaagattctctgatgagggcggattcacttgtttcttccgcgaccatagctaccaggaggaggccgctatggaactgaaagtcgaagacccgttctattgggtgagtccgggcgtgctggttctcctggccgtgttgccggtattgctgctgcagataaccgtgggccttgttttcctctgtctgcagtatcggttgagaggaaaattgcgcgctgaaattgaaaacctgcatcggacattcgacccacattttttacgggtcccttgttggaaaataactctctttgtcatagtacctgttctggggcccctggtggctcttatcatttgctataactggctgcatagacgcctggccggtcaattcctcgaagagctgcggaagttctcttccctctgttacaagcagcggattaagagtcaggaaagagagactgaagcaaccagaggaagggggggcttgctgcgcgaccatattccacgtgggaaggaagagttggagtccctggggggcgggaaaacccccccagggcgttag

SEQ ID NO: 284224 - DNA, 888 bp, Artificial Sequence
  derived and/or modified sequence
atggccagcctgagccggcccagcctgcccagctgcctgtgcagctttttgctgctgctgctgcttcaggtgtcatcttcttacgccggccagtttcgtgtgatcggtccgaggcatccgatacgggccctggtgggtgatgaggttgaactgccttgcagaatatctccaggcaaaaacgcgaccgggatggaagtgggatggtatcgtcctccttttagcagggtagtccatctttacaggaacggtaaagatcaagatggtgaccaggccccagagtaccgtgggcgtactgagctgctcaaagacgctatcggcgaaggcaaggtgaccctgcgcatcagaaacgtcaggtttagcgatgaaggaggttttacctgcttcttccgggaccacagctatcaggaagaggccgcaatggaattgaaggtggaagacccattttactgggtatccccgggagtacttgtgctgctggctgtgctcccagtactgttactgcagatcacggtcggactcgtgtttctctgcctgcagtacagacttcggggaaaactgcgtgccgagatcgaaaatctgcaccggacattcgatccccatttcctgcgggttccttgttggaaaattacactctttgtgattgtgccggtcctgggacccctggtagctttaattatctgttacaactggctgcataggaggttagctggtcagtttctggaggagctgcggaagttctcctcattgtgctataaacagaggattaagtctcaggaacgggagacagaagccacccgcggccgcggcggcttactgagggatcatatccctcgggggaaggaagaactggagtctctgggaggaggaaaaacccctccaggccgctag

SEQ ID NO: 284225 - DNA, 888 bp, Artificial Sequence
  derived and/or modified sequence
atggccagcctgagccggcccagcctgcccagctgcctgtgcagctttttattattgctgcttctccaagtctcctctagctatgctggacagttcagggtcattggcccccggcatcccatacgtgccctagtaggcgatgaagtcgagctcccttgcaggatctcccctggaaagaacgccaccggcatggaggtcggctggtaccgtccaccctttagtagggttgtccacttatacagaaatggaaaagaccaggatggcgaccaggcccccgaatacaggggccgcacagagctgctaaaagacgcaatcggtgaagggaaagtgaccctgagaatcagaaacgtgagattttctgatgagggtggatttacctgcttctttagggatcactcctaccaagaagaagccgcgatggaactgaaagtggaagatcctttttactgggtgagccccggagttctggtgctgcttgctgtcctgccagtgctcttactgcaaattacggtgggattggtgtttctgtgcctgcaataccggcttcggggtaagctccgtgccgagatcgagaacctacaccgcaccttcgacccccatttcctgagggtgccatgctggaaaattactcttttcgttatcgtaccggtactgggcccattagttgcccttataatctgttacaactggctgcaccggcgtctggccggtcaatttttggaagaattacggaaattctctagcctttgctacaaacagcgcatcaagtctcaggaacgcgagacggaggctacacgtggaaggggcggcctccttagagaccatatcccacgcggcaaggaggagctggagtctttggggggcggaaagactcccccaggaaggtag

SEQ ID NO: 284226 - DNA, 888 bp, Artificial Sequence
  derived and/or modified sequence
atggcaagtctgtcgagaccctccctgccttcatgtctgtgctcatttttgctcctgcttctactgcaagtcagctcatcgtacgcaggacagttccgagtaatcggccctagacatccaattcgtgcactcgtcggcgacgaagtagagctgccctgccgcatttcacctgggaagaatgctactggtatggaggtgggctggtaccgcccacccttcagccgtgtggttcatttatacaggaacgggaaggatcaagacggagaccaggctcccgaatatagggggaggacggagttgttaaaagatgccatcggagaaggaaaggttacattgcggataaggaatgtcaggttcagcgacgaggggggttttacctgcttcttcagagatcattcataccaagaagaagccgctatggagttgaaggtggaagatccgttttactgggtgtcccccggagtgctggtgctccttgccgtcctacctgtgctgctgcttcaaattaccgtgggcttagtttttctgtgccttcagtacaggctgcgcggaaagttacgggctgagatcgagaatctgcaccgtacctttgacccccactttctgagggtgccctgctggaagataaccctgttcgttatcgtgcccgtcttggggccactcgtggcgttgataatctgttataattggctgcatcgacgactggcaggtcagttcttagaggagctccggaaatttagctcgttgtgctacaagcagaggataaagtctcaagaaagagagacagaggcaacacgaggcagagggggactgctccgtgaccatatccctagaggaaaggaggaactggagtcccttgggggtgggaaaaccccccctggcagatag

SEQ ID NO: 284227 - DNA, 888 bp, Artificial Sequence
  derived and/or modified sequence
atggctagtttgtctcgcccaagcctacctagctgtttatgctcgtttctgctgctgcttctgctacaggtctcgagttcttatgctgggcagttccgggtgatcggacccagacacccgatacgtgccctagtgggcgatgaggtagagttgccctgtcggatctccccaggaaagaacgccacgggtatggaggttggatggtaccggcctccctttagcagggtggtccacctgtacaggaatggtaaggaccaggacggtgatcaggccccagaatacagggggcgaactgagcttcttaaagacgcaataggcgaaggcaaggtgacactccgtatccgcaatgtcaggttcagcgacgagggcggatttacctgcttcttcagggatcacagttaccaggaggaagctgccatggaactgaaagtggaggatcccttctactgggtctctcctggggtactcgtgctgcttgctgtcttgcccgttctcctcctccaaatcacagttggccttgtattcctatgcctccaatatcgccttagggggaaacttagagcggagatcgagaatcttcaccgtaccttcgaccctcattttttaagagtgccatgttggaaaatcacactctttgtcattgtccccgtcctagggccacttgtggcactgattatttgctataattggctgcatcgcagactggctggccaatttttggaagaacttcgcaaattctcatctctgtgttataagcaaagaattaaaagtcaggagcgagagactgaggccacccgcggtaggggcggactgctaagagatcacattccacggggtaaggaagagctcgagtcattgggagggggtaaaaccccacccggaaggtag

SEQ ID NO: 284228 - DNA, 888 bp, Artificial Sequence
  derived and/or modified sequence
atggcaagcctttctcgccctagtctgccttcttgcctgtgctcgtttctcctgctgctcctgctgcaggtgtctagctcctacgcaggccagtttcgggtgattggacccaggcatcctattagagcattggtgggagacgaagtggagctgccttgtagaatctcccctggtaaaaacgcaaccggaatggaggtcggctggtatcggccacctttttcccgtgttgtgcatttgtatcgcaacggcaaggaccaggatggggatcaggccccagagtatcgcggacggaccgagctcttaaaggacgccatcggagaagggaaagttacactccgtataaggaacgtgcggtttagtgacgaaggcggtttcacttgcttctttagggaccacagctatcaagaggaagctgccatggagctgaaagtggaggaccccttctactgggtgtcacccggtgttctggttctgcttgctgttctcccggtactcctgcttcagatcaccgttgggctggtctttctttgcctacagtaccgcctccgtggcaaactacgcgctgagattgaaaatctgcaccggaccttcgacccccactttctgcgtgtgccgtgctggaagatcacactgtttgtgatagttccggtgcttgggcctttagtggcactaattatttgctacaattggcttcaccgacgcctcgcgggacaatttctggaagagctacgcaagtttagtagcctgtgctacaaacagcggatcaagagccaggaaagggagactgaagccacgcgaggccgaggcggattactgagagaccacattcccaggggtaaggaggagctcgaatcactcggagggggaaagacacctccgggaagatag

SEQ ID NO: 284229 - DNA, 888 bp, Artificial Sequence
  derived and/or modified sequence
atggcctctctgtcgcgcccttcattaccctcctgcttgtgttcatttttgctcctactgctgctgcaggtgagctcttcgtacgccggacagttcagagtaatcggacccagacaccctatccgtgccttggtcggtgatgaggtggagctgccctgccgtatttcccctgggaagaacgccaccgggatggaggttggctggtacagacctccttttagcagggtggtgcatctgtatcgcaacggaaaggatcaagatggcgatcaggcacccgagtaccgtggcagaacagagctattgaaagatgctatcggcgaaggcaaggttaccctcagaatccgcaatgtccggttctcagacgaaggtggtttcacttgttttttcagggatcacagctatcaagaggaggcagcaatggagttaaaagtggaagatccgttctattgggtgtcgcctggagtcctggtgttgctggcagtgctgccagtgctgctgctccagatcaccgtggggctcgtcttcttatgcttgcagtatcgactgagaggaaagttgagagccgagatagagaacttgcacagaactttcgatcctcatttcctccgggtgccttgctggaagataacactgttcgttatcgtgccagtgctgggtcccctggtcgctctcattatttgctacaactggctgcaccggcgattagccggtcagtttctggaggaattacggaagttctcatcactatgctataaacaacggatcaagagtcaagagagagaaaccgaggccacccgcggacgtgggggattgctgcgcgatcatataccacgagggaaagaagaattagaatcactgggaggcggaaagacaccccctgggaggtag

SEQ ID NO: 284230 - DNA, 888 bp, Artificial Sequence
  derived and/or modified sequence
atggccagtctcagtagaccctcgttaccatcatgtttatgtagtttcctcctcctcctgctgcttcaggtgagctcttcttatgccggtcagtttagagtaatcggccctaggcatccaatacgggctttggtcggagacgaggtggagctgccatgtcggatctcccccggtaaaaatgcaacaggtatggaagtggggtggtaccggcctcccttttcgagggtggtgcacctgtaccggaacggaaaagaccaggatggcgatcaagcccctgaatatcggggaaggaccgaactgctgaaagatgctattggggagggcaaagtgaccttgaggatcaggaatgtgaggttctccgacgaaggaggattcacctgtttctttcgcgaccattcatatcaggaggaggcagcaatggaactgaaggtggaagatcctttctattgggttagtcccggagtgctggtgcttctcgcagttctgcctgtgttactcctgcaaattaccgtgggcttggtgtttctctgcctgcaatataggctccgtggcaaactgcgggcagaaatcgagaacctgcatcggaccttcgaccctcacttcctcagagtgccttgttggaagattaccctattcgtgatcgtgccggtattaggcccactcgttgctcttataatctgttataattggttgcacaggagacttgccggtcagtttctcgaggagctgaggaagttttcctccctctgttacaaacagaggataaagtcacaagagcgtgagaccgaggccactcgaggcaggggtggcttactccgcgaccacatccccaggggcaaagaggagctggagagcctgggcggaggcaagactccccctggccgttag

SEQ ID NO: 284231 - DNA, 888 bp, Artificial Sequence
  derived and/or modified sequence
atggcaagcctgagtaggcctagtctcccgagttgcctgtgcagctttctcttgctcttgctgctgcaggtatcctcaagctacgctggccagttccgagttattggccctcgtcacccaattcgcgctctggtaggcgatgaagtggaactgccatgtaggatttcacctggcaagaatgctaccggcatggaggtgggctggtacaggcccccttttagtcgcgtggtgcatctgtacagaaatgggaaggaccaagacggcgatcaggctccggagtacaggggcaggactgaactgttgaaggacgcaattggggaggggaaagtcacgctgagaattcgtaatgtccgattttctgacgaaggcggattcacctgcttcttcagggatcactcctaccaggaggaggccgctatggaattgaaggttgaggatcctttttattgggtatcaccaggtgttctagtgctcctggcggtactgcccgtgcttctgctgcaaataaccgttggcctcgtctttctctgcctgcaatacagactccgcggaaaactgcgggcagagatcgaaaacttgcaccgtacttttgatccccacttcctcagagtgccctgttggaagattaccttgttcgtgatcgtcccggtgcttggaccactggtagccttaatcatctgctataactggctgcaccgtcgcctcgccggacaattcctcgaggagctgcgcaaattctcatctctctgctacaaacagaggatcaaatcgcaagaacgggaaacagaagccactcgaggcagaggtggactgcttcgggaccacattcccagaggaaaagaggagcttgagtctctgggaggaggcaaaacgcccccaggccgatag

SEQ ID NO: 284232 - DNA, 888 bp, Artificial Sequence
  derived and/or modified sequence
atggccagcctgagcagacccagcctgcccagctgcctgtgcagcttcctgctgctgctgctgctgcaggtgagcagcagctacgccggccagttcagagtgatcggccccagacaccccatcagagccctggtgggcgacgaggtggagctgccctgcagaatcagccccggcaagaacgccaccggcatggaggtgggctggtacagaccccccttcagcagagtggtgcacctgtacagaaacggcaaggaccaggacggcgaccaggcccccgagtacagaggcagaaccgagctgctgaaggacgccatcggcgagggcaaggtgaccctgagaatcagaaacgtgagattcagcgacgagggcggcttcacctgcttcttcagagaccacagctaccaggaggaggccgccatggagctgaaggtggaggaccccttctactgggtgagccccggcgtgctggtgctgctggccgtgctgcccgtgctgctgctgcagatcaccgtgggcctggtgttcctgtgcctgcagtacagactgagaggcaagctgagagccgagatcgagaacctgcacagaaccttcgacccccacttcctgagagtgccctgctggaagatcaccctgttcgtgatcgtgcccgtgctgggccccctggtggccctgatcatctgctacaactggctgcacagaagactggccggccagttcctggaggagctgagaaagttcagcagcctgtgctacaagcagagaatcaagagccaggagagagagaccgaggccaccagaggcagaggcggcctgctgagagaccacatccccagaggcaaggaggagctggagagcctgggcggcggcaagaccccccccggcagatag

SEQ ID NO: 284233 - protein, 345 aa, Artificial Sequence
  derived and/or modified sequence
MLPCFQLLRIGGGRGGDLYTFHPPAGAGCTYRLGHRADLCDVALRPQQEPGLISGIHAELHAEPRGDDWRVSLEDHSSQGTLVNNVRLPRGHRLELSDGDLLTFGPEGSPGTSPSEFYFMFQQVRVKPQDFAAITIPRSRGEARVGAGFRPMLPSQGAPQRPLSTFSPAPKATLILNSIGSLSKLRPQPLTFSPSWGGPKSLPVPAPPGEVGTTPSAPPQRNRRKSVHRVLAELDDESEPPENPPPVLMEPRKKLRVDKAPLTPTGNRRGRPRKYPVSAPMAPPAVGGGEPCAAPCCCLPQEETVAWVQCDGCDVWFHVACVGCSIQAAREADFRCPGCRAGIQT

SEQ ID NO: 284234 - DNA, 1038 bp, Artificial Sequence
  derived and/or modified sequence
atgctgccctgcttccagctgctgagaatcggcggcggcagaggcggcgacctgtacaccttccacccccccgccggcgccggctgcacctacagactgggccacagagccgacctgtgcgacgtggccctgagaccccagcaggagcccggcctgatcagcggcatccacgccgagctgcacgccgagcccagaggcgacgactggagagtgagcctggaggaccacagcagccagggcaccctggtgaacaacgtgagactgcccagaggccacagactggagctgagcgacggcgacctgctgaccttcggccccgagggcccccccggcaccagccccagcgagttctacttcatgttccagcaggtgagagtgaagccccaggacttcgccgccatcaccatccccagaagcagaggcgaggccagagtgggcgccggcttcagacccatgctgcccagccagggcgccccccagagacccctgagcaccttcagccccgcccccaaggccaccctgatcctgaacagcatcggcagcctgagcaagctgagaccccagcccctgaccttcagccccagctggggcggccccaagagcctgcccgtgcccgccccccccggcgaggtgggcaccacccccagcgcccccccccagagaaacagaagaaagagcgtgcacagagtgctggccgagctggacgacgagagcgagccccccgagaaccccccccccgtgctgatggagcccagaaagaagctgagagtggacaaggcccccctgacccccaccggcaacagaagaggcagacccagaaagtaccccgtgagcgcccccatggccccccccgccgtgggcggcggcgagccctgcgccgccccctgctgctgcctgccccaggaggagaccgtggcctgggtgcagtgcgacggctgcgacgtgtggttccacgtggcctgcgtgggctgcagcatccaggccgccagagaggccgacttcagatgccccggctgcagagccggcatccagacctag

SEQ ID NO: 284235 - DNA, 1038 bp, Artificial Sequence
  derived and/or modified sequence
atgctgccctgcttccagctgctgagaatcggcggcggcagaggcggcgacctgtacaccttccacccccccgccggcgccggctgcacctacagactgggccacagagccgacctgtgcgacgtggccctgagaccccagcaggagcccggcctgatcagcggcatccacgccgagctgcacgccgagcccagaggcgacgactggagagtgagcctggaggaccacagcagccagggcaccctggtgaacaacgtgagactgcccagaggccacagactggagctgagcgacggcgacctgctgaccttcggccccgagggcagccccggcaccagccccagcgagttctacttcatgttccagcaggtgagagtgaagccccaggacttcgccgccatcaccatccccagaagcagaggcgaggccagagtgggcgccggcttcagacccatgctgcccagccagggcgccccccagagacccctgagcaccttcagccccgcccccaaggccaccctgatcctgaacagcatcggcagcctgagcaagctgagaccccagcccctgaccttcagccccagctggggcggccccaagagcctgcccgtgcccgccccccccggcgaggtgggcaccacccccagcgcccccccccagagaaacagaagaaagagcgtgcacagagtgctggccgagctggacgacgagagcgagccccccgagaaccccccccccgtgctgatggagcccagaaagaagctgagagtggacaaggcccccctgacccccaccggcaacagaagaggcagacccagaaagtaccccgtgagcgcccccatggccccccccgccgtgggcggcggcgagccctgcgccgccccctgctgctgcctgccccaggaggagaccgtggcctgggtgcagtgcgacggctgcgacgtgtggttccacgtggcctgcgtgggctgcagcatccaggccgccagagaggccgacttcagatgccccggctgcagagccggcatccagacctag

SEQ ID NO: 284236 - DNA, 1038 bp, Artificial Sequence
  derived and/or modified sequence
atgctgccatgcttccaactgctccgcatagggggagggagaggaggggatctgtacacgttccaccctcccgccggcgctgggtgcacgtacaggctgggtcatcgggccgatctctgtgacgtggccttgagaccacagcaagaacctggtttaatctccgggattcatgctgaattgcacgctgagcccagaggggacgattggagggtaagcctcgaggaccactccagccaaggaacactggtgaacaatgttcgattgccccgagggcacaggctggaattaagcgatggcgatctgttgaccttcggaccagaaggaccaccgggtaccagcccctccgaattctacttcatgtttcagcaagtcagagtgaaacctcaggactttgcagctatcacaattccccgctctagaggggaggcgcgggtgggagccgggttcagaccaatgcttccctctcagggcgcgccccagcgcccactgagcacctttagtccggcccctaaagcgaccctgattcttaactcaattgggagcctttcgaagctgaggccgcagccactcactttctccccatcttggggaggccccaagagcctacccgtcccagcgcctcctggggaagttggaaccaccccatctgcgccaccccagaggaacagacgtaagtcagtgcatcgcgtgttggccgagctggacgacgagtccgagccgccagaaaaccctcctccggtcctcatggaaccgcgcaaaaaactacgcgtagataaagcaccactgaccccaactggaaaccgccggggcagacccaggaaatatcccgtctctgcccctatggccccgcccgccgtggggggaggcgagccttgtgccgccccatgttgttgtcttcctcaggaggagaccgtggcctgggtccaatgcgacggatgtgatgtgtggttccacgtcgcttgcgttggttgcagtattcaggccgctagagaagctgatttccgatgccctggctgtagggcagggatccagacatag

SEQ ID NO: 284237 - DNA, 1038 bp, Artificial Sequence
  derived and/or modified sequence
atgcttccgtgctttcagcttctccggattggcggtggacgcgggggcgacttatacactttccatcctccggctggggccggctgcacctaccggttaggccatagagccgatctttgtgatgttgccctgcgcccccagcaggaacccgggcttatctctgggatccacgcggagttgcatgcagagcctcggggcgacgattggagagtgtcccttgaagatcattcctcccaaggaacactggttaacaacgttcgcctcccacggggacatcggctggagctgagtgatggggacctgctgacttttggcccggagggaccaccgggcactagcccctccgaattttacttcatgttccagcaggtcagagtcaaaccccaggacttcgctgcaattactataccaaggtctagaggcgaagctagggtcggagctggattccgcccgatgctcccttcacaaggcgcacctcagcggcccctctccacgttctccccggcccccaaggccactctcattttgaactccataggatctctttcaaaactccgtcctcagccactgacattttccccaagttggggtggtcctaagtcactgccagtgcctgcaccacctggagaagtgggcaccactccctcagcacccccccaaaggaacaggcgtaagtctgtacacagggtgctggcagagttggatgacgagtcagagcccccagaaaaccccccacctgtcctaatggagccgcgtaaaaagttgcgcgtggacaaggcccccctgacccctaccggcaatcgtcggggcagacctaggaaatacccagtgtcagcccccatggccccccctgcagtggggggcggcgaaccgtgcgctgctccttgttgttgtctcccgcaggaagagaccgtcgcctgggttcagtgcgatgggtgcgacgtctggtttcacgtggcctgcgttggttgtagtatccaggccgccagagaagctgatttccggtgtccagggtgccgggcaggcatccaaacctag

SEQ ID NO: 284238 - DNA, 1038 bp, Artificial Sequence
  derived and/or modified sequence
atgctaccttgttttcaacttctgcggatcggcggcggcagagggggtgacctctatacctttcacccaccggcaggagccggatgcacgtaccggcttgggcatcgcgctgacctttgtgatgtggccctaaggcctcagcaagagcctgggctgattagtggcatccacgcagagttgcacgccgagcctagaggggacgactggcgcgtctcattagaagatcactccagccaaggaactttagtcaataatgtaagattgcccagggggcatcgtctcgaactttcagatggcgacctgctaactttcggccctgaaggccctcctggtacgtcacccagcgagttctactttatgttccagcaagtgcgtgtcaaacctcaggacttcgccgccatcacaatcccaaggtctaggggcgaggcccgcgtgggagccggctttcggcccatgctcccatcacaaggggcgccacagcggcctctgtcaacgtttagccccgccccaaaagccactttgatcttaaattctatcggctcacttagtaagttgcgaccccagcctttgacattttctccttcctggggtggacctaaatcgcttcctgtgcctgctccacctggcgaggtgggaactaccccttctgctcccccccaacgcaaccgaagaaagagcgttcatcgagtcctggcagaactagacgacgagagcgaacccccagagaatccgccacccgtgcttatggaaccacggaagaagcttagagtcgataaagctcccctgacccctaccggtaatcgacgggggcgaccacgcaaatacccagtgtcagccccaatggctccaccagctgtgggcggtggagagccttgtgccgcaccatgttgctgtctgccccaggaggagactgtcgcatgggtgcaatgcgacggatgcgatgtttggttccatgtggcttgtgtcgggtgcagcatacaggccgcccgggaggccgactttcgctgcccaggctgtcgagccggaatccagacctag

SEQ ID NO: 284239 - DNA, 1038 bp, Artificial Sequence
  derived and/or modified sequence
atgctgccatgcttccagctgctccgtatcggaggaggacgcggcggtgacttatatacgttccatcctcccgccggagccggctgcacctaccggctaggccatagagcggacttgtgcgatgttgctctgagaccacagcaagaacccggactgatttcaggaatccatgccgagctgcatgctgagcctagaggagatgactggcgtgttagcctcgaagatcacagcagtcagggcacattggttaataatgtgcgcctcccccggggacatagactcgagttaagcgatggcgatctgctcaccttcggcccggagggccctccagggacgagtcccagcgaattctacttcatgtttcagcaggtgcgggtgaaaccacaggattttgctgccattacaattcctaggtctcgtggggaggcgagagtcggggctggatttaggcctatgcttccctcccagggggccccacagcgacctctgagcacattctcgccagcacctaaggctacacttatccttaactctataggaagcctcagcaagctgaggcctcagccccttaccttcagccctagctggggggggcccaaaagtctgccagtccctgctcctcctggagaagtggggacgacacccagcgcacccccccagaggaatcgcaggaagtctgtacaccgggttttagcagaactcgacgacgagagtgaacctcccgaaaatccaccccctgtacttatggaaccgcggaagaagctgagggtggataaggcaccgctgacccccacggggaatagacgcggcagacctaggaaatatcctgtgtctgcccccatggcccctccagccgtcggaggcggagaaccatgtgcagccccctgctgctgtcttccgcaggaagaaactgttgcatgggtgcagtgtgatggctgtgacgtttggttccatgtcgcctgtgtgggatgcagtatacaggcagctcgggaggctgacttcaggtgcccggggtgccgcgctggaatccagacttag

SEQ ID NO: 284240 - DNA, 1038 bp, Artificial Sequence
  derived and/or modified sequence
atgcttccctgcttccagctactgcgaatcggcggcggccgtggcggggatctctatacttttcacccgccagccggagcagggtgcacttaccgactggggcatagggcggatttatgcgacgttgccctccggccccagcaggagccaggtctcatctctggtattcacgcagaattgcatgcagagcctaggggcgacgactggcgggtgtcgctcgaagatcattcatcacagggtaccctggtgaataatgtacggttgccacgcggacaccggctggaactgagcgatggtgatctgttgacttttgggccggagggaccgccagggaccagcccatcagagttttactttatgtttcagcaagtgcgagtgaaaccccaggacttcgccgctattacaattcctcgctcccgaggagaggcaagagtgggggctggtttccgcccaatgctacccagtcagggagcgccgcagcgcccccttagtaccttctcccctgcacccaaggccacgctgattctgaatagcatcggttcgctgtcaaagctgcggccccagccactgaccttctctccgtcctgggggggacccaaaagccttccggtacctgcacctccgggcgaggtcggaactaccccttctgccccgccacagcggaatcgtagaaagtctgtccaccgcgttctggccgagctggacgatgaaagcgagccaccggaaaatccaccacctgtgctgatggagccaagaaaaaagctccgcgtggataaggcgccccttaccccaacgggcaataggagaggcaggcctaggaaatacccagttagcgcaccaatggccccgccagctgtagggggaggagaaccttgtgccgccccgtgctgctgtttaccgcaggaagagaccgttgcttgggtgcaatgcgacggatgcgacgtgtggttccacgtcgcctgcgtcggatgttcaatccaagcagcccgggaagctgattttagatgccctggttgccgggccggcatccagacttag

SEQ ID NO: 284241 - DNA, 1038 bp, Artificial Sequence
  derived and/or modified sequence
atgctcccatgcttccaactccttaggattgggggagggcgcgggggagatctgtatacgtttcatccacctgccggcgccgggtgcacgtatcgtctggggcatcgcgctgacctttgtgacgtggcgctgcggcctcagcaagagccgggccttattagcgggattcatgccgagcttcacgccgagccgaggggggacgactggcgggtgagtttagaggatcactctagtcagggcacactggtgaataatgttcgattacctcgcggacaccgcctggaactgtctgacggcgacttgctcacatttggaccagaggggagcccgggcactagtccttccgaattctattttatgtttcaacaagtaagggtgaagccgcaggattttgcagccatcactatccctaggtctagaggagaagcccgagtcggcgctggttttcgccctatgctgccctcccaaggcgctccacaaaggccgctgtcaactttctcacccgcccctaaggccacactgatcctgaacagcatcggctccctttccaaattgcgcccacagcctctgacgttttcaccgtcctggggtggtccaaagagcctgccggtgccagctcctcccggtgaggtggggacaactccatctgccccccctcagcgcaatcgtaggaagagtgtccaccgagtgctggcggagctggatgatgagagcgagcctcctgaaaacccacctcctgttctcatggagcctcgcaaaaaattgagagttgacaaggctccgctgacacccaccgggaataggcgaggtcgcccaaggaaataccccgtcagtgctccaatggcgcctccagcagtagggggcggtgaaccgtgtgcggccccttgctgctgtctgccgcaagaggaaaccgttgcttgggtacagtgcgatggctgtgacgtttggttccatgtggcttgtgtgggttgttccatccaggcagctagggaagccgacttccgctgtcccggatgtagagctggcatccaaacctag

SEQ ID NO: 284242 - DNA, 1038 bp, Artificial Sequence
  derived and/or modified sequence
atgctgccctgtttccaactcctgcgaataggtgggggcaggggcggggacctgtatacctttcatccacctgcgggggccgggtgtacctatcgcttgggtcacagggctgatctgtgcgacgtagctctgcgaccccaacaggaacctggccttatatccggtattcacgccgagctgcatgctgagccgagaggggatgactggagagtaagcctggaggatcattcctctcagggtacccttgtcaataacgtgagactgccaaggggacacaggctcgagctgtcagacggcgatctcctcaccttcggacccgaaggcccgccagggacatctccaagtgagttttattttatgtttcagcaggtgcgggtgaaaccacaagattttgcagccatcactattccacgcagtaggggcgaagcacgggtgggggcgggatttaggcctatgctgccctctcagggagcgccccagcgccctctgtcaaccttctcacctgcccctaaggcaacccttatcttaaactccattggcagcctgagcaagttgagaccccagcctctcacattcagtcctagttggggtggccctaaaagtctaccggtgcctgcaccccctggagaggtcggcacaacaccctccgctcctccccaaagaaaccgtcggaaatccgtccaccgggttctggcagaattggacgatgagtcggaaccccccgagaaccccccaccagtgctgatggagcctcgcaagaagctgcgcgtggacaaagcgccactcacccccacgggaaacagacgcgggcggcctagaaagtaccccgtatccgctccaatggcaccgcccgccgtcggcggaggagaaccatgcgccgcaccctgttgttgtttgccccaggaggaaactgttgcctgggtacagtgtgatgggtgtgatgtgtggttccatgttgcttgtgttggctgctccatccaggccgcccgtgaagccgacttcaggtgtcccggatgtcgcgcagggattcagacttag

SEQ ID NO: 284243 - DNA, 1038 bp, Artificial Sequence
  derived and/or modified sequence
atgctcccctgttttcagctgctgcggattggtggtggtcgagggggggacctctacacattccacccccccgccggcgccggctgcacatataggttgggtcatagagcagatctctgtgacgttgcactgagacctcagcaagaaccaggcttaatctccggcattcacgccgagcttcatgctgaaccgagaggggatgactggagagtctcactcgaggaccactcctcacagggaacactcgtcaacaacgtcagactgcctaggggccatcgtctggagttatcagacggcgaccttctgactttcggacccgaaggccccccaggaacaagcccaagcgagttctatttcatgtttcaacaggtgagggtcaaaccccaggattttgcagcgatcaccatcccccgctctcgtggggaggcccgggttggcgccggctttagaccaatgctgccctcccagggggccccccagcggccgttgtccacatttagccctgctcccaaagccacgctgatactcaattccatagggtccttgagtaaactgcgccctcaacccctcacttttagccccagttggggtggacccaagagcctgcccgtgcctgcccctcctggagaggtcggaacgacacctagtgcccctccgcaacggaatagaaggaagagcgtgcacagagtgctcgctgaactggatgacgaatccgagccacctgaaaacccacccccagtgctcatggagcccagaaaaaagcttagggtcgacaaggccccacttacacctacagggaataggcggggccgtcccaggaaatacccggtgtccgccccgatggcaccgcctgctgtgggcggcggtgagccctgtgcagccccttgctgctgccttccccaagaagaaactgtggcttgggttcagtgtgacggctgcgatgtgtggttccacgttgcctgtgtgggctgttctattcaggccgcccgcgaggctgatttccgctgccctggctgccgggctggcattcaaacatag

SEQ ID NO: 284244 - DNA, 1038 bp, Artificial Sequence
  derived and/or modified sequence
atgctgccatgttttcaactgttgcgcataggaggcgggcgcgggggagatctgtatacgtttcatccccccgctggcgctggctgtacgtataggctgggacatcgcgctgacttgtgtgatgtagcccttaggccccaacaggagccaggcctgatcagcggcatccacgccgaactgcacgcggaacccaggggcgacgactggcgagtgagtctggaagaccattcctcccagggcacattggtaaataatgtgagactcccaagaggacacagattagaactgagcgacggggacctgctgactttcggaccagagggtccccctggtacctctccttcagagttttatttcatgtttcagcaggttcgcgtgaaaccacaggacttcgccgccataaccatccctagaagccggggagaagcgagagtgggggctgggtttagacctatgctgccctcccaaggtgctcctcagcggcctttgtcaaccttcagtccagcgcctaaggctactcttatcctgaattccattgggtcactaagcaaattgcggccacagcccctgaccttctcacctagctggggcggacccaaatccttgcctgttccagcccccccaggagaggtagggaccactccatccgcaccaccccagcgcaatcggaggaaatcggtgcaccgtgtgctcgctgagctggacgatgagtcagagcctcccgaaaatcctcctcctgtattgatggagccgcggaaaaaactgcgcgtggacaaagcccctctgactcccaccggaaatagacgaggcaggccgcggaagtatcccgtatccgctcccatggcgcccccagccgtggggggaggggaaccctgcgccgcaccttgctgctgtttaccacaggaagagactgtggcatgggtgcagtgcgacggttgcgatgtgtggttccacgttgcatgcgtgggctgcagtattcaagcagccagggaagctgactttcgctgcccagggtgtagggctggcatccaaacgtag

SEQ ID NO: 284245 - DNA, 1038 bp, Artificial Sequence
  derived and/or modified sequence
atgctcccatgcttccagctgttgcgaattggaggtgggcgcggcggggatctttacacttttcaccctcccgcgggagccggatgcacctatcgactcggccacagagccgatctctgcgatgtggctctgcgacctcagcaagaacccgggctcatcagcggcattcatgcggagctgcatgccgagcccaggggtgatgactggagggtctctttggaggaccattcaagccagggcacactcgtcaataatgtgcgcttgcctaggggacaccggcttgagctaagtgacggtgacctgcttacatttggccccgagggtcccccaggtacctccccttcagagttttacttcatgtttcaacaagtgcgggtcaaaccacaagatttcgcagccatcacgattccgaggagtaggggggaggctcgcgtcggggctggtttcagaccaatgctaccatcccagggagcgccccagcggcctctgagcacatttagccccgctccaaaagcaacacttattctgaattccattgggagcctatccaaacttaggccacagcccctcacgttcagtccttcttgggggggccccaaaagcctgccggtgcccgcccccccaggagaagtgggaactacaccaagtgcccccccccagcgcaatagaagaaaatcagtacaccgtgtactcgcagagctcgacgatgaatccgagccaccagaaaaccctccacctgtcctgatggagccccgcaaaaaactcagagtggataaggcgccactgaccccgaccgggaatcgacgcggcagaccgcggaaatacccagtgtccgccccaatggcacccccagcggtagggggtggagagccctgtgctgccccctgttgctgcctgcctcaggaagaaacagttgcctgggttcagtgtgacgggtgcgacgtctggttccacgttgcgtgcgttggatgcagcattcaggctgccagggaggccgattttaggtgcccaggttgccgcgcgggcatccagacctag

SEQ ID NO: 284246 - DNA, 1038 bp, Artificial Sequence
  derived and/or modified sequence
atgctgccttgttttcaactccttaggatcggaggaggaagagggggagatctgtacacttttcaccctcccgcaggagcagggtgtacttatcggttgggccaccgggcggacctgtgtgatgtggctctgagaccacagcaagaacccggtttgattagcggcatacacgccgagttgcacgctgaaccaaggggagacgactggcgcgtaagtctggaggaccactcttcacaagggacactggtaaataatgtgcggctgccacgcgggcatcgactggagctgtccgacggggatcttctgacttttggtcccgagggccccccaggcacctccccaagcgagttttatttcatgttccagcaagttcgggtcaagcctcaggacttcgccgccataactatccctaggtctcgcggcgaggcgagggtcggtgcagggttccgccctatgctgccgagccaaggggcgcctcagagacccttgtctacgttctcccccgcacccaaagctactctgatcttgaacagtataggatctctgtccaagctgaggccccagcctctgactttttctcctagttggggaggccccaagtccctgcccgtgcctgcgcctccaggcgaagtcggaaccaccccaagcgccccaccacagcgcaataggcgcaagtctgtgcaccgagtgctggcggagctcgacgacgaaagtgagccacccgagaatccccctcccgttcttatggaacctagaaaaaagctacgcgtggacaaagctcctctgaccccaacagggaaccgacgtggacgtcctaggaagtaccctgtgtctgcacctatggctccccctgcagtggggggaggggagccgtgtgcggccccttgttgttgtctgccccaggaagaaacagtcgcctgggtgcaatgcgatggctgtgacgtgtggtttcacgtggcttgtgttggttgtagtatccaggcagccagggaggcagacttccggtgtcccggatgtagagcaggtatccagacctag

SEQ ID NO: 284247 - DNA, 1038 bp, Artificial Sequence
  derived and/or modified sequence
atgctgccttgcttccaactcctgaggataggcggaggccgtggaggggatctatatacgtttcacccccccgccggggcaggatgtacctatagattggggcaccgcgccgacctgtgcgacgtcgccctgcgaccgcaacaggaacccggtctcatttccgggattcacgctgagctgcatgctgagccgcgcggcgatgattggcgagttagccttgaggatcattcaagccaggggacattagtgaacaatgtccgtttgcctcgtggccaccggctggaactgtcagacggagacttgctcacattcggcccagaaggatctcccggcacctcaccctctgaattctactttatgttccaacaggtgcgcgtgaagccacaggattttgcggccatcaccatacctagatctcgtggggaggctcgcgtcggggccggctttcgtccaatgttgccaagtcaaggagcaccccaaagacctctgtctaccttcagccctgcccccaaagccacactgatcctgaatagtatcggctctttgtctaagctgcgcccccagcctttaaccttctcgcctagctggggtggacccaaaagtctgcccgtgccagcaccgcctggtgaagttggtactacaccctcagctcctcctcagcgcaatagaagaaagagtgtgcaccgagtgcttgccgagctagatgatgagtctgagccgcccgaaaaccccccaccagtattgatggaacctaggaaaaagttgagagtagataaagcacctctgacccccactggcaaccgacgagggcgaccgcgcaaatatcccgtttctgccccaatggctccgcctgctgttggaggcggcgagccatgtgccgccccatgctgctgcctgcctcaggaagagacagtggcctgggttcagtgcgacggatgcgacgtgtggtttcatgtggcctgtgttggatgctcaatccaggcagcaagagaagctgatttccgttgtcccggctgtcgtgccgggatccagacctag

SEQ ID NO: 284248 - DNA, 1038 bp, Artificial Sequence
  derived and/or modified sequence
atgctgccctgcttccagctgctgcgcatcggcggcggccggggcggggacctgtacaccttccaccccccagctggagctggctgcacctaccgcctgggccacagagctgacctgtgtgatgtggccctgcggccccagcaggagcccggcctcatcagcggcatccacgccgagctgcacgccgagcccagaggagatgactggagggtgtccctggaggaccacagcagccagggcaccctggtgaacaacgtgcggctgccccggggccaccggctggagctgagtgatggagacctgctgaccttcggccctgagggccccccaggcaccagccccagcgagttctacttcatgttccagcaggtgcgggtgaagccccaggactttgctgccatcaccatccccaggagcagaggagaggcccgggtgggcgccggcttccggcccatgctgcccagccagggcgccccccagaggcccctgagcaccttcagccctgcccccaaggccaccctcatcctgaacagcatcggcagcctgagcaagctgcggccccagcccctgaccttcagccccagctggggcggccccaagagcctgcctgtgcctgcccctcctggagaggtgggcaccacccccagcgccccaccccagaggaacagaaggaagtctgtgcaccgggtgctggccgagctggatgatgagagcgagcccccagagaaccccccacctgtgctgatggagcccaggaagaagctgcgggtggacaaggcccccctgacccccactggaaacagaagaggccggcccaggaagtaccctgtgtctgcccccatggcccctcctgctgtgggcggcggggagccctgtgccgccccctgctgctgcctgccccaggaggagaccgtggcctgggtgcagtgtgatggctgtgatgtgtggttccacgtggcctgtgtgggctgcagcatccaggccgcccgggaggccgacttccgctgccccggctgcagagctggcatccagacctag

SEQ ID NO: 284249 - DNA, 1038 bp, Artificial Sequence
  derived and/or modified sequence
atgctgccctgcttccagctgctgcgcatcggcggcggccggggcggggacctgtacaccttccaccccccagctggagctggctgcacctaccgcctgggccacagagctgacctgtgtgatgtggccctgcggccccagcaggagcccggcctcatcagcggcatccacgccgagctgcacgccgagcccagaggagatgactggagggtgtccctggaggaccacagcagccagggcaccctggtgaacaacgtgcggctgccccggggccaccggctggagctgagtgatggagacctgctgaccttcggccctgagggcagccctggcaccagccccagcgagttctacttcatgttccagcaggtgcgggtgaagccccaggactttgctgccatcaccatccccaggagcagaggagaggcccgggtgggcgccggcttccggcccatgctgcccagccagggcgccccccagaggcccctgagcaccttcagccctgcccccaaggccaccctcatcctgaacagcatcggcagcctgagcaagctgcggccccagcccctgaccttcagccccagctggggcggccccaagagcctgcctgtgcctgcccctcctggagaggtgggcaccacccccagcgccccaccccagaggaacagaaggaagtctgtgcaccgggtgctggccgagctggatgatgagagcgagcccccagagaaccccccacctgtgctgatggagcccaggaagaagctgcgggtggacaaggcccccctgacccccactggaaacagaagaggccggcccaggaagtaccctgtgtctgcccccatggcccctcctgctgtgggcggcggggagccctgtgccgccccctgctgctgcctgccccaggaggagaccgtggcctgggtgcagtgtgatggctgtgatgtgtggttccacgtggcctgtgtgggctgcagcatccaggccgcccgggaggccgacttccgctgccccggctgcagagctggcatccagacctag

SEQ ID NO: 284250 - DNA, 1038 bp, Artificial Sequence
  derived and/or modified sequence
atgctgccctgcttccagctgctgcggatcggcggcggccggggcggcgacttgtacacgtttcatcctcctgccggggcgggttgcacatataggcttgggcaccgagcagatctgtgtgacgttgccttaaggccacagcaggagcccggcctgatcagtggtatccatgcagagcttcacgctgagccccgcggcgatgactggagagtgtccctggaggatcactcatcccaggggaccttggtgaacaatgtgcggcttcctaggggacatagactcgagttgagtgatggggacctgttaacgttcgggcccgagggccctccggggacaagcccctcggaattctattttatgttccagcaggtgagagtcaaaccacaggactttgcagcgattacaattcccagatcccggggcgaagccagagtgggcgccggctttcgaccaatgctccccagtcaaggcgctccccaaagacccctcagtactttttcccccgcaccaaaggcaaccctgattctgaactctataggcagcctgtctaaattgaggccccaacctctcacctttagcccaagctggggcgggcctaaatcactgcctgtgccagccccacccggagaggtcggtacaacaccctcagccccaccccaaaggaatcggcggaagtctgtacaccgggttctagctgagttagatgacgagtccgaacctcccgagaaccctcctcctgttctgatggaacctaggaaaaaactgcgagtagacaaggccccactcactccgactgggaaccgaagaggcagaccgcgaaaatatcctgtgtctgcccctatggcacctcccgctgttggcggaggcgagccttgcgcagcaccttgctgttgcctcccacaagaggaaaccgtggcttgggtacagtgcgacggatgcgacgtgtggttccatgtcgcatgtgtgggctgctcaatacaagctgcccgagaagccgacttcagatgtccaggatgccgggctgggatccagacctag

SEQ ID NO: 284251 - DNA, 1038 bp, Artificial Sequence
  derived and/or modified sequence
atgctgccctgcttccagctgctgcggatcggcggcggccggggcggtgacctgtatacttttcatccaccagccggcgctggctgcacctatcgccttggtcatcgcgcagatctatgcgatgtggcacttcgcccacaacaggaacccggccttatctcagggatccacgcagagttacacgccgagccacgcggcgacgattggagagtgtcactggaggatcattctagccagggaacccttgtgaataatgtgaggctgccgaggggtcatcgtctggagctttctgatggcgacttactgacatttggtcccgagggacccccgggaacatcacccagcgaattctatttcatgtttcagcaggtgcgcgttaaaccccaggattttgctgccattaccatcccacgcagtagaggcgaggctagggtgggagctggcttcagacctatgcttccgtcacaaggggcaccccaacgccccttgagcaccttttcacctgctcccaaggcaacactaatcctgaactctatcggttccctttccaaactgcgaccacagcctctgacttttagtccctcttggggcggccccaagtcactgcctgttcccgcaccccctggcgaagtcggcacaactcctagtgcgccaccacagaggaaccgccggaaatctgtgcatcgggtcctcgcagaactggacgacgaaagcgaacccccggagaatcccccacccgtactgatggagcctcggaaaaagctccgcgtggataaggccccactcacccccaccggaaaccggcgaggacgccctcgtaaataccctgtgtctgcccccatggctcctcctgcggtgggggggggcgagccatgtgcagccccctgctgctgcctgccacaagaggaaaccgtcgcctgggtacagtgtgatgggtgtgatgtttggttccacgttgcctgcgtggggtgctcaattcaggctgccagagaagcagatttccgttgccccggttgccgcgcaggcatccaaacctag

SEQ ID NO: 284252 - DNA, 1038 bp, Artificial Sequence
  derived and/or modified sequence
atgctgccctgcttccagctgctgcggatcggcggcggccggggcggagacctctacacatttcatcccccagctggagccggttgtacctaccgcctgggtcatcgggctgacttgtgcgacgtggccttacgcccacaacaagaacctggactcatcagcggtattcatgcagagttgcatgccgaacctcgcggggatgattggcgtgtgtccctggaggatcacagtagtcaaggcacgctcgtgaataatgtgaggctgccacgtggccaccggttggaactatctgatggcgacctcctaacctttggtcccgagggcccgccaggcaccagtccctcggagttctactttatgttccagcaggtgcgcgtgaagcctcaggattttgctgcgataacaatccctagatcccgaggcgaggcgcgcgttggcgctggtttcaggcctatgctcccttcccagggagctcctcagaggcccctctctacctttagtcccgccccaaaggctaccctcatcctcaactccatagggtcgctgagcaagctacggccgcagcctctgactttcagtccttcttggggagggcctaagtcacttccagtgcccgccccgcccggagaggtgggcaccaccccctctgctccaccccaaaggaatagacgaaaaagtgtgcatagagtgttggctgagctggatgacgaaagtgaaccacccgaaaaccccccccctgtcttgatggagccgcggaaaaagctcagagtggataaggccccgctgaccccaacgggcaacagaaggggacgacctcggaaatatcccgtctccgcgcctatggcacctcccgccgtgggcggaggtgagccctgtgccgctccttgctgctgtctacctcaggaagagacggtggcatgggttcagtgtgatggctgtgacgtatggttccatgtggcctgtgtcgggtgttctatacaagcagccagagaggccgactttcggtgtcctggctgcagagcaggcatccagacctag

SEQ ID NO: 284253 - DNA, 1038 bp, Artificial Sequence
  derived and/or modified sequence
atgctgccctgcttccagctgctgcggatcggcggcggccggggcggcgacctgtacacctttcatccccctgccggcgcgggctgcacgtataggctggggcacagggccgatttatgtgacgttgcgctgcgtccacagcaggaaccaggcctgatcagtgggattcatgctgaattacacgccgagcccaggggagatgattggcgcgtgtctctggaagatcatagcagtcagggaacactggtgaacaatgtccgcctgcccagagggcatagactcgagctctccgatggagatttgctgacctttggtcctgagggcccgcctgggaccagtccttccgagttctactttatgtttcagcaggtgcgcgtaaagccgcaggatttcgccgctattaccataccccgttccaggggtgaggccagggttggcgcaggcttcaggccaatgctgccatcccagggggcacctcaacgcccgctctctactttcagcccagccccaaaagcaactttaattctcaatagcataggatcattgtccaagctgcggccccagccgctgacctttagcccttcatggggtggccccaaaagtttgccggtgccagctccaccaggtgaagtcggcactacccctagtgcccctcctcagaggaatcggagaaagagcgtgcaccgggtcctggccgagctagatgatgagtcggagcctccagagaacccgccaccagttctgatggagcccagaaagaagctcagggtggacaaggccccactgacacccaccggcaaccgccggggacggccgcggaagtatcccgtgtccgccccaatggccccccccgctgtgggagggggcgagccctgtgcagcaccatgctgttgcctccctcaagaggagaccgttgcgtgggtgcagtgtgatggatgtgatgtgtggtttcacgtcgcgtgcgtaggctgctcaatccaggctgcccgggaggccgattttcgttgccctggctgcagagcaggaatccaaacttag

SEQ ID NO: 284254 - DNA, 1038 bp, Artificial Sequence
  derived and/or modified sequence
atgctgccctgcttccagctgctgcggatcggcggcggccggggcggggacctctatacttttcaccctcccgcgggtgcaggatgcacataccgcctgggacatcgcgcagacctgtgcgacgtggccttgcgcccccaacaggaacctgggctgatcagtggtatccacgccgagctgcatgcagaaccccgtggcgacgattggagagtatcgctggaagatcattcttctcaaggtaccttagtcaacaatgtccgcttgccgaggggccaccgtttagagctatctgacggcgatctgctcacattcgggccagagggacccccaggaacatcccccagtgagttctactttatgtttcagcaggtgagagtcaaaccacaggatttcgccgccattacaatacctcgcagccgcggcgaagcaagggtgggcgcaggatttcggccgatgctgccttctcagggtgctccccaaaggcctctctccactttctcaccagcacccaaggcgaccctcatcctcaactctataggtagcctaagtaagctgcggccccaaccactgacattttcacctagctgggggggaccgaagtctctgcctgtccctgcgcctccaggcgaagttggaaccactccgtcggcaccaccgcagaggaatcgacgcaagtcagttcatcgggtcctggctgaactggacgatgaatccgagccaccagagaatcctcctcctgtgttgatggagcctagaaaaaagctgagagtcgacaaggcgccccttacgccaaccggcaacagacgtggcaggcctcgcaagtatcctgtgtctgcacccatggccccaccagctgtcggcgggggcgagccatgtgcagcaccctgttgctgtcttccccaggaggaaactgtggcatgggtccagtgcgatggttgtgatgtgtggtttcacgtcgcttgtgtggggtgttctatacaggcggcccgggaggcagacttcaggtgtcccggttgtcgagccggcatccagacctag

SEQ ID NO: 284255 - DNA, 1038 bp, Artificial Sequence
  derived and/or modified sequence
atgctgccctgcttccagctgctgcggatcggcggcggccggggcggggacctttacacatttcaccccccagccggagctggttgtacgtatcgtctggggcacagggctgatctctgcgatgtcgccttgcgcccccagcaggaacccggactgatttccggaattcacgccgagcttcatgcagaaccacgaggggatgactggagggtttcactggaagatcacagcagccaggggactcttgtgaacaacgtgcgcctgcctaggggacatagacttgagctctctgacggcgatctgctaacctttggccccgagggctccccgggtacctctcccagcgagttctactttatgtttcagcaagtgcgggtgaagccacaggatttcgcagccattacaattcccagatctagaggagaggctcgcgtgggtgctgggttcagacctatgctgccatcccagggagcgccccagcgacctctgagcacatttagtccagcacctaaggctacactgattcttaactcgattggctcgctgagtaagttgcgaccacagcctctgactttttctccatcttgggggggccctaagtccctccccgtgccggccccgccaggcgaggtaggcaccactccctccgcaccgccccagcgaaatcgaagaaaaagcgtgcatagagttctggccgaactggatgacgagtcggagcctcctgagaaccctccgccggttctgatggagcctcggaagaagctccgtgtagacaaggcacctcttacccccacaggcaatagacgtggaaggcctaggaagtatccagtgtccgcccctatggctccacccgctgttggtggcggcgagccctgtgccgccccttgctgctgtttgcctcaggaggagactgttgcctgggtccaatgcgatgggtgtgacgtttggtttcacgttgcgtgcgtgggatgtagcatacaggcagctcgggaggcagacttccggtgtccaggctgtagggcaggtatacaaacctag

SEQ ID NO: 284256 - DNA, 1038 bp, Artificial Sequence
  derived and/or modified sequence
atgctgccctgcttccagctgctgcggatcggcggcggccggggcggtgatctgtatactttccatccaccagcaggcgctggctgcacttaccgcctcggacatagagctgacctttgcgatgtcgcactccgcccccagcaggaaccgggcctcatcagtggcatccatgcagagcttcatgcggaacctaggggggacgactggcgtgtgtctctcgaggaccactcctcacagggcaccctggtcaacaacgtgagactacctcgaggtcatagattagagctgtcggatggcgacctattgacattcggccccgagggcccccctgggacatctccttccgaattctacttcatgtttcagcaggtccgagtgaagccacaagatttcgccgctataaccattcctagatctcgcggcgaagcgcgggttggcgccggatttcgacctatgctgccctctcaaggagctcctcagaggcccctgtccactttttctccagcgcccaaggctacgctgatccttaacagcatcggctccctttccaagctacggcctcagccgcttacattcagccctagctggggagggcctaagtcactgccagttcccgcaccaccgggagaagtggggacaaccccttctgcccctcctcagaggaaccggcgaaaaagcgtacaccgcgttttggctgaattagacgacgagtcagagcccccagagaatcctccccccgtcttgatggagccccgaaagaagctgagggtggataaggcccccctcacccccacggggaaccggcggggacgccctaggaaatacccggtctccgcccctatggcacctccagccgtgggtggaggtgagccatgtgccgcgccatgttgctgtctcccccaggaggaaaccgtggcctgggtgcaatgcgacgggtgcgacgtgtggttccatgttgcctgtgtgggctgctctattcaggccgctagagaggcagacttccgctgtcctgggtgtagagctgggatccagacttag

SEQ ID NO: 284257 - DNA, 1038 bp, Artificial Sequence
  derived and/or modified sequence
atgctgccctgcttccagctgctgcggatcggcggcggccggggcggagatctgtatacctttcacccaccggccggtgctggatgtacctatcgactgggccatcgtgcagatttgtgcgatgtggccctccgcccacagcaagaacccggcctcatttccggaatacacgccgagcttcacgccgaacccagaggcgacgattggagggtgtcgctggaggatcacagctcccaggggactctggttaataacgtcagactgccacgcggccacaggcttgagctcagtgatggcgacttgctgacattcggtccagaaggaccccctggcaccagccctagcgaattttattttatgttccagcaggtcagggtgaagccccaggacttcgcagccattaccatccccagaagccgtggtgaagctagagtgggcgcaggttttcgacctatgctgccctctcagggggctcctcagagaccactctccactttctcacctgctccaaaagccaccctgattctcaatagcatcggctccctgagcaaactgagacctcagcctctgacattctccccttcatggggcggtcctaagagtcttcctgttcctgcccctccgggagaggtggggacgacaccatctgctccccctcagcggaaccggcgcaaaagcgtacatcgcgtgctggcagagcttgacgatgaatccgaaccccccgagaatccgcctccagtgctgatggaacctcggaaaaagctgcgcgtggacaaggcacctctcaccccaacagggaacaggagaggacgccctcgcaaatatcctgtgtctgccccaatggcccccccagcagtcggaggcggggagccctgtgctgcgccatgctgttgtttgccccaggaggaaacggtggcttgggtccagtgtgatggctgcgatgtgtggtttcacgtggcctgtgtgggatgttcaattcaagccgcaagggaagccgacttcagatgcccaggctgccgcgcaggcattcagacctag

SEQ ID NO: 284258 - DNA, 1038 bp, Artificial Sequence
  derived and/or modified sequence
atgctgccctgcttccagctgctgcggatcggcggcggccggggcggtgatttgtacactttccatccacccgccggcgcaggatgtacatatcggctgggccatagagccgatctctgtgatgttgccctgcggccccagcaggagcctggcctgatctccggtatccacgctgagctccatgctgagccaagaggggatgactggagggtctccctggaggatcactcatcccaggggacattggttaataacgtgaggttgcctcgcgggcacagactggagctgtccgatggtgatctcctgacctttggccctgagggacctccaggtacttccccctcagagttctattttatgttccagcaagtcagggttaaaccccaggatttcgctgcaataacaattcccagaagtcggggagaggcgagggtcggggcaggctttcggccgatgctgcccagtcaaggagctccccagcgcccactcagcacattttccccagctccgaaggctaccctgatcttgaattccatcggctctttgagtaaattacgaccccagcctctgacctttagcccgtcctggggagggccgaagtctctgcccgttcccgccccaccaggcgaagtaggaacaaccccttctgcacccccccagaggaaccgtcggaaatcagttcatagggtgctagcagaactggacgacgagagcgaacctcctgagaacccgccgccagtactgatggagcccagaaaaaaattaagagtcgacaaggcaccgctgaccccgaccggcaatagacggggccgccctagaaagtacccagtgagtgcccctatggccccaccagccgtaggaggcggggagccctgcgctgccccttgttgctgtcttccccaggaggagactgtggcctgggtgcagtgcgacggctgcgatgtgtggtttcatgttgcttgtgtcggctgctctattcaagccgcccgggaagccgatttccgctgtcctggttgtagggctggcatccagacttag

SEQ ID NO: 284259 - DNA, 1038 bp, Artificial Sequence
  derived and/or modified sequence
atgctgccctgcttccagctgctgcggatcggcggcggccggggcggggacctatacaccttccatccccccgccggggcgggatgtacctacagacttgggcatcgagcagacttgtgtgatgtagcactgcgtccacaacaggagcctggtctcatctctggaatacatgccgagctgcacgccgagccccgcggagatgactggcgagtgagccttgaggatcattccagtcaaggcaccctcgtgaacaatgtgcggctcccacggggacatcgactcgaactgtcagacggagatcttttgactttcgggccagaggggccaccaggtacaagtccaagtgagttctacttcatgtttcagcaggtgagggtgaagccgcaggactttgcagcaatcactattccaagatcacgcggagaagcccgggtcggcgcagggtttcggccaatgctgccaagccaaggagccccccagcgaccattgagcacatttagccctgcccctaaggcaacactgatcctgaactcaatcggtagtttatccaaacttagaccccagcccctgactttttctccctcttggggcggcccaaaatccctgccagtccccgccccgcctggtgaggtgggcacaactccttctgctcccccccagaggaataggaggaaatctgtgcaccgtgtactcgctgaactcgatgacgagtctgaacctcccgaaaaccctcctcctgttctgatggagcctcgcaagaaattaagggtggacaaggcaccactgaccccaactggcaaccgcagggggcgcccgcgcaagtacccagtgtccgccccaatggcaccccctgcagtgggaggaggggagccatgcgctgccccttgctgttgtctgccccaggaggagacagttgcatgggtgcaatgtgacggttgcgacgtctggtttcacgtggcttgcgtggggtgcagcatccaggcagctcgtgaggccgatttccgctgccccgggtgtcgcgccggcattcagacctag

SEQ ID NO: 284260 - DNA, 1038 bp, Artificial Sequence
  derived and/or modified sequence
atgctgccctgcttccagctgctgcggatcggcggcggccggggcggcgacctgtacacctttcacccgccagcgggcgccggctgtacgtacaggctgggacaccgcgcagacctgtgtgacgtagctctaagaccacagcaggagccaggacttatctccggaatccatgccgagctgcatgccgagccccgcggagacgattggagggtcagcctggaagaccacagctctcaaggaacattagttaacaatgtgcgcctgcccagggggcaccgactagaactttcagatggagacctactcacgtttggtcctgaaggtcctccgggaacttcaccaagtgaattttattttatgtttcagcaggtcagagtcaaaccccaagatttcgcagccatcaccatcccccggagccgaggtgaggccagagtcggcgcaggctttagacccatgctgccttcccagggggctccccaacggcccctgtctactttctcaccggcacctaaagccacgctaattcttaactccattggatccctcagtaaactaagaccacagcctctaactttttccccctcatggggtggccccaagtctctgccagtacccgctccccctggcgaggttgggactacccctagcgccccgccacagcggaacaggagaaagtctgtacatagggtattggcagagctggatgatgagagtgaaccccctgaaaatcctcctccagtcctgatggagcctaggaaaaagcttcgcgtggacaaggcccctctgacgccaactgggaaccgaagggggaggcctcggaagtatcccgtctcagctcccatggctccccccgccgtgggaggcggggaaccatgtgccgcaccctgctgctgtttgccacaggaggagacagtagcatgggtgcaatgtgacggctgtgatgtgtggttccatgtggcttgtgtgggctgctcgatacaagctgcccgcgaggcagacttcaggtgccccgggtgcagagccggaatacagacctag

SEQ ID NO: 284261 - DNA, 1038 bp, Artificial Sequence
  derived and/or modified sequence
atgctgccctgcttccagctgctgcggatcggcggcggccggggcggagatttgtatacctttcatccacctgccggggcgggttgcacataccggcttggacaccgggccgacctgtgcgacgtggcactgagaccacaacaggagcccggcttgatttccggtattcacgccgaactccatgctgaacctcgtggggacgattggagggtcagtctagaggatcactcttctcaggggaccctggtcaataatgtccgcttaccccggggtcatagacttgagttgagtgacggcgatttgcttacattcggaccagaaggctccccagggacatcgccatccgagttctacttcatgttccagcaggtgcgcgttaaaccccaggacttcgcagcaattacaataccgagaagtaggggagaggctcgggtgggagctggcttcaggcctatgcttcctagccagggcgccccccagcgacccctgtcgacattctctcccgcccctaaagcaacattgatcctgaatagcattgggtccctcagcaagctgcgccctcaacctttgacattttctccttcatggggcggcccgaaaagcttgccggttcccgccccccccggtgaggtagggacgacccctagtgctcccccccagcgcaatcgccgcaaaagcgttcatagagtcctagccgagttggacgatgagagcgagccacctgagaaccctcctccagtgctgatggaacccaggaagaaactgcgcgtggacaaagctcctttgacaccaactggaaatcggcgcgggcgccctcggaagtacccggtaagcgctccaatggctcccccggccgtgggtggtggggagccctgcgctgccccttgctgctgcctccctcaagaagaaactgttgcctgggtccagtgtgacgggtgcgacgtctggttccatgttgcatgtgtgggatgtagcattcaggccgcacgagaagctgactttaggtgcccaggctgtcgggctggaattcagacctag

SEQ ID NO: 284262 - DNA, 1038 bp, Artificial Sequence
  derived and/or modified sequence
atgctgccgtgcttccagctgctccgcatcggcggaggacggggaggcgatctttacacctttcatccgccagcaggtgccggatgcacgtatcgattgggccacagggctgacctgtgcgacgtggccctccgccctcagcaggaaccaggcctgatctccggcatccatgcggagttgcatgcggagcccaggggagatgattggcgtgtgtccttggaggatcactccagtcagggcaccctggtcaacaacgttagattacccagagggcaccgactggaactgagcgatggggatctgctgactttcgggccagaggggccaccaggaacatcaccctctgaattctatttcatgtttcagcaggtgagggtgaaaccgcaggatttcgcagcgatcacaattccgagaagcaggggtgaagccagagttggggcaggctttaggcctatgcttcctagccaaggagctcctcagcgccctctctcaactttctcacctgcgcctaaggccaccctaattcttaatagcattggaagtttgagtaagctacggccacagcccctcacattctcccccagttggggaggtcccaaatcactgcccgtccctgcgccaccaggtgaggtgggtacaacaccttccgcccctcctcaaaggaacaggagaaagagtgtacatcgtgttttggcggagttagacgatgaaagcgaaccccctgaaaatccaccgcctgtgcttatggaaccccgaaagaagcttagagtggacaaagctccactgacacccactgggaaccgtcggggtagaccacggaagtatcccgtatctgccccaatggcaccccctgcagttggcggaggcgaaccttgcgccgcaccctgttgttgcctgcctcaggaggagactgtcgcatgggtccagtgtgatgggtgtgatgtgtggtttcacgtagcctgcgtgggctgcagcatccaggcagccagggaggctgatttccgctgtccaggatgccgcgcaggtatccagacttag

SEQ ID NO: 284263 - DNA, 1038 bp, Artificial Sequence
  derived and/or modified sequence
atgctgccatgcttccagctcttgcgtatcggcggaggcagaggcggagatctgtatactttccatccccctgccggtgcgggatgcacgtatcgccttggccatcgagctgacctgtgcgatgtcgcactgcgacctcagcaggagccaggactcatttcaggaatacatgctgaactccatgcagagcccaggggtgatgactggcgcgtgtcactagaggatcattcaagccaggggacattggtcaacaatgtgcggttaccgagggggcacaggctggagctttcggacggtgaccttctcactttcggacccgaggggccacctggaacttcaccgtccgagttttactttatgtttcagcaggtacgagtgaagccccaggacttcgcagctattactatacctcgcagccgcggagaggccagagtcggggctggatttagacccatgctacccagccagggagcgccacaacgccctctaagcacgttctctcctgccccaaaagcgactttgatccttaatagcatcggttctctgagtaaactgaggccacagcccctcacttttagcccaagttggggcggacccaagtcactgcccgtgccagcgcctcctggcgaggttggtactaccccttccgcacctccacagaggaaccgtagaaaaagcgttcacagagtgcttgccgagttggacgatgaatccgaaccacccgagaaccctccccctgtgctgatggaaccacgaaaaaaacttagagtggacaaagcccctctgactcctaccggaaaccggcgtggccgacccaggaaataccccgtgtctgcccctatggcgcctcctgctgtgggtggaggggaaccttgtgctgctccttgttgttgcctaccacaggaagagacagtcgcttgggtgcagtgcgatggatgtgacgtgtggtttcacgttgcatgtgtgggatgcagtatacaggctgcacgagaagcagacttccgctgccctgggtgcagggccggaattcagacctag

SEQ ID NO: 284264 - DNA, 1038 bp, Artificial Sequence
  derived and/or modified sequence
atgctaccgtgcttccagctgctccgcataggcggagggagaggcggtgacctgtacacgtttcatcccccagccggagcaggatgtacctatcgattgggccatagagctgatctttgcgatgtagctctacgtccacagcaggagcccggtctgatctctggaattcatgcagagctgcacgccgagcccagaggcgacgactggcgcgtcagcctagaggaccactcctcacaggggacattggtcaacaacgtccgactgccgcgaggccaccggctagagctgtctgacggagatctcctcactttcgggcctgagggtccccctggcacatcaccctccgaattttactttatgtttcagcaggtgcgcgtgaaaccccaggacttcgctgccatcacaatcccgcgttcaagaggggaagccagagtgggcgcaggcttccgcccaatgttgccctcacagggggctccccagagacccctctccactttctccccggctcctaaagcaaccttgatcctcaactccatcggatccctcagcaagttaagaccccagcctctaacattctctccatcttgggggggacctaagagtctgccagtcccagcacctccaggagaagtcgggacaaccccatctgcgccaccacagcgcaacaggcggaagtctgtgcaccgcgtcttggctgagctggatgacgaatccgagccaccggaaaaccctccaccagttcttatggaaccccgaaagaagttgcgtgtagacaaagcgccactgactcctacggggaatcgcaggggcagacctcgaaaatatcctgtgtcggcaccgatggccccacctgccgtcggcggaggcgagccatgtgcggctccatgttgctgcctcccccaggaggagaccgtagcttgggtgcagtgcgatggctgcgacgtctggtttcatgttgcgtgtgtcgggtgctccatccaggcagctcgcgaggcagacttcagatgccccggttgcagggctggcattcagacctag

SEQ ID NO: 284265 - DNA, 1038 bp, Artificial Sequence
  derived and/or modified sequence
atgttaccatgtttccaactgctgcggatcggagggggtagaggcggtgatctctatacgtttcatcctcccgctggagccggttgtacctatcggcttggccaccgtgctgatttatgcgatgtggccctcaggcctcagcaggagcccggtttaatcagtggtatccacgcagagctgcatgctgagccacgaggtgatgactggcgcgtatccctggaagatcactcgtcacaggggacgctggtaaataacgtcagactgcccaggggccacagactagaactctcagacggtgacctattaactttcggccctgagggccctcccggtacctctccctccgagttctactttatgttccagcaagtgcgggtgaaaccccaggactttgccgcaattacaataccacgatcaaggggtgaggcaagagtgggcgcaggtttcagacctatgctgccaagtcagggcgcaccacagcggccactgtctacattcagcccagctcccaaggccacgctgattttaaattcaatcggcagtttgtctaaacttcgaccccaacctctcacattctctccgagctggggaggacccaaatcactgcctgtaccagctccaccaggcgaggttggaactaccccctccgctcctcctcaacgtaaccggcgaaagtcagtccacagggtgctagctgaactggatgacgaatccgaacctccagagaatcctcccccagtgctaatggagcccagaaagaagttacgtgtcgacaaggcccctcttacacctactgggaatcggaggggcaggccacgaaaataccctgtctctgctcccatggctccgcctgccgtcgggggtggggaaccttgcgccgctccctgctgttgtttgcctcaggaagaaactgtggcgtgggtacagtgcgacgggtgtgatgtttggttccatgtcgcgtgtgttggttgctctattcaagcagctagagaggctgatttcagatgtcccggatgcagggcgggaatccagacttag

SEQ ID NO: 284266 - DNA, 1038 bp, Artificial Sequence
  derived and/or modified sequence
atgctgccatgcttccagcttcttcggatcggcggaggaagaggtggagacttgtacacatttcatcccccagcgggtgccggatgtacctacagactcggacatagagctgatctgtgtgacgtggcactaaggccccagcaggaacctggcctgattagtggcatccacgctgagctgcacgccgagccccgaggcgatgattggagggtgagtctggaggatcactcaagccaaggaacgctagttaataatgtccgcctaccacgcggtcatagactcgagctatctgacggagacctcctaaccttcggtcccgaagggcctccaggaacttctccgagcgagttctattttatgttccagcaagtgagagtgaaaccccaggattttgctgccatcacaatcccacggtccagaggtgaagctagggtgggagctggctttcgtcctatgctgccaagccagggcgcacctcaacgacccctctcgaccttcagtccagctccaaaggctaccctcattttgaatagtatcggaagcctcagtaagttaaggccgcagcccctgactttctccccctcttggggcggtcctaaatcccttcccgtgccagcaccacctggagaggtgggaaccacaccgagcgcaccaccccaacgcaaccggaggaagtccgttcacagggtgctggccgagttagacgatgaatcagagccgccagagaatcctcctcccgtgcttatggagccccgaaaaaagcttcgcgtcgataaagccccactgacacccacagggaaccgcagggggagacccaggaagtatcccgtgtccgccccaatggctcccccagccgtgggcggtggcgaaccctgcgcagcaccgtgttgttgcctcccccaggaagagacagtcgcctgggttcaatgcgatggctgcgatgtatggtttcacgttgcctgcgtcggttgtagcatacaggcagcacgggaagccgatttcaggtgtccaggctgccgtgcaggcatccagacttag

SEQ ID NO: 284267 - DNA, 1038 bp, Artificial Sequence
  derived and/or modified sequence
atgctaccatgcttccagcttcttcgcatcggaggagggcgaggaggagatctctatacttttcatccgcctgccggtgcgggatgtacctacagactgggccacagagccgacctgtgtgacgtcgccttgagaccccagcaggagccaggcctcattagcggcatccatgccgagctccacgccgaacctcgtggtgatgactggcgcgtttcacttgaagaccactcgtcccagggcactttggtcaacaacgtcagactccctcgtgggcatcgcctggaattgagcgatggagatttgcttactttcggcccagaaggctctccgggaaccagtcctagcgaattttatttcatgtttcagcaggtgagggtgaaaccccaagacttcgctgctatcaccatacctagatccaggggggaagctcgggtgggcgcaggctttagacccatgctaccatcccagggtgccccacagaggcctctgtctactttctctccggcacctaaggccacactgatattaaactcgataggatctctctccaagctccgccctcaaccgctaacttttagtccatcgtggggcggacctaaatcattaccagtcccagctccacctggggaggtcgggacaacaccaagcgctcctcctcaaaggaatcgccgaaaatccgtccaccgcgtcctcgccgagttggacgacgagtcagagcccccagaaaaccctcctccggtgttgatggaacctcgaaagaagttgcgtgtggacaaggcccctcttacacctacaggcaaccgtcggggacgccctaggaagtatccggtttcagcccctatggctccgcctgctgtgggaggcggtgagccctgtgcagctccctgttgctgtctgccacaggaggagactgttgcgtgggttcagtgtgacggctgcgatgtgtggtttcatgtggcttgtgtgggctgtagcatccaggctgcaagagaggctgacttccgatgcccagggtgcagggcagggatccagacgtag

SEQ ID NO: 284268 - DNA, 1038 bp, Artificial Sequence
  derived and/or modified sequence
atgcttccttgctttcagctgctgcgtatcgggggtggccgtggaggcgatctttatacttttcatcccccagctggggctgggtgcacttacagactagggcatagagccgacctttgtgatgtagcccttaggcctcagcaggaaccaggcttaatttcaggcatccacgcggaattacatgctgagcccaggggagacgattggagagtgagtctggaagaccacagttcacaggggacattggtaaacaacgtccggctgcctcggggtcacagactcgaactgtccgacggcgacctcctgacgtttggccctgaggggcctccaggcactagccccagcgagttttactttatgttccagcaggtgagagtgaagccacaagactttgcagcaataactatcccccgaagtagaggggaggcgagggtaggcgctggcttcaggcctatgttaccttcccagggcgcaccccagcgacctttgagtacattctcccctgcgcctaaagctacactgatactcaactcaataggtagcctgtccaaactgcgcccacaaccgttgactttcagcccgagctggggaggccctaaatctctgccagttcctgctccacccggtgaagtcggaactacaccttccgctccaccacagagaaataggagaaaaagcgtgcaccgagtgctagccgagttagacgacgagtctgaacctcctgaaaatccacccccagtgctgatggagcctcgcaagaaactacgggttgacaaggcacccctgacgcccactggaaataggagagggcgacccagaaaataccctgtgagcgcaccgatggcccctccagccgtcggtgggggtgagccctgtgccgctccgtgctgttgtttaccccaggaggaaacagtggcctgggtgcagtgcgatggctgcgatgtgtggttccacgtggcttgcgtcggatgcagtattcaggccgctcgggaggccgacttccggtgtcccggatgtagagctggaatacagacttag

SEQ ID NO: 284269 - DNA, 1038 bp, Artificial Sequence
  derived and/or modified sequence
atgcttccctgttttcagctgcttcgtattggtggaggtcgcggaggagacctctatacttttcaccctccagccggagcaggatgcacgtatcgccttggccaccgcgctgacctttgtgatgtagcccttcggccacaacaggaacctggcctgatttccggaattcatgcagagcttcacgcagagccgcgaggagacgactggcgagttagcctggaagatcattctagccagggaactttagtcaataatgtaagactgcctaggggccaccggctggagctgagcgatggtgacctcctcaccttcgggcctgaaggacctcctgggacaagtccttcagagttctacttcatgttccagcaggtgcgtgtcaagcctcaggacttcgcagccatcacaattcccaggtcccgaggagaggctcgggtcggagctggcttcagaccgatgcttccttcccaaggcgctccgcagagaccgctctcgactttctcccctgcacctaaggcaacgcttatccttaacagtatcggttccctcagtaaattgcgccctcagccgctgactttctctccaagctggggtggacccaagtctctgccggtgccagctcctcccggtgaggttggcacaaccccatccgctcctcctcagcggaaccgaagaaagtccgtccaccgggttctggcagagttagacgatgagagtgaaccacctgagaaccctccaccagttttgatggagccccgtaagaagttacgtgttgataaggcacccttaacacccacggggaataggagagggaggcctcggaaatatcccgtctctgcgcctatggctcctcctgctgttggtggaggagaaccttgcgcggcaccttgttgttgcctcccacaggaggagactgttgcttgggtccagtgtgacgggtgtgacgtctggttccatgtggcatgcgtgggttgctcaattcaggctgcacgtgaagccgactttcgatgccccggttgtagagcaggcattcagacctag

SEQ ID NO: 284270 - DNA, 1038 bp, Artificial Sequence
  derived and/or modified sequence
atgttgccatgttttcagctactgcggatcgggggaggcagaggcggagatctgtacacgtttcatcccccagccggtgccggttgcacctatagactcgggcatagggcagacttatgcgacgtggccctcaggcctcaacaggaacctggtcttatcagtggaattcacgctgaactgcacgcagaacccaggggggacgattggcgtgtgtccttggaagatcattccagccaaggcactctggtgaacaatgtccgccttcccaggggccaccgtcttgaactctctgatggtgacctcttgacctttgggcctgaaggcccacctggtaccagcccttccgaattctactttatgtttcaacaagtgcgagtgaaaccacaggactttgctgcaataacgattccaaggagccgcggtgaagccagggtgggagcaggctttcgcccaatgctgccatcgcagggggctccacagcgacctctcagcacattttccccagcacctaaggccactctcattctgaacagcattgggagtttgtcgaagctccggccacagccattaaccttcagcccatcatgggggggtcccaaatctctcccagtgcctgctcctcccggagaagtgggcactacgccatcagcccctcctcagaggaacagaagaaaatccgtacaccgcgtgttagctgagttagacgacgaatctgagcctcccgaaaaccctcccccagtattaatggaacctaggaagaagctgcgggtggataaggcccctctgacccccacaggtaaccgacgcggacggcctagaaaataccccgtgtccgcccctatggctccacccgctgtcggaggaggggagccttgtgccgcaccctgttgctgcctccctcaggaggaaactgtcgcatgggtgcagtgtgatggttgtgatgtgtggtttcatgttgcttgcgttgggtgctctattcaagccgctagggaagcagattttcgttgccccggatgccgggcagggatccagacatag

SEQ ID NO: 284271 - DNA, 1038 bp, Artificial Sequence
  derived and/or modified sequence
atgctcccgtgcttccagcttctgcgtataggcggtgggaggggaggggacttgtatactttccaccctcccgcaggcgctggatgcacgtacagattgggccaccgggctgacctgtgcgacgtggcactgaggccccagcaggagcctgggctgatttccggtatccatgctgaattacatgccgaaccacgaggggatgactggcgggtgtcactggaggaccactcttcccagggtaccctggtcaacaacgtccgccttcctagaggacacagattggagctgtctgatggcgatcttcttaccttcgggcctgaagggccacccggaacaagcccgtctgagttctactttatgttccagcaggtgcgggtgaagccacaggattttgccgcaataaccattcctcggagtaggggggaggccagggtaggcgcaggatttagacccatgcttccttcacaaggagccccacagagacccctgagcacattctcccctgccccaaaggcaaccctcattctaaacagcatcgggagcctgagtaagttacgtcctcagcccctcacgttttccccatcatggggcggtcccaagagcttgcccgtacccgcacccccaggcgaagtaggtacaacccccagtgcccctcctcaacggaatcggcgtaaaagcgtacaccgagtgctagccgagctcgacgatgaaagcgaaccacctgaaaatcctccccctgtgcttatggagcccaggaagaagctgagagtcgacaaggcaccactcacgccaaccgggaatcgtcggggaaggcctcgaaaatacccggtttctgctcccatggccccacccgcagtgggcggtggtgagccttgtgcggctccctgttgctgtcttcctcaggaagagaccgttgcctgggttcagtgtgacgggtgtgacgtgtggttccatgtcgcctgcgtgggttgtagcattcaggccgctcgcgaggccgactttaggtgtccgggttgcagggccggtatacagacgtag

SEQ ID NO: 284272 - DNA, 1038 bp, Artificial Sequence
  derived and/or modified sequence
atgctcccatgctttcagctccttaggattggaggaggtagaggcggagacctgtacacttttcaccctcctgccggagccggatgtacatatcgtttgggacatagagccgatctgtgtgatgtagctcttcgaccccagcaggaacccggactgatctcaggaatacacgccgaactgcacgctgagcctcggggagacgattggcgggtttcattggaagaccacagctcccagggcaccctggtaaataatgtcagattaccgcgaggtcacaggctcgagctgtccgacggtgatttgctgacattcgggcctgagggtcccccaggaacgtcaccaagtgaattctatttcatgttccaacaggtgcgagtcaagcctcaggactttgctgccataactattcctcggtcgcggggtgaggccagggtaggagcagggtttcgtccaatgctgccttcccagggcgctcctcagcgaccattaagtacattcagtccagccccaaaagccaccctcattctaaattcaatcgggagtctgtctaaactcagaccccaacccctgacgtttagtccgtcctgggggggaccaaaatcacttcccgtgccagcgcctcctggggaagtgggcactactcccagtgctccccctcagcggaaccgccgaaagtctgttcatcgggtcctagccgaattggatgacgagtcggaaccaccggaaaacccaccaccggtactgatggagccgcgaaagaaactgcgtgttgataaagcacctctaacccctaccggcaatcgcaggggccgacctagaaaataccctgtgtcagcacccatggcgcctcccgctgtaggcggaggggagccttgcgctgcgccatgctgttgcctgccacaggaggagacagtggcctgggtacagtgcgacggatgcgatgtgtggtttcacgtagcttgcgttggatgttccattcaagccgcaagggaggccgacttccggtgcccgggatgtagagctgggatccagacttag

SEQ ID NO: 284273 - DNA, 1038 bp, Artificial Sequence
  derived and/or modified sequence
atgctgccctgctttcagctgttacggatcgggggaggccgaggtggggacctatatacattccacccccctgccggtgctggctgtacctacagactcggtcacagagcagatctctgcgatgtggctctgcgccctcagcaagaaccagggcttatttctgggattcatgccgagttgcacgctgagcctagaggggacgactggagggtatcccttgaggatcactcaagtcaggggacactcgtcaataacgtgagacttccacggggacacagactcgaactgtctgacggagacctcctgacctttgggccagagggttctccaggtacttcgcccagcgaattttatttcatgttccagcaggtgcgagttaagcctcaggatttcgccgctataacgatccctagatccagaggagaagcaagagtgggagctgggttccggcctatgctgccgagccagggagccccacaacgccctctcagcactttttcaccagctcccaaagcgaccttaattctgaattccattgggtcactgtcgaaactccgcccacagcctctaaccttctcccccagttggggcggacccaagtcactaccagtacccgctcctcctggggaagtggggacgaccccgagtgctccacctcagcggaaccggaggaagagcgtgcaccgggtactcgccgagcttgacgatgagagcgaaccccctgagaacccaccccctgtgcttatggaacccaggaaaaaactaagagtagataaggcccctctaacaccaactggtaatcgcagaggcaggcccagaaaataccctgtcagcgccccaatggccccaccggcagtgggtggaggagaaccatgtgctgctccatgctgctgcttaccacaagaggaaaccgtggcttgggtgcagtgcgatggctgtgatgtgtggttccacgtggcttgcgtcgggtgctcaatccaggccgcaagggaagcggactttaggtgccctgggtgcagagcaggcatacagacctag

SEQ ID NO: 284274 - DNA, 3040 bp, Artificial Sequence
  derived and/or modified sequence
aggaggggtaggcgctgcccgcgcgcagaggccgcgcccctcctggccccggcttcttggctgtcaaacagatgcagcaacgtcggctcctgccgaggagcccaaggggtcccgggatccgccgcacaggctggcactgcttgaagaggaggctactcggagactgcgccgcgcggattggaggctccccaaatattttgcgatctgaggatccagctcaagtgaggtgccataggacgtgttcctgagtttgcattgcacggagaccttcctggaatttttcatttgcaagtcggcttaaccaattttgcattgagtcctaggctgcttgcactctgaatttgggctattcaggtagtgtgctcaaagttgaaaccgcatacagcacaactcaagtttgcatcagactgggaagcgaacttaagccagcggtgcgtggcccaggagtgggaaaggaaatggatgcctgaagtggaagaggtggtgcagagggggcaccgcccatgctgccctgcttccaactgctgcgcatagggggcggcaggggcggtgatctctacaccttccacccccccgccggggctggctgcacctatcgcttgggccacagggccgacctgtgtgatgtggccctgcggccccagcaggagcctggcctcatctctgggatccacgccgaactgcatgccgagccccggggtgatgactggagggtcagcctggaagaccacagcagccaaggtactttggtcaataatgtccgactcccaagaggtcacaggctggaattgagtgatggagacctcctgacctttggccctgaagggcccccaggaaccagcccctcggagttctacttcatgttccaacaagtacgagtcaagcctcaggactttgctgccattaccatcccacggtctaggggagaagcccgggttggggctggtttccggcctatgctgccctcccagggggctccacagcggcctctcagcaccttctcccctgcccccaaggccacactgatcctaaactccataggcagcctcagcaagctccggccccagcccctcaccttctcccctagttggggtggaccaaagagcctgcctgttcccgccccacctggggaagtggggaccacgccttctgctccaccccaacgcaatcggaggaaatctgttcaccgagtgttggcggaactggatgatgagagtgagcctcctgagaacccgccaccggtccttatggagcccaggaagaaactccgtgtagacaaagccccactgactcccactggaaatcgacgtggccgtcctcggaagtacccagtgagcgctcccatggctccccctgcagttgggggcggggagccctgtgcagctccttgttgctgcctgccccaggaagagacagtggcctgggttcagtgtgatggctgtgacgtctggttccatgtggcctgtgttggctgcagcatccaggctgccagggaggccgacttccgatgcccagggtgccgggctggcattcagacctaaggtccaccgccaaggcaccatcggacacacctgcccatgagtagacacagcagcgagcaaataggtctgataaataccccccttcccttccctccccaggagggaatgactacagggaagaaggatggattgatgtggactcattcagggcctggagcagaccctggtggccaagacagaagagatggtttcctgccaaagatattgccacctccaggaaattgccagtgagctggaagttcccactattacaagccataaggccatgttgccatggacaccagaatatctgtagtcagagcacctatcagttgcaaaagccatgcttgcaaccgatggaaaatgtaagagggagttcttaaggttcttggtggcatcacccaaggcattctgggaaaacctagggcctggccccaaaacttccctactctgtggctagtcctgctgccaacaaaatcgtagcgacctggcttttcacagctttgcttttatttccaagtcaaggacaagccgcttcattcactcctgggcatttactcttcttgtgggtctgtgatattccttgctttccagggagaatgtgcttggcaaggtctggagaactaattcagaatcttaggggaaggggagagatggaaatacaaacctgcttactggaaaggtgcaaatatatgggttgagctggaggtaggaatacaggtaattaaggtttctagtttaagggaaaacagatctattgccatttaaataaggtaactgggatttggttaagttcacaaagatagcagaagatttatttacaggcttcacctgtactgtcagggcaagagaaagcctggtaaaccagctacagcagtttaccagtgtgatggctgtgacacagctccactccacgggtggacacagcagagggcaactgggctggcctggttcagtgtgaatcaaaccgcttaacccacacatggtacatgtgattttcttttgtgagccttacaccaagccaaactattgtcaaagcatcatttctatagaaataaagccttatcttgacctgttctattaaaacctgccacatccgccctttcctacctagatttaatgagcccaagtttttttacatggaagaaatgactctggggcaaagacccctaatgaactagtggcagagccaggaataaaacttgagtaactaatgagtcacttatgggcagagtatgcaaaaaccttaagtggaaaccaaatagaccctggtatcaagaaagcacaaagtattaatagaagtttctggttggggtgatctaggttcaacagaaataagatgatttctaagtataaagccatttaagaattccagagtagggtgggaaagcaaaaagccagctctgaacaggtaacagctacatggtgactgagtctatgggcaaaagttcttgcatcacaggcttttgggaactagcctatcacagggccctgtacaaataaacttggctgcaatccca

SEQ ID NO: 284275 - DNA, 3291 bp, Artificial Sequence
  derived and/or modified sequence
tccgaaggaggggtaggcgctgcccgcgcgcagaggccgcgcccctcctggccccggcttcttggctgtcaaacagatgcagcaacgtcggctcctgccgaggagcccaaggggtcccgggatccgccgcacaggctggcactgcttgaagaggaggctactcggagactgcgccgcgcggtggattcattgccctcggaggttcaaccagttatgagtgagggattggccagaagatcggggcgcaggcaagcaggagtgctctattaggataagcaagtttgacaggaagaagctactcttctccgaattacacagaggtgatgtgttcgtattgcacgtagacgtgtgtataacaggacctccttccccgcgccccgccaccccgacacacacaggagctgcctaaagtatccttgccttgcagattggaggctccccaaatattttgcgatctgaggatccagctcaagtgaggtgccataggacgtgttcctgagtttgcattgcacggagaccttcctggaatttttcatttgcaagtcggcttaaccaattttgcattgagtcctaggctgcttgcactctgaatttgggctattcaggtagtgtgctcaaagttgaaaccgcatacagcacaactcaagtttgcatcagactgggaagcgaacttaagccagcggtgcgtggcccaggagtgggaaaggaaatggatgcctgaagtggaagaggtggtgcagagggggcaccgcccatgctgccctgcttccaactgctgcgcatagggggcggcaggggcggtgatctctacaccttccacccccccgccggggctggctgcacctatcgcttgggccacagggccgacctgtgtgatgtggccctgcggccccagcaggagcctggcctcatctctgggatccacgccgaactgcatgccgagccccggggtgatgactggagggtcagcctggaagaccacagcagccaaggtactttggtcaataatgtccgactcccaagaggtcacaggctggaattgagtgatggagacctcctgacctttggccctgaagggcccccaggaaccagcccctcggagttctacttcatgttccaacaagtacgagtcaagcctcaggactttgctgccattaccatcccacggtctaggggagaagcccgggttggggctggtttccggcctatgctgccctcccagggggctccacagcggcctctcagcaccttctcccctgcccccaaggccacactgatcctaaactccataggcagcctcagcaagctccggccccagcccctcaccttctcccctagttggggtggaccaaagagcctgcctgttcccgccccacctggggaagtggggaccacgccttctgctccaccccaacgcaatcggaggaaatctgttcaccgagtgttggcggaactggatgatgagagtgagcctcctgagaacccgccaccggtccttatggagcccaggaagaaactccgtgtagacaaagccccactgactcccactggaaatcgacgtggccgtcctcggaagtacccagtgagcgctcccatggctccccctgcagttgggggcggggagccctgtgcagctccttgttgctgcctgccccaggaagagacagtggcctgggttcagtgtgatggctgtgacgtctggttccatgtggcctgtgttggctgcagcatccaggctgccagggaggccgacttccgatgcccagggtgccgggctggcattcagacctaaggtccaccgccaaggcaccatcggacacacctgcccatgagtagacacagcagcgagcaaataggtctgataaataccccccttcccttccctccccaggagggaatgactacagggaagaaggatggattgatgtggactcattcagggcctggagcagaccctggtggccaagacagaagagatggtttcctgccaaagatattgccacctccaggaaattgccagtgagctggaagttcccactattacaagccataaggccatgttgccatggacaccagaatatctgtagtcagagcacctatcagttgcaaaagccatgcttgcaaccgatggaaaatgtaagagggagttcttaaggttcttggtggcatcacccaaggcattctgggaaaacctagggcctggccccaaaacttccctactctgtggctagtcctgctgccaacaaaatcgtagcgacctggcttttcacagctttgcttttatttccaagtcaaggacaagccgcttcattcactcctgggcatttactcttcttgtgggtctgtgatattccttgctttccagggagaatgtgcttggcaaggtctggagaactaattcagaatcttaggggaaggggagagatggaaatacaaacctgcttactggaaaggtgcaaatatatgggttgagctggaggtaggaatacaggtaattaaggtttctagtttaagggaaaacagatctattgccatttaaataaggtaactgggatttggttaagttcacaaagatagcagaagatttatttacaggcttcacctgtactgtcagggcaagagaaagcctggtaaaccagctacagcagtttaccagtgtgatggctgtgacacagctccactccacgggtggacacagcagagggcaactgggctggcctggttcagtgtgaatcaaaccgcttaacccacacatggtacatgtgattttcttttgtgagccttacaccaagccaaactattgtcaaagcatcatttctatagaaataaagccttatcttgacctgttctattaaaacctgccacatccgccctttcctacctagatttaatgagcccaagtttttttacatggaagaaatgactctggggcaaagacccctaatgaactagtggcagagccaggaataaaacttgagtaactaatgagtcacttatgggcagagtatgcaaaaaccttaagtggaaaccaaatagaccctggtatcaagaaagcacaaagtattaatagaagtttctggttggggtgatctaggttcaacagaaataagatgatttctaagtataaagccatttaagaattccagagtagggtgggaaagcaaaaagccagctctgaacaggtaacagctacatggtgactgagtctatgggcaaaagttcttgcatcacaggcttttgggaactagcctatcacagggccctgtacaaataaacttggctgcaatccca

SEQ ID NO: 284276 - DNA, 2993 bp, Artificial Sequence
  derived and/or modified sequence
cccggcttcttggctgtcaaacagatgcagcaacgtcggctcctgccgaggagcccaaggggtcccgggatccgccgcacaggctggcactgcttgaagaggaggctactcggagactgcgccgcgcggattggaggctccccaaatattttgtgatctgaggatccagctcaagtgaggtgccataggacgtgttcctgagtttgcattgcacggagaccttcctggaatttttcatttgcaagtcggcttaaccaattttgcattgagtcctaggctgcttgcactctgaatttgggctattcaggtagtgtgctcaaagttgaaaccgcatacagcacaactcaagtttgcatcagactgggaagcgaacttaagccagcggtgcgtggcccaggagtgggaaaggaaatggatgcctgaagtggaagaggtggtgcagagggggcaccgcccatgctgccctgcttccaactgctgcgcatagggggcggcaggggcggtgatctctacaccttccacccccccgccggggctggctgcacctatcgcttgggccacagggccgacctgtgtgatgtggccctgcggccccagcaggagcctggcctcatctctgggatccacgccgaactgcatgccgagccccggggtgatgactggagggtcagcctggaagaccacagcagccaaggtactttggtcaataatgtccgactcccaagaggtcacaggctggaattgagtgatggagacctcctgacctttggccctgaagggcccccaggaaccagcccctcggagttctacttcatgttccaacaagtacgagtcaagcctcaggactttgctgccattaccatcccacggtctaggggagaagcccgggttggggctggtttccggcctatgctgccctcccagggggctccacagcggcctctcagcaccttctcccctgcccccaaggccacactgatcctaaactccataggcagcctcagcaagctccggccccagcccctcaccttctcccctagttggggtggaccaaagagcctgcctgttcccgccccacctggggaagtggggaccacgccttctgctccaccccaacgcaatcggaggaaatctgttcaccgagtgttggcggaactggatgatgagagtgagcctcctgagaacccgccaccggtccttatggagcccaggaagaaactccgtgtagacaaagccccactgactcccactggaaatcgacgtggccgtcctcggaagtacccagtgagcgctcccatggctccccctgcagttgggggcggggagccctgtgcagctccttgttgctgcctgccccaggaagagacagtggcctgggttcagtgtgatggctgtgacgtctggttccatgtggcctgtgttggctgcagcatccaggctgccagggaggccgacttccgatgcccagggtgccgggctggcattcagacctaaggtccaccgccaaggcaccatcggacacacctgcccatgagtagacacagcagcgagcaaataggtctgataaataccccccttcccttccctccccaagagggaatgactacagggaagaaggatggattgatgtggactcattcagggcctggagcagaccctggtggccaagacagaagagatggtttcctgccaaagatattgccacctccaggaaattgccagtgagctggaagttcccactattacaagccataaggccatgttgccatggacaccagaatatctgtagtcagagcacctatcagttgcaaaagccatgcctgcaaccgatggaaaatgtaagagggagttcttaaggttcttggtggcatcacccaaggcattctgggaaaacctagggcctggccccaaaacttccctactctgtggctagtcctgctgccaacaaaatcgtagcgacctggcttttcacagctttgcttttatttccaagtcaaggacaagccgcttcattcactcctgggcatttactcttcttgtgggtctgtgatattccttgctttccagggagaatgtgcttggcaaggtctggagaactaattcagaatcttaggggaaggggagagatggaaatacaaacctgcttactggaaaggtgcaaatatatgggttgagctggaggtaggaatacaggtaattaaggtttctagtttaagggaaaacagatctattgccatttaaataaggtaactgggatttggttaagttcacaaagatagcagaagatttatttacaggcttcacctgtactgtcagggcaagagaaagcctggtaaaccagctacagcagtttaccagtgtgatggctgtgacacagctccactccacgggtggacacagcagagggcaactgggctggcctggttcagtgtgaatcaaaccgcttaacccacacatggtacatgtgattttcttttgtgagccttacaccaagccaaactattgtcaaagcatcatttctatagaaataaagccttatcttgacctgttctattaaaacctgccacatccgccctttcctacctagatttaatgagcccaagtttttttacatggaagaaatgactctggggcaaagacccctaatgaactagtggcagagccaggaataaaacttgagtaactaatgagtcacttatgggcagagtatgcaaaaaccttaagtggaaaccaaatagaccctggtatcaagaaagcacaaagtattaatagaagtttctggttggggtgatctaggttcaacagaaataagatgatttctaagtataaagccatttaagaattccagagtagggtgggaaagcaaaaagccagctctgaacaggtaacagctacatggtgactgagtctatgggcaaaagttcttgcatcacaggcttttgggaactagcctatcacagggccctgtacaaataaacttggctgcaatccca

SEQ ID NO: 284277 - DNA, 3291 bp, Artificial Sequence
  derived and/or modified sequence
tccgaaggaggggtaggcgctgcccgcgcgcagaggccgcgcccctcctggccccggcttcttggctgtcaaacagatgcagcaacgtcggctcctgccgaggagcccaaggggtcccgggatccgccgcacaggctggcactgcttgaagaggaggctactcggagactgcgccgcgcggtggattcattgccctcggaggttcaaccagttatgagtgagggattggccagaagatcggggcgcaggcaagcaggagtgctctattaggataagcaagtttgacaggaagaagctgctcttctccgaattacacagaggtgatgtgttcgtattgcacgtagacgtgtgtataacaggacctccttccccgcgccccgccaccccgacacacacaggagctgcctaaagtatccttgccttgcagattggaggctccccaaatattttgtgatctgaggatccagctcaagtgaggtgccataggacgtgttcctgagtttgcattgcacggagaccttcctggaatttttcatttgcaagtcggcttaaccaattttgcattgagtcctaggctgcttgcactctgaatttgggctattcaggtagtgtgctcaaagttgaaaccgcatacagcacaactcaagtttgcatcagactgggaagcgaacttaagccagcggtgcgtggcccaggagtgggaaaggaaatggatgcctgaagtggaagaggtggtgcagagggggcaccgcccatgctgccctgcttccaactgctgcgcatagggggcggcaggggcggtgatctctacaccttccacccccccgccggggctggctgcacctatcgcttgggccacagggccgacctgtgtgatgtggccctgcggccccagcaggagcctggcctcatctctgggatccacgccgaactgcatgccgagccccggggtgatgactggagggtcagcctggaagaccacagcagccaaggtactttggtcaataatgtccgactcccaagaggtcacaggctggaattgagtgatggagacctcctgacctttggccctgaagggcccccaggaaccagcccctcggagttctacttcatgttccaacaagtacgagtcaagcctcaggactttgctgccattaccatcccacggtctaggggagaagcccgggttggggctggtttccggcctatgctgccctcccagggggctccacagcggcctctcagcaccttctcccctgcccccaaggccacactgatcctaaactccataggcagcctcagcaagctccggccccagcccctcaccttctcccctagttggggtggaccaaagagcctgcctgttcccgccccacctggggaagtggggaccacgccttctgctccaccccaacgcaatcggaggaaatctgttcaccgagtgttggcggaactggatgatgagagtgagcctcctgagaacccgccaccggtccttatggagcccaggaagaaactccgtgtagacaaagccccactgactcccactggaaatcgacgtggccgtcctcggaagtacccagtgagcgctcccatggctccccctgcagttgggggcggggagccctgtgcagctccttgttgctgcctgccccaggaagagacagtggcctgggttcagtgtgatggctgtgacgtctggttccatgtggcctgtgttggctgcagcatccaggctgccagggaggccgacttccgatgcccagggtgccgggctggcattcagacctaaggtccaccgccaaggcaccatcggacacacctgcccatgagtagacacagcagcgagcaaataggtctgataaataccccccttcccttccctccccaagagggaatgactacagggaagaaggatggattgatgtggactcattcagggcctggagcagaccctggtggccaagacagaagagatggtttcctgccaaagatattgccacctccaggaaattgccagtgagctggaagttcccactattacaagccataaggccatgttgccatggacaccagaatatctgtagtcagagcacctatcagttgcaaaagccatgcctgcaaccgatggaaaatgtaagagggagttcttaaggttcttggtggcatcacccaaggcattctgggaaaacctagggcctggccccaaaacttccctactctgtggctagtcctgctgccaacaaaatcgtagcgacctggcttttcacagctttgcttttatttccaagtcaaggacaagccgcttcattcactcctgggcatttactcttcttgtgggtctgtgatattccttgctttccagggagaatgtgcttggcaaggtctggagaactaattcagaatcttaggggaaggggagagatggaaatacaaacctgcttactggaaaggtgcaaatatatgggttgagctggaggtaggaatacaggtaattaaggtttctagtttaagggaaaacagatctattgccatttaaataaggtaactgggatttggttaagttcacaaagatagcagaagatttatttacaggcttcacctgtactgtcagggcaagagaaagcctggtaaaccagctacagcagtttaccagtgtgatggctgtgacacagctccactccacgggtggacacagcagagggcaactgggctggcctggttcagtgtgaatcaaaccgcttaacccacacatggtacatgtgattttcttttgtgagccttacaccaagccaaactattgtcaaagcatcatttctatagaaataaagccttatcttgacctgttctattaaaacctgccacatccgccctttcctacctagatttaatgagcccaagtttttttacatggaagaaatgactctggggcaaagacccctaatgaactagtggcagagccaggaataaaacttgagtaactaatgagtcacttatgggcagagtatgcaaaaaccttaagtggaaaccaaatagaccctggtatcaagaaagcacaaagtattaatagaagtttctggttggggtgatctaggttcaacagaaataagatgatttctaagtataaagccatttaagaattccagagtagggtgggaaagcaaaaagccagctctgaacaggtaacagctacatggtgactgagtctatgggcaaaagttcttgcatcacaggcttttgggaactagcctatcacagggccctgtacaaataaacttggctgcaatccca

SEQ ID NO: 284278 - DNA, 3291 bp, Artificial Sequence
  derived and/or modified sequence
tccgaaggaggggtaggcgctgcccgcgcgcagaggccgcgcccctcctggccccggcttcttggctgtcaaacagatgcagcaacgtcggctcctgccgaggagcccaaggggtcccgggatccgccgcacaggctggcactgcttgaagaggaggctactcggagactgcgccgcgcggtggattcattgccctcggaggttcaaccagttatgagtgagggattggccagaagatcggggcgcaggcaagcaggagtgctctattaggataagcaagtttgacaggaagaagctgctcttctccgaattacacagaggtgatgtgttcgtattgcacgtagacgtgtgtataacaggacctccttccccgcgccccgccaccccgacacacacaggagctgcctaaagtatccttgccttgcagattggaggctccccaaatattttgtgatctgaggatccagctcaagtgaggtgccataggacgtgttcctgagtttgcattgcacggagaccttcctggaatttttcatttgcaagtcggcttaaccaattttgcattgagtcctaggctgcttgcactctgaatttgggctattcaggtagtgtgctcaaagttgaaaccgcatacagcacaactcaagtttgcatcagactgggaagcgaacttaagccagcggtgcgtggcccaggagtgggaaaggaaatggatgcctgaagtggaagaggtggtgcagagggggcaccgcccatgctgccctgcttccaactgctgcgcatagggggcggcaggggcggtgatctctacaccttccacccccccgccggggctggctgcacctatcgcttgggccacagggccgacctgtgtgatgtggccctgcggccccagcaggagcctggcctcatctctgggatccacgccgaactgcatgccgagccccggggtgatgactggagggtcagcctggaagaccacagcagccaaggtactttggtcaataatgtccgactcccaagaggtcacaggctggaattgagtgatggagacctcctgacctttggccctgaagggtccccaggaaccagcccctcggagttctacttcatgttccaacaagtacgagtcaagcctcaggactttgctgccattaccatcccacggtctaggggagaagcccgggttggggctggtttccggcctatgctgccctcccagggggctccacagcggcctctcagcaccttctcccctgcccccaaggccacactgatcctaaactccataggcagcctcagcaagctccggccccagcccctcaccttctcccctagttggggtggaccaaagagcctgcctgttcccgccccacctggggaagtggggaccacgccttctgctccaccccaacgcaatcggaggaaatctgttcaccgagtgttggcggaactggatgatgagagtgagcctcctgagaacccgccaccggtccttatggagcccaggaagaaactccgtgtagacaaagccccactgactcccactggaaatcgacgtggccgtcctcggaagtacccagtgagcgctcccatggctccccctgcagttgggggcggggagccctgtgcagctccttgttgctgcctgccccaggaagagacagtggcctgggttcagtgtgatggctgtgacgtctggttccatgtggcctgtgttggctgcagcatccaggctgccagggaggccgacttccgatgcccagggtgccgggctggcattcagacctaaggtccaccgccaaggcaccatcggacacacctgcccatgagtagacacagcagcgagcaaataggtctgataaataccccccttcccttccctccccaagagggaatgactacagggaagaaggatggattgatgtggactcattcagggcctggagcagaccctggtggccaagacagaagagatggtttcctgccaaagatattgccacctccaggaaattgccagtgagctggaagttcccactattacaagccataaggccatgttgccatggacaccagaatatctgtagtcagagcacctatcagttgcaaaagccatgcctgcaaccgatggaaaatgtaagagggagttcttaaggttcttggtggcatcacccaaggcattctgggaaaacctagggcctggccccaaaacttccctactctgtggctagtcctgctgccaacaaaatcgtagcgacctggcttttcacagctttgcttttatttccaagtcaaggacaagccgcttcattcactcctgggcatttactcttcttgtgggtctgtgatattccttgctttccagggagaatgtgcttggcaaggtctggagaactaattcagaatcttaggggaaggggagagatggaaatacaaacctgcttactggaaaggtgcaaatatatgggttgagctggaggtaggaatacaggtaattaaggtttctagtttaagggaaaacagatctattgccatttaaataaggtaactgggatttggttaagttcacaaagatagcagaagatttatttacaggcttcacctgtactgtcagggcaagagaaagcctggtaaaccagctacagcagtttaccagtgtgatggctgtgacacagctccactccacgggtggacacagcagagggcaactgggctggcctggttcagtgtgaatcaaaccgcttaacccacacatggtacatgtgattttcttttgtgagccttacaccaagccaaactattgtcaaagcatcatttctatagaaataaagccttatcttgacctgttctattaaaacctgccacatccgccctttcctacctagatttaatgagcccaagtttttttacatggaagaaatgactctggggcaaagacccctaatgaactagtggcagagccaggaataaaacttgagtaactaatgagtcacttatgggcagagtatgcaaaaaccttaagtggaaaccaaatagaccctggtatcaagaaagcacaaagtattaatagaagtttctggttggggtgatctaggttcaacagaaataagatgatttctaagtataaagccatttaagaattccagagtagggtgggaaagcaaaaagccagctctgaacaggtaacagctacatggtgactgagtctatgggcaaaagttcttgcatcacaggcttttgggaactagcctatcacagggccctgtacaaataaacttggctgcaatccca

SEQ ID NO: 284279 - DNA, 3281 bp, Artificial Sequence
  derived and/or modified sequence
gggtaggcgctgcccgcgcgcagaggccgcgcccctcctggccccggcttcttggctgtcaaacagatgcagcaacgtcggctcctgccgaggagcccaaggggtcccgggatccgccgcacaggctggcactgcttgaagaggaggctactcggagactgcgccgcgcggtggattcattgccctcggaggttcaaccagttatgagtgagggattggccagaagatcggggcgcaggcaagcaggagtgctctattaggataagcaagtttgacaggaagaagctgctcttctccgaattacacagaggtgatgtgttcgtattgcacgtagacgtgtgtataacaggacctccttccccgcgccccgccaccccgacacacacaggagctgcctaaagtatccttgccttgcagattggaggctccccaaatattttgtgatctgaggatccagctcaagtgaggtgccataggacgtgttcctgagtttgcattgcacggagaccttcctggaatttttcatttgcaagtcggcttaaccaattttgcattgagtcctaggctgcttgcactctgaatttgggctattcaggtagtgtgctcaaagttgaaaccgcatacagcacaactcaagtttgcatcagactgggaagcgaacttaagccagcggtgcgtggcccaggagtgggaaaggaaatggatgcctgaagtggaagaggtggtgcagagggggcaccgcccatgctgccctgcttccaactgctgcgcatagggggcggcaggggcggtgatctctacaccttccacccccccgccggggctggctgcacctatcgcttgggccacagggccgacctgtgtgatgtggccctgcggccccagcaggagcctggcctcatctctgggatccacgccgaactgcatgccgagccccggggtgatgactggagggtcagcctggaagaccacagcagccaaggtactttggtcaataatgtccgactcccaagaggtcacaggctggaattgagtgatggagacctcctgacctttggccctgaagggcccccaggaaccagcccctcggagttctacttcatgttccaacaagtacgagtcaagcctcaggactttgctgccattaccatcccacggtctaggggagaagcccgggttggggctggtttccggcctatgctgccctcccagggggctccacagcggcctctcagcaccttctcccctgcccccaaggccacactgatcctaaactccataggcagcctcagcaagctccggccccagcccctcaccttctcccctagttggggtggaccaaagagcctgcctgttcccgccccacctggggaagtggggaccacgccttctgctccaccccaacgcaatcggaggaaatctgttcaccgagtgttggcggaactggatgatgagagtgagcctcctgagaacccgccaccggtccttatggagcccaggaagaaactccgtgtagacaaagccccactgactcccactggaaatcgacgtggccgtcctcggaagtacccagtgagcgctcccatggctccccctgcagttgggggcggggagccctgtgcagctccttgttgctgcctgccccaggaagagacagtggcctgggttcagtgtgatggctgtgacgtctggttccatgtggcctgtgttggctgcagcatccaggctgccagggaggccgacttccgatgcccagggtgccgggctggcattcagacctaaggtccaccgccaaggcaccatcggacacacctgcccatgagtagacacagcagcgagcaaataggtctgataaataccccccttcccttccctccccaagagggaatgactacagggaagaaggatggattgatgtggactcattcagggcctggagcagaccctggtggccaagacagaagagatggtttcctgccaaagatattgccacctccaggaaattgccagtgagctggaagttcccactattacaagccataaggccatgttgccatggacaccagaatatctgtagtcagagcacctatcagttgcaaaagccatgcctgcaaccgatggaaaatgtaagagggagttcttaaggttcttggtggcatcacccaaggcattctgggaaaacctagggcctggccccaaaacttccctactctgtggctagtcctgctgccaacaaaatcgtagcgacctggcttttcacagctttgcttttatttccaagtcaaggacaagccgcttcattcactcctgggcatttactcttcttgtgggtctgtgatattccttgctttccagggagaatgtgcttggcaaggtctggagaactaattcagaatcttaggggaaggggagagatggaaatacaaacctgcttactggaaaggtgcaaatatatgggttgagctggaggtaggaatacaggtaattaaggtttctagtttaagggaaaacagatctattgccatttaaataaggtaactgggatttggttaagttcacaaagatagcagaagatttatttacaggcttcacctgtactgtcagggcaagagaaagcctggtaaaccagctacagcagtttaccagtgtgatggctgtgacacagctccactccacgggtggacacagcagagggcaactgggctggcctggttcagtgtgaatcaaaccgcttaacccacacatggtacatgtgattttcttttgtgagccttacaccaagccaaactattgtcaaagcatcatttctatagaaataaagccttatcttgacctgttctattaaaacctgccacatccgccctttcctacctagatttaatgagcccaagtttttttacatggaagaaatgactctggggcaaagacccctaatgaactagtggcagagccaggaataaaacttgagtaactaatgagtcacttatgggcagagtatgcaaaaaccttaagtggaaaccaaatagaccctggtatcaagaaagcacaaagtattaatagaagtttctggttggggtgatctaggttcaacagaaataagatgatttctaagtataaagccatttaagaattccagagtagggtgggaaagcaaaaagccagctctgaacaggtaacagctacatggtgactgagtctatgggcaaaagttcttgcatcacaggcttttgggaactagcctatcacagggccctgtacaaataaacttggctgcaatccca

SEQ ID NO: 284280 - DNA, 3040 bp, Artificial Sequence
  derived and/or modified sequence
aggaggggtaggcgctgcccgcgcgcagaggccgcgcccctcctggccccggcttcttggctgtcaaacagatgcagcaacgtcggctcctgccgaggagcccaaggggtcccgggatccgccgcacaggctggcactgcttgaagaggaggctactcggagactgcgccgcgcggattggaggctccccaaatattttgtgatctgaggatccagctcaagtgaggtgccataggacgtgttcctgagtttgcattgcacggagaccttcctggaatttttcatttgcaagtcggcttaaccaattttgcattgagtcctaggctgcttgcactctgaatttgggctattcaggtagtgtgctcaaagttgaaaccgcatacagcacaactcaagtttgcatcagactgggaagcgaacttaagccagcggtgcgtggcccaggagtgggaaaggaaatggatgcctgaagtggaagaggtggtgcagagggggcaccgcccatgctgccctgcttccaactgctgcgcatagggggcggcaggggcggtgatctctacaccttccacccccccgccggggctggctgcacctatcgcttgggccacagggccgacctgtgtgatgtggccctgcggccccagcaggagcctggcctcatctctgggatccacgccgaactgcatgccgagccccggggtgatgactggagggtcagcctggaagaccacagcagccaaggtactttggtcaataatgtccgactcccaagaggtcacaggctggaattgagtgatggagacctcctgacctttggccctgaagggcccccaggaaccagcccctcggagttctacttcatgttccaacaagtacgagtcaagcctcaggactttgctgccattaccatcccacggtctaggggagaagcccgggttggggctggtttccggcctatgctgccctcccagggggctccacagcggcctctcagcaccttctcccctgcccccaaggccacactgatcctaaactccataggcagcctcagcaagctccggccccagcccctcaccttctcccctagttggggtggaccaaagagcctgcctgttcccgccccacctggggaagtggggaccacgccttctgctccaccccaacgcaatcggaggaaatctgttcaccgagtgttggcggaactggatgatgagagtgagcctcctgagaacccgccaccggtccttatggagcccaggaagaaactccgtgtagacaaagccccactgactcccactggaaatcgacgtggccgtcctcggaagtacccagtgagcgctcccatggctccccctgcagttgggggcggggagccctgtgcagctccttgttgctgcctgccccaggaagagacagtggcctgggttcagtgtgatggctgtgacgtctggttccatgtggcctgtgttggctgcagcatccaggctgccagggaggccgacttccgatgcccagggtgccgggctggcattcagacctaaggtccaccgccaaggcaccatcggacacacctgcccatgagtagacacagcagcgagcaaataggtctgataaataccccccttcccttccctccccaagagggaatgactacagggaagaaggatggattgatgtggactcattcagggcctggagcagaccctggtggccaagacagaagagatggtttcctgccaaagatattgccacctccaggaaattgccagtgagctggaagttcccactattacaagccataaggccatgttgccatggacaccagaatatctgtagtcagagcacctatcagttgcaaaagccatgcctgcaaccgatggaaaatgtaagagggagttcttaaggttcttggtggcatcacccaaggcattctgggaaaacctagggcctggccccaaaacttccctactctgtggctagtcctgctgccaacaaaatcgtagcgacctggcttttcacagctttgcttttatttccaagtcaaggacaagccgcttcattcactcctgggcatttactcttcttgtgggtctgtgatattccttgctttccagggagaatgtgcttggcaaggtctggagaactaattcagaatcttaggggaaggggagagatggaaatacaaacctgcttactggaaaggtgcaaatatatgggttgagctggaggtaggaatacaggtaattaaggtttctagtttaagggaaaacagatctattgccatttaaataaggtaactgggatttggttaagttcacaaagatagcagaagatttatttacaggcttcacctgtactgtcagggcaagagaaagcctggtaaaccagctacagcagtttaccagtgtgatggctgtgacacagctccactccacgggtggacacagcagagggcaactgggctggcctggttcagtgtgaatcaaaccgcttaacccacacatggtacatgtgattttcttttgtgagccttacaccaagccaaactattgtcaaagcatcatttctatagaaataaagccttatcttgacctgttctattaaaacctgccacatccgccctttcctacctagatttaatgagcccaagtttttttacatggaagaaatgactctggggcaaagacccctaatgaactagtggcagagccaggaataaaacttgagtaactaatgagtcacttatgggcagagtatgcaaaaaccttaagtggaaaccaaatagaccctggtatcaagaaagcacaaagtattaatagaagtttctggttggggtgatctaggttcaacagaaataagatgatttctaagtataaagccatttaagaattccagagtagggtgggaaagcaaaaagccagctctgaacaggtaacagctacatggtgactgagtctatgggcaaaagttcttgcatcacaggcttttgggaactagcctatcacagggccctgtacaaataaacttggctgcaatccca

SEQ ID NO: 284281 - DNA, 3040 bp, Artificial Sequence
  derived and/or modified sequence
aggaggggtaggcgctgcccgcgcgcagaggccgcgcccctcctggccccggcttcttggctgtcaaacagatgcagcaacgtcggctcctgccgaggagcccaaggggtcccgggatccgccgcacaggctggcactgcttgaagaggaggctactcggagactgcgccgcgcggattggaggctccccaaatattttgtgatctgaggatccagctcaagtgaggtgccataggacgtgttcctgagtttgcattgcacggagaccttcctggaatttttcatttgcaagtcggcttaaccaattttgcattgagtcctaggctgcttgcactctgaatttgggctattcaggtagtgtgctcaaagttgaaaccgcatacagcacaactcaagtttgcatcagactgggaagcgaacttaagccagcggtgcgtggcccaggagtgggaaaggaaatggatgcctgaagtggaagaggtggtgcagagggggcaccgcccatgctgccctgcttccaactgctgcgcatagggggcggcaggggcggtgatctctacaccttccacccccccgccggggctggctgcacctatcgcttgggccacagggccgacctgtgtgatgtggccctgcggccccagcaggagcctggcctcatctctgggatccacgccgaactgcatgccgagccccggggtgatgactggagggtcagcctggaagaccacagcagccaaggtactttggtcaataatgtccgactcccaagaggtcacaggctggaattgagtgatggagacctcctgacctttggccctgaagggtccccaggaaccagcccctcggagttctacttcatgttccaacaagtacgagtcaagcctcaggactttgctgccattaccatcccacggtctaggggagaagcccgggttggggctggtttccggcctatgctgccctcccagggggctccacagcggcctctcagcaccttctcccctgcccccaaggccacactgatcctaaactccataggcagcctcagcaagctccggccccagcccctcaccttctcccctagttggggtggaccaaagagcctgcctgttcccgccccacctggggaagtggggaccacgccttctgctccaccccaacgcaatcggaggaaatctgttcaccgagtgttggcggaactggatgatgagagtgagcctcctgagaacccgccaccggtccttatggagcccaggaagaaactccgtgtagacaaagccccactgactcccactggaaatcgacgtggccgtcctcggaagtacccagtgagcgctcccatggctccccctgcagttgggggcggggagccctgtgcagctccttgttgctgcctgccccaggaagagacagtggcctgggttcagtgtgatggctgtgacgtctggttccatgtggcctgtgttggctgcagcatccaggctgccagggaggccgacttccgatgcccagggtgccgggctggcattcagacctaaggtccaccgccaaggcaccatcggacacacctgcccatgagtagacacagcagcgagcaaataggtctgataaataccccccttcccttccctccccaagagggaatgactacagggaagaaggatggattgatgtggactcattcagggcctggagcagaccctggtggccaagacagaagagatggtttcctgccaaagatattgccacctccaggaaattgccagtgagctggaagttcccactattacaagccataaggccatgttgccatggacaccagaatatctgtagtcagagcacctatcagttgcaaaagccatgcctgcaaccgatggaaaatgtaagagggagttcttaaggttcttggtggcatcacccaaggcattctgggaaaacctagggcctggccccaaaacttccctactctgtggctagtcctgctgccaacaaaatcgtagcgacctggcttttcacagctttgcttttatttccaagtcaaggacaagccgcttcattcactcctgggcatttactcttcttgtgggtctgtgatattccttgctttccagggagaatgtgcttggcaaggtctggagaactaattcagaatcttaggggaaggggagagatggaaatacaaacctgcttactggaaaggtgcaaatatatgggttgagctggaggtaggaatacaggtaattaaggtttctagtttaagggaaaacagatctattgccatttaaataaggtaactgggatttggttaagttcacaaagatagcagaagatttatttacaggcttcacctgtactgtcagggcaagagaaagcctggtaaaccagctacagcagtttaccagtgtgatggctgtgacacagctccactccacgggtggacacagcagagggcaactgggctggcctggttcagtgtgaatcaaaccgcttaacccacacatggtacatgtgattttcttttgtgagccttacaccaagccaaactattgtcaaagcatcatttctatagaaataaagccttatcttgacctgttctattaaaacctgccacatccgccctttcctacctagatttaatgagcccaagtttttttacatggaagaaatgactctggggcaaagacccctaatgaactagtggcagagccaggaataaaacttgagtaactaatgagtcacttatgggcagagtatgcaaaaaccttaagtggaaaccaaatagaccctggtatcaagaaagcacaaagtattaatagaagtttctggttggggtgatctaggttcaacagaaataagatgatttctaagtataaagccatttaagaattccagagtagggtgggaaagcaaaaagccagctctgaacaggtaacagctacatggtgactgagtctatgggcaaaagttcttgcatcacaggcttttgggaactagcctatcacagggccctgtacaaataaacttggctgcaatccca

SEQ ID NO: 284282 - protein, 688 aa, Artificial Sequence [sequence omitted]

SEQ ID NO: 284283 - protein, 688 aa, Artificial Sequence
  derived and/or modified sequence
MLPTEVPQSHPGPSALLLLQLLLPPTSAFFPNIWSLLAAPGSITHQDLTEEAALNVTLQLFLEQPPPGRPPLRLEDFLGRTLLADDLFAAYFGPGSSRRFRAALGEVSRANAAQDFLPTSRNDPDLHFDAERLGQGRARLVGALRETVVAARALDHTLARQRLGAALHALQDFYSHSNWVELGEQQPHPHLLWPRQELQNLAQVADPTCSDCEELSCPRNWLGFTLLTSGYFGTHPPKPPGKCSHGGHFDRSSSQPPRGGINKDSTSPGFSPHHMLHLQAAKLALLASIQAFSLLRSRLGDRDFSRLLDITPASSLSFVLDTTGSMGEEINAAKIQARHLVEQRRGSPMEPVHYVLVPFHDPGFGPVFTTSDPDSFWQQLNEIHALGGGDEPEMCLSALQLALLHTPPLSDIFVFTDASPKDAFLTNQVESLTQERRCRVTFLVTEDTSRVQGRARREILSPLRFEPYKAVALASGGEVIFTKDQHIRDVAAIVGESMAALVTLPLDPPVVVPGQPLVFSVDGLLQKITVRIHGDISSFWIKNPAGVSQGQEEGGGPLGHTRRFGQFWMVTMDDPPQTGTWEIQVTAEDTPGVRVQAQTSLDFLFHFGIPMEDGPHPGLYPLTQPVAGLQTQLLVESQSWGSSAAFLPRHPSRGPRGCRTRPGALGARGTSGARSPRSLAVAHAAVNP

SEQ ID NO: 284284 - protein, 128 aa, Artificial Sequence
  derived and/or modified sequence
MASSNTVLMRLVASAYSIAQKAGMIVRRVIAEGDLGIVEKTCATDLQTKADRLAQMSICSSLARKFPKLTIIGEEDLPSEEVDQELIEDSQWEEILKQPCPSQYSAIKEEDLVVWVDPLDGTKEYTEG

SEQ ID NO: 284285 - protein, 627 aa, Artificial Sequence
  derived and/or modified sequence
MPYLYRAPGPQAHPVPKDARITHSSGQSFEQMRQECLQRGTLFEDADFPASNSSLFYSERPQIPFVWKRPGFWQHSEWLDVVIDDRLPTFRDRLVFLHSADHNEFWSALLEKAYAKLNGSYEALKGGSAIEAMEDFTGGVAETFQTKEAPENFYEILEKALKRGSLLGCFIDTRSAAESEARTPFGLIKGHAYSVTGIDQVSFRGQRIELIRIRNPWGQVEWNGSWSDSSPEWRSVGPAEQKRLCHTALDDGEFWMAFKDFKAHFDKVEICNLTPDALEEDAIHKWEVTVHQGSWVRGSTAGGCRNFLDTFWTNPQIKLSLTEKDEGQEECSFLVALMQKDRRKLKRFGANVLTIGYAIYECPDKDEHLNKDFFRYHASRARSKTFINLREVSDRFKLPPGEYILIPSTFEPHQEADFCLRIFSEKKAITRDMDGNVDIDLPEPPKPTPPDQETEEEQRFRALFEQVAGEDMEVTAEELEYVLNAVLQKKKDIKFKKLSLISCKNIISLMDTSGNGKLEFDEFKVFWDKLKQWINLFLRFDADKSGTMSTYELRTALKAAGFQLSSHLLQLIVLRYADEELQLDFDDFLNCLVRLENASRVFQALSTKNKEFIHLNINEFIHLTMNI

SEQ ID NO: 284286 - DNA, 1884 bp, Artificial Sequence
  derived and/or modified sequence
atgccctacttgtaccgtgcacccggaccacaagcacatccggtcccaaaggacgcaaggattacgcactctagcggccagagtttcgagcagatgcgccaggagtgcctgcaacgtggcactctctttgaagacgcagattttcccgcctcaaattcaagcctattctacagcgagcgacctcaaataccgtttgtgtggaaacggccgggcttttggcagcactctgagtggctggacgttgtgatcgatgatcgacttcctacattccgcgatcggttggtgttcctccactcagcggatcataacgaattttggtcagcgctgctggagaaggcgtacgcaaaactgaatggttcttatgaggctctgaagggcggctccgctattgaagcaatggaagacttcaccggcggcgtggccgaaacatttcagaccaaggaggcacctgagaatttttacgaaatactggagaaagcattgaagagaggctcactgctgggctgctttattgacactcgcagtgccgccgagtcggaagccaggactcccttcggtctgatcaaaggccatgcctattccgtcaccgggatagaccaggtcagttttaggggtcagcggatcgagcttatacggattagaaacccatgggggcaggtggagtggaacgggagctggagcgattctagccccgagtggaggtcggtagggccagctgaacagaaacgtctttgccatactgccctcgacgatggcgaattttggatggctttcaaggacttcaaggcacacttcgacaaggttgaaatctgcaacctgactccagatgctctggaggaagacgcgattcataaatgggaagtcaccgtccaccagggcagttgggtgcggggatccaccgctggcggctgcagaaacttcctggatactttctggacgaaccctcagattaagctcagtctgacggagaaagatgagggacaggaggaatgttcctttttggtggctctaatgcagaaggacaggagaaaactgaagcggttcggagcaaacgtactgacaattggatacgcgatctacgaatgcccggacaaggacgaacacctgaacaaggatttctttaggtaccatgccagtcgtgccaggtctaagacttttatcaacctgagggaggtatccgatcggtttaagcttccacctggagagtatattcttatcccctcaacatttgagcctcaccaggaagcagatttctgcctccggatcttctcagaaaaaaaagctattacccgtgatatggatggaaacgtggacatagatctccccgagcccccaaagcctacgcctcccgatcaggaaactgaagaggagcaacgattccgggcactgttcgagcaagtagcaggcgaggatatggaagtcacagctgaggaactggagtacgtgcttaacgccgtgttgcaaaagaagaaggacattaagtttaaaaagttgtctctcatctcctgtaaaaacatcatttcattgatggatacaagtggtaacggcaagcttgaatttgatgagttcaaagtattttgggacaagctgaagcagtggattaacctctttctgaggttcgatgcagataagtcaggcacaatgtctacatatgagcttcgcacagcactgaaagccgctggtttccaattatctagccatttgctgcagttaatcgtattgcggtacgccgacgaggagcttcagctcgatttcgatgatttcctgaactgtcttgtgcgacttgaaaacgcaagtagagtgtttcaggctttgtcgacaaagaacaaggaattcattcacctgaatatcaacgaatttattcatctgactatgaatatctag

SEQ ID NO: 284287 - DNA, 1884 bp, Artificial Sequence
  derived and/or modified sequence
atgccctacctgtaccgggcccctggcccccaggcccaccctgtgcccaaggatgcccgcatcacccacagcagcggccagagctttgagcagatgaggcaggagtgcctgcagaggggcaccctgtttgaagatgctgacttccctgccagcaacagcagcctcttctacagcgagcggccccagatcccctttgtgtggaagaggcctggcttctggcagcacagcgagtggctggatgtggtgattgatgaccggctgcccaccttccgggaccggctggtgttcctgcacagcgctgaccacaatgagttctggagcgccctgctggagaaggcctatgccaagctgaatggcagctatgaggccctgaagggcggcagcgccatcgaggccatggaggacttcaccggaggagtggccgagaccttccagaccaaggaggcccctgagaacttctatgagatcctggagaaggccctgaagaggggcagcctgctgggctgcttcatcgacaccaggtctgctgctgagagcgaggcccggaccccatttggcctcatcaagggccacgcctacagcgtgacaggcatcgaccaggtgtccttccggggccagagaattgagctgatccgcatccggaacccctggggccaggtggagtggaatggctcctggagcgacagcagccctgagtggaggtctgtgggccctgctgagcagaagaggctgtgccacacagccctggatgatggagagttctggatggccttcaaggacttcaaggcccactttgacaaggtggagatctgcaacctgaccccagatgccctggaggaggatgccatccacaagtgggaggtgacagtgcaccagggctcctgggtgcggggcagcacagctgggggctgcaggaacttcctggacaccttctggaccaacccccagatcaagctgagcctgacagagaaggatgagggccaggaggagtgcagcttcctggtggccctgatgcagaaggacaggaggaagctgaagagatttggagccaacgtgctgaccatcggctacgccatctatgaatgtcctgacaaggatgagcacctgaacaaggacttcttccgctaccacgccagccgggcccggagcaagaccttcatcaacctgcgggaggtgtctgaccgcttcaagctgcccccaggagagtacatcctgatccccagcacctttgagccccaccaggaggccgacttctgcctgcgcatcttcagcgagaagaaggccatcacccgggacatggatggaaatgtggacatcgacctgcctgagccccccaagcccaccccaccagaccaggagacagaggaggagcagcgcttccgggccctgtttgagcaggtggccggggaggacatggaggtgacagctgaggagctggagtatgtgctgaatgctgtgctgcagaagaagaaggacatcaagttcaagaagctgagcctcatcagctgcaagaacatcatcagcctgatggacaccagcggaaatggcaagctggagtttgatgagttcaaggtgttctgggacaagctgaagcagtggatcaacctcttcctgcgctttgatgctgacaagagcggcaccatgagcacctatgagctgaggacagccctgaaggccgccggcttccagctgagcagccacctgctgcagctgattgtgctgcgctatgcagatgaggagctgcagctggactttgatgacttcctgaactgcctggtgcggctggagaatgccagcagggtcttccaggccctgagcaccaagaacaaggagttcatccacctgaacatcaatgagttcatccacctgaccatgaacatctag

SEQ ID NO: 284288 - DNA, 1884 bp, Artificial Sequence
  derived and/or modified sequence
atgccctacctgtaccgggcccccggcccccaggcccaccccgtgccaaaggacgcgaggatcactcacagctcaggacagtccttcgagcagatgaggcaagaatgccttcaaagaggcacactgtttgaggacgcggacttccccgcctcaaatagctctttattttactccgagcgcccgcagattcccttcgtatggaagcgcccaggcttttggcagcacagcgagtggctggatgtcgtcatcgatgatcggttacccacgttccgggaccggcttgtctttttgcactccgccgaccataacgaattttggagtgctctgctggagaaagcatatgccaaactgaacggcagctacgaggccttgaaaggagggtctgccatcgaagccatggaagacttcactgggggagttgctgaaacattccaaaccaaggaagcccccgagaacttttacgagatactggagaaagctcttaagaggggcagcctgctcggatgctttatcgacactcgcagcgccgccgagagcgaagcccggaccccatttggcctcatcaaggggcatgcttacagcgtaaccggcatcgaccaggtgtccttccgcggacagcgcatcgagcttatcagaatacggaacccgtggggtcaggtggagtggaacggatcatggtcagattcctcaccagagtggagatcagttggccctgctgagcagaaaagactgtgccacaccgcgctagacgatggagagttctggatggccttcaaagattttaaagcgcattttgataaggtggaaatttgcaatctgactcccgacgccctcgaagaagatgcaattcacaagtgggaagtgactgtgcaccagggttcttgggttaggggatcaacagccggagggtgtcgcaattttctagacacattttggaccaaccctcaaatcaagctctccctgacggaaaaggatgaaggacaggaggagtgcagcttcctggtcgctttaatgcagaaagacagacgaaaactgaaacgctttggggcaaacgtactcaccataggttatgcaatctacgaatgtcctgacaaggacgaacatctaaataaggacttcttcagatatcacgcaagccgtgctagaagcaaaaccttcattaacctgagggaggtttctgatcggttcaagctacctccgggcgagtacatactgatcccaagcacattcgaaccacaccaggaagccgacttctgtcttcgtattttctctgaaaagaaggccatcaccagagacatggacggaaacgtcgatatcgacttgccggagccccccaaacctacacctccagaccaggaaacagaagaggaacagcggtttagagccctgttcgagcaggttgctggggaagacatggaggtgactgccgaagagctggaatatgtcctaaacgctgtgcttcagaagaaaaaagatattaagtttaagaaactaagcttaatcagttgcaaaaacatcatttccctgatggatacgtctggaaacggtaagcttgagttcgacgagtttaaggtgttctgggataaactcaaacagtggatcaaccttttcctacgatttgacgccgataaaagcggaactatgtccacatacgagcttcgtacagcactgaaagcagctggtttccaacttagtagtcacctactgcagcttatagttctccgatatgccgacgaagagctgcagcttgactttgacgattttctgaattgcctggttcgcttggagaatgcatcacgcgtattccaggccttatccaccaaaaataaggagttcattcacttaaacattaatgaatttatacacctcaccatgaacatctag

SEQ ID NO: 284289 - DNA, 1884 bp, Artificial Sequence
  derived and/or modified sequence
atgccatacctttaccgcgctccaggtccacaggcccaccccgtcccaaaggatgccaggattacccacagctccggtcagtcctttgaacaaatgcggcaggagtgtctccagaggggtaccctctttgaggatgctgacttcccagcatcaaatagttccctcttctacagcgaacggcctcagattccattcgtctggaaacgacctggcttttggcaacattctgagtggctggatgtcgtcatcgatgaccgcctaccgacattcagggaccgtctggtcttccttcatagtgccgaccacaacgaattctggagcgcgttactggagaaagcttatgcaaaacttaatggaagctatgaggctttaaaggggggatcggccatcgaagccatggaggacttcaccggcggtgtagcagaaacgttccaaaccaaagaggccccagaaaacttctatgaaattctggagaaggccctcaagcgcggttcccttttgggttgtttcatagacacgcggagcgccgctgaatccgaggccagaacccctttcggtctgatcaagggccatgcatacagcgttacagggatcgatcaggtttctttcagggggcagaggatagaactgattcggatcagaaacccttgggggcaggttgagtggaatggcagctggtccgactcctctcctgagtggcggtcagtcgggcctgccgaacaaaagcgcctgtgtcacacagcattagacgatggagaattttggatggccttcaaagacttcaaagcccacttcgacaaggtcgagatttgcaatctgacccctgatgcccttgaggaagacgctattcataagtgggaagtcactgtgcaccagggatcttgggtgcggggttccacagctggagggtgccgcaactttctggacactttctggaccaacccgcaaatcaagctctcactaacagaaaaagatgaaggtcaggaagaatgctcctttctagtggctcttatgcagaaggatcggagaaaattgaaaagattcggtgctaacgtgctgaccataggctatgccatctatgagtgtccggataaagatgaacacctcaataaggattttttcaggtaccacgcatccagggccaggagcaagacttttattaacttaagggaggtgtccgataggttcaagttacccccaggtgagtatatcctgatcccttctacgtttgagccacaccaggaagccgatttctgtttgagaatattctccgaaaagaaagctatcactagagacatggatgggaacgtggacatcgatctcccagagcctccaaagccgactccgcctgaccaggagactgaggaggaacagcgctttagagcgctgttcgagcaggttgcaggggaggatatggaggtgactgctgaggagcttgaatacgtattaaatgccgtgctgcagaagaaaaaggatatcaaatttaaaaagctaagcctgatcagctgcaagaacattatttctctaatggataccagcgggaacggtaagctagaattcgacgagtttaaagtgttttgggacaagctgaaacagtggatcaatctcttcctgcggttcgacgccgataaatcaggtaccatgagcacatacgagttacgtactgcgctgaaggctgctggatttcaactgagctcccacttgctacagctgatagtcctgcgctacgcggatgaggaactccagctggactttgacgattttctcaactgcttagtgcgcttagagaatgctagtcgtgttttccaagcgctttccaccaaaaataaagagttcattcacctaaacatcaacgaattcattcacttgaccatgaacatttag

SEQ ID NO: 284290 - DNA, 2123 bp, Artificial Sequence
  derived and/or modified sequence
gctcgcttcttcactttcttttccatccactgccggacccaagccagccttccagggagcagccatgccttacctctaccgggccccagggcctcaggcacacccggttcccaaggacgcccggatcacccactcctcaggccagagctttgagcaaatgaggcaggagtgcctgcagagaggcaccctgtttgaggatgcagacttcccagccagcaattcctccctgttctacagtgagaggccgcagatcccctttgtgtggaaacgaccagggttctggcagcacagtgagtggctggacgtggtgatcgatgaccgcctgcccaccttcagggaccgcttggttttcctccactctgccgaccacaacgagttctggagcgccttgctggaaaaagcctacgccaagctaaatgggagctatgaagctctgaagggaggcagcgccatcgaggccatggaagacttcactgggggtgtggcagagaccttccaaactaaagaggcccccgagaacttctatgagattctagagaaggctttgaagagaggctccctgctgggctgcttcattgataccagaagtgctgcagaatctgaggcccggacgccgtttggtcttattaagggtcatgcctacagtgtaacgggaattgaccaggtaagcttccgaggccagagaatcgagctcatccgaatccggaacccttggggccaggttgagtggaacgggtcgtggagcgacagttctccggagtggcgttctgttggtccagctgagcagaagcgtctgtgtcacactgctctggatgatggggaattctggatggcatttaaggacttcaaggcccactttgataaagtggagatctgcaacctcactcccgatgccctggaggaagacgcgatccacaaatgggaggtgacggtccatcagggaagctgggttcgcggctccacggctgggggctgccgcaatttcctggataccttttggaccaatccacaaataaaattgtctctgactgagaaagatgaggggcaggaggagtgtagtttccttgtagccctgatgcagaaagatagaaggaaactcaagagatttggtgccaatgtgctgacaatcggctatgccatttatgagtgccctgacaaagacgaacacctgaacaaagacttcttcagataccacgcttctcgggccagaagcaagacgttcatcaacctgagagaagtctccgaccggttcaagctgccccctggggagtacatcctgattcccagcacttttgagccccaccaggaagctgatttctgtctgagaatcttttcagagaaaaaagccattacccgggatatggatggaaatgtagacattgaccttcctgagcctccaaagccaactccacctgaccaggagacagaggaggagcagcggtttcgggctctgtttgaacaagtcgctggtgaggacatggaggtgacagcagaggaacttgagtatgttttaaatgctgtgctgcaaaagaaaaaggacatcaaattcaagaagctaagcctgatctcctgtaaaaacatcatttccctgatggacaccagcggcaatgggaagctggagtttgatgaattcaaagtgttctgggacaagctgaagcagtggattaaccttttccttcggtttgatgctgacaagtccggcaccatgtctacctatgaactacggactgcactgaaagctgcaggctttcagctgagcagccacctcctgcagctgattgtgctcaggtatgcggatgaggagctccagctggacttcgatgacttcctcaactgcctggtccggctggagaatgcgagccgggtgttccaggctctcagtacaaagaacaaggagttcattcatctcaatataaatgagttcatccatttgacaatgaacatctgaggctgccttgtagagatgcagcctgcccagctgaatcttggcttctggaccttgaccttcagaacttctcttggtgtggaaccattacgcccagggttcactcccctctcatcgtccggccttctcccttcatcttgatctgggaagaatgaaatgaactcagctacactctctg

SEQ ID NO: 284291 - DNA, 1884 bp, Artificial Sequence
  derived and/or modified sequence
atgccctacctgtacagagcccccggcccccaggcccaccccgtgcccaaggacgccagaatcacccacagcagcggccagagcttcgagcagatgagacaggagtgcctgcagagaggcaccctgttcgaggacgccgacttccccgccagcaacagcagcctgttctacagcgagagaccccagatccccttcgtgtggaagagacccggcttctggcagcacagcgagtggctggacgtggtgatcgacgacagactgcccaccttcagagacagactggtgttcctgcacagcgccgaccacaacgagttctggagcgccctgctggagaaggcctacgccaagctgaacggcagctacgaggccctgaagggcggcagcgccatcgaggccatggaggacttcaccggcggcgtggccgagaccttccagaccaaggaggcccccgagaacttctacgagatcctggagaaggccctgaagagaggcagcctgctgggctgcttcatcgacaccagaagcgccgccgagagcgaggccagaacccccttcggcctgatcaagggccacgcctacagcgtgaccggcatcgaccaggtgagcttcagaggccagagaatcgagctgatcagaatcagaaacccctggggccaggtggagtggaacggcagctggagcgacagcagccccgagtggagaagcgtgggccccgccgagcagaagagactgtgccacaccgccctggacgacggcgagttctggatggccttcaaggacttcaaggcccacttcgacaaggtggagatctgcaacctgacccccgacgccctggaggaggacgccatccacaagtgggaggtgaccgtgcaccagggcagctgggtgagaggcagcaccgccggcggctgcagaaacttcctggacaccttctggaccaacccccagatcaagctgagcctgaccgagaaggacgagggccaggaggagtgcagcttcctggtggccctgatgcagaaggacagaagaaagctgaagagattcggcgccaacgtgctgaccatcggctacgccatctacgagtgccccgacaaggacgagcacctgaacaaggacttcttcagataccacgccagcagagccagaagcaagaccttcatcaacctgagagaggtgagcgacagattcaagctgccccccggcgagtacatcctgatccccagcaccttcgagccccaccaggaggccgacttctgcctgagaatcttcagcgagaagaaggccatcaccagagacatggacggcaacgtggacatcgacctgcccgagccccccaagcccaccccccccgaccaggagaccgaggaggagcagagattcagagccctgttcgagcaggtggccggcgaggacatggaggtgaccgccgaggagctggagtacgtgctgaacgccgtgctgcagaagaagaaggacatcaagttcaagaagctgagcctgatcagctgcaagaacatcatcagcctgatggacaccagcggcaacggcaagctggagttcgacgagttcaaggtgttctgggacaagctgaagcagtggatcaacctgttcctgagattcgacgccgacaagagcggcaccatgagcacctacgagctgagaaccgccctgaaggccgccggcttccagctgagcagccacctgctgcagctgatcgtgctgagatacgccgacgaggagctgcagctggacttcgacgacttcctgaactgcctggtgagactggagaacgccagcagagtgttccaggccctgagcaccaagaacaaggagttcatccacctgaacatcaacgagttcatccacctgaccatgaacatctag

SEQ ID NO: 284292 - protein, 222 aa, Artificial Sequence
  derived and/or modified sequence
MTSCEPFGKEGILIKIPAVISHRTESHVKPGRLTVLVSGLEIHDSSSLLMHRFEREDVDDIKVHSPYEISIRQRFIGKPDMAYRLISAKMPEVIPILEVQFSKKMELLEDALVLRSARTSSPAEKSCSVWHAASGLMGRTLHREPPAGDQEGTALHLQTSLPALSEADTQELTQILRRMKGLALEAESELERQDEALDGVAAAVDRATLTIDKHNRRMKRLT

SEQ ID NO: 284293 - DNA, 669 bp, Artificial Sequence
  derived and/or modified sequence
atgaccagctgcgagcccttcggcaaggagggcatcctgatcaagatccccgccgtgatcagccacagaaccgagagccacgtgaagcccggcagactgaccgtgctggtgagcggcctggagatccacgacagcagcagcctgctgatgcacagattcgagagagaggacgtggacgacatcaaggtgcacagcccctacgagatcagcatcagacagagattcatcggcaagcccgacatggcctacagactgatcagcgccaagatgcccgaggtgatccccatcctggaggtgcagttcagcaagaagatggagctgctggaggacgccctggtgctgagaagcgccagaaccagcagccccgccgagaagagctgcagcgtgtggcacgccgccagcggcctgatgggcagaaccctgcacagagagccccccgccggcgaccaggagggcaccgccctgcacctgcagaccagcctgcccgccctgagcgaggccgacacccaggagctgacccagatcctgagaagaatgaagggcctggccctggaggccgagagcgagctggagagacaggacgaggccctggacggcgtggccgccgccgtggacagagccaccctgaccatcgacaagcacaacagaagaatgaagagactgacctag

SEQ ID NO: 284294 - DNA, 669 bp, Artificial Sequence
  derived and/or modified sequence
atgacgtcctgcgagccctttggaaaggaggggatactcataaagatcccggccgttatctctcatagaactgagagccatgttaaacctggccgactgaccgtacttgtatctggcctagaaattcatgactcttcctccctcctgatgcacagatttgagagagaagacgtggacgatattaaggtccactccccatacgagatctcaatccgccaacgttttataggtaaaccggacatggcttataggcttatttctgccaagatgcctgaggtcattccgatactcgaggtgcagttctctaaaaagatggagcttctggaggatgccctggtcctgcgcagcgctcggacttcatcccccgccgagaaatcatgttcagtgtggcacgccgcaagcggcctaatgggcaggacactgcaccgtgagccccccgctggggaccaggaaggcacagccctgcacttacaaacctcactcccggccctctctgaagcagacactcaggagcttacacagattctacgcaggatgaaaggtcttgccctcgaagccgagagtgagctggagagacaggacgaagcacttgacggggtcgccgctgctgtcgacagagctacgctgacaatcgataaacataaccggaggatgaagagattgacctag

SEQ ID NO: 284295 - DNA, 669 bp, Artificial Sequence
  derived and/or modified sequence
atgaccagctgtgagccctttgggaaggagggcatcctgatcaagatcccagctgtgatcagccacaggacagagagccacgtgaagccaggccgcctgactgtgctggtgtctggcctggagatccatgacagcagcagcctgctgatgcacagatttgagcgggaggatgtggatgacatcaaggtgcacagcccctatgagatcagcatccggcagcgcttcatcggcaagccagacatggcctaccgcctcatcagcgccaagatgcctgaggtgatccccatcctggaggtgcagttcagcaagaagatggagctgctggaggatgccctggtgctgcggagcgcccggaccagcagccctgctgagaagagctgcagcgtgtggcacgccgccagcggcctgatgggccgcaccctgcaccgggagcccccagctggggaccaggagggcacagccctgcacctgcagaccagcctgcctgccctgtctgaggccgacacccaggagctgacccagatcctgcggaggatgaagggcctggccctggaggccgagagcgagctggagcggcaggatgaggccctggatggagtggccgctgctgtggaccgggccaccctgaccatcgacaagcacaacagaaggatgaagaggctgacctag

SEQ ID NO: 284296 - DNA, 669 bp, Artificial Sequence
  derived and/or modified sequence
atgaccagctgcgagcccttcggcaaggagggcatcctgatcaagatcccagccgtgatttctcacagaacagaatcacatgtgaaacctggccggttgaccgtgctcgtatcagggcttgagatccacgactcctcctccctcctaatgcaccggtttgagcgtgaagatgtcgacgacatcaaggtgcactccccatacgagatcagcattaggcagaggtttatcgggaagcccgacatggcgtaccgactgatttccgcaaagatgccggaggtcatccccatcctggaagtccagtttagtaagaaaatggagcttctggaagatgcgctggtactgcgaagcgccaggacaagctctcctgctgagaagtcatgctccgtgtggcatgctgctagcgggctgatgggtcgaaccttgcacagggaacctcccgccggggatcaagagggcaccgcactccacttgcaaacctccctgcctgcattgtcagaggccgatacccaggaattgacccagattctgagacgcatgaaaggcttagcactagaagctgagagtgagctcgaaagacaggacgaggccctcgacggagtggccgcggctgtagatagggccaccctcactattgacaagcataacaggcgcatgaagcggcttacctag

SEQ ID NO: 284297 - DNA, 669 bp, Artificial Sequence
  derived and/or modified sequence
atgacatcttgtgagccctttggcaaggaaggtatcttaattaagattccggcagtgatctctcacaggaccgaatcgcacgtaaaacccggtcgccttactgttctggtctccggtcttgaaattcatgatagttcatcgctccttatgcatagattcgaaagagaagatgtggacgacattaaagttcactctccttacgaaattagtatcagacagagattcatcggtaaaccggatatggcctaccgcctgatctccgctaaaatgcctgaagtgatcccaatcttggaggtgcaattttcgaagaaaatggagctgctggaagatgcccttgtgctcagaagcgccaggaccagctcacccgctgaaaaatcttgctcagtttggcatgccgctagcgggctcatgggcaggaccttacatcgcgaaccccctgccggtgatcaggaaggcacagctctgcatctgcagacatcactacctgcattgagcgaggcagacacacaggagctaacccagatactgaggagaatgaaagggttagctctggaggctgaatccgaactggagcggcaggacgaggcccttgatggcgtcgctgccgcagtcgaccgcgctacactcacgatcgacaagcacaataggcgcatgaaaaggctcacttag

SEQ ID NO: 284298 - protein, 361 aa, Artificial Sequence
  derived and/or modified sequence
MATLARLQARSSTVGNQYYFRNSVVDPFRKKENDAAVKIQSWFRGCQVRAYIRHLNRIVTIIQKWWRSFLGRKQYQLTVQVAYYTMMMNLYNAMAVRIQRRWRGYRVRKYLFNYYYLKEYLKVVSETNDAIRKALEEFAEMKEREEKKANLEREEKKRDYQARKMHYLLSTKQIPGIYNSPFRKEPDPWELQLQKAKPLTHRRPKVKQKDSTSLTDWLACTSARSFPRSEILPPINRKQCQGPFRDITEVLEQRYRPLEPTLRVAEPIDELKLAREELRREEWLQNVNDNMFLPFSSYHKNEKYIPSMHLSSKYGPISYKEQFRSENPKKWICDKDFQTVLPSFELFSKYGKLYSKAGQIV

SEQ ID NO: 284299 - DNA, 1086 bp, Artificial Sequence
  derived and/or modified sequence
atggccaccctggccagactgcaggccagaagcagcaccgtgggcaaccagtactacttcagaaacagcgtggtggaccccttcagaaagaaggagaacgacgccgccgtgaagatccagagctggttcagaggctgccaggtgagagcctacatcagacacctgaacagaatcgtgaccatcatccagaagtggtggagaagcttcctgggcagaaagcagtaccagctgaccgtgcaggtggcctactacaccatgatgatgaacctgtacaacgccatggccgtgagaatccagagaagatggagaggctacagagtgagaaagtacctgttcaactactactacctgaaggagtacctgaaggtggtgagcgagaccaacgacgccatcagaaaggccctggaggagttcgccgagatgaaggagagagaggagaagaaggccaacctggagagagaggagaagaagagagactaccaggccagaaagatgcactacctgctgagcaccaagcagatccccggcatctacaacagccccttcagaaaggagcccgacccctgggagctgcagctgcagaaggccaagcccctgacccacagaagacccaaggtgaagcagaaggacagcaccagcctgaccgactggctggcctgcaccagcgccagaagcttccccagaagcgagatcctgccccccatcaacagaaagcagtgccagggccccttcagagacatcaccgaggtgctggagcagagatacagacccctggagcccaccctgagagtggccgagcccatcgacgagctgaagctggccagagaggagctgagaagagaggagtggctgcagaacgtgaacgacaacatgttcctgcccttcagcagctaccacaagaacgagaagtacatccccagcatgcacctgagcagcaagtacggccccatcagctacaaggagcagttcagaagcgagaaccccaagaagtggatctgcgacaaggacttccagaccgtgctgcccagcttcgagctgttcagcaagtacggcaagctgtacagcaaggccggccagatcgtgtag

SEQ ID NO: 284300 - DNA, 1086 bp, Artificial Sequence
  derived and/or modified sequence
atggctaccttggcgcgactgcaggcgaggtctagcaccgtgggtaaccagtactactttcgcaacagcgtggttgaccccttccgcaagaaagagaacgacgcagccgtaaaaatccagtcatggtttcgaggttgccaagtccgggcatatataagacaccttaaccgcatcgtgaccattatccaaaagtggtggcgaagttttctgggtagaaagcagtaccagctcaccgtgcaggtggcatactacacgatgatgatgaatctttacaacgccatggcggtgcggatccaaagacgctggcggggctacagggtgcgaaaatacctcttcaattactactatctgaaggagtatttgaaggtagtaagtgagacgaatgatgccatcagaaaggcattagaagaatttgctgagatgaaagagagagaggagaaaaaagcaaatttagagagggaggagaaaaagagggactatcaggcacgcaagatgcattacctgctgagcaccaagcaaatccctggcatatacaacagccccttccgcaaagagccagacccctgggaacttcagctccagaaggccaagcctctcacacacaggcggcccaaggtcaagcagaaagactccacctccttaactgactggttggcgtgtacctctgctaggtccttcccacgctccgagatcctgcctccaatcaacagaaaacagtgccagggccccttcagagatatcaccgaagtgttggagcagcgctaccgccccttggagcctacactccgggtcgccgaacctatcgatgaactaaagttggctagggaagagttacgcagggaagagtggcttcagaatgttaatgacaatatgttcctgcccttttcctcgtatcacaaaaacgaaaagtatattccgtcaatgcatctttcgagtaaatatgggcctataagctacaaagagcaattccggagtgagaaccctaagaaatggatctgcgacaaggatttccaaactgtcctgcctagtttcgaattattttctaagtacggaaagctctactcaaaggccggccagattgtatag

SEQ ID NO: 284301 - DNA, 1086 bp, Artificial Sequence
  derived and/or modified sequence
atggccaccctggcccggctgcaggcccggagcagcacagtgggcaaccagtactacttcagaaattctgtggtggaccccttcaggaagaaggaaaatgatgctgctgtgaagatccagagctggttccggggctgccaggtgcgggcctacatccgccacctgaaccgcatcgtgaccatcatccagaagtggtggaggagcttcctgggcaggaagcagtaccagctgactgtgcaggtggcctactacaccatgatgatgaacctgtacaatgccatggctgtgcgcatccagaggcgctggaggggctacagagtgaggaagtacctgttcaactactactacctgaaggagtacctgaaggtggtgtctgagaccaatgatgccatcaggaaggccctggaggagtttgctgagatgaaggagcgggaggagaagaaggccaacctggagcgggaggagaagaagagggactaccaggccaggaagatgcactacctgctgagcaccaagcagatccctggcatctacaacagccccttcaggaaggagccagacccctgggagctgcagctgcagaaggccaagcccctgacccaccggcggcccaaggtgaagcagaaggacagcaccagcctgacagactggctggcctgcaccagcgcccgctccttccccaggtctgagatcctgccccccatcaacaggaagcagtgccagggccccttccgggacatcacagaggtgctggagcagcgctaccggcccctggagcccaccctgcgggtggccgagcccattgatgagctgaagctggcccgggaggagctgcggcgggaggagtggctgcagaatgtgaatgacaacatgttcctgcccttcagcagctaccacaagaatgagaagtacatccccagcatgcacctgagcagcaaatatggccccatctcctacaaggagcagttccgctctgagaaccccaagaagtggatctgtgacaaggacttccagacagtgctgcccagctttgagctgttcagcaaatatggcaagctgtacagcaaggccggccagatcgtgtag

SEQ ID NO: 284302 - DNA, 1086 bp, Artificial Sequence
  derived and/or modified sequence
atggccaccctggcccggctgcaggcccggagcagcaccgtgggcaaccaatactactttagaaattcagtggtcgatccttttcggaaaaaagaaaacgacgccgccgtaaaaattcaatcttggttccgcggctgtcaagtacgggcgtacattagacatctgaacagaatcgtcaccatcatacagaagtggtggcgcagttttcttggccgaaagcaataccagctgacagtacaggtggcatattacaccatgatgatgaacctttacaacgcaatggcggtgcgaatacagagacggtggcgcggttaccgcgtcaggaaatatctgttcaactattactatttgaaggaatatctgaaggtggtgagcgaaaccaatgacgctatccggaaggcccttgaggaattcgcagagatgaaagaaagagaggaaaaaaaggcgaacctcgaacgggaggaaaagaagcgagactaccaggcccggaagatgcactatctcctgagcaccaaacagatacctggcatctacaacagccccttcagaaaggaacccgacccctgggaactgcaactgcaaaaagctaagccacttacacatcgcaggcccaaggtgaaacagaaggactccacttccctgaccgactggctggcttgcacctcagcccgaagctttcctagatcagaaattttgccgcctataaatcgtaagcaatgccagggtccgttccgcgatattacagaagtgctagagcagcggtacagacctctggagccgacactgcgtgtggcagagccaatcgatgagttgaagctggccagggaagagctacgaagggaagaatggttgcagaatgtgaatgacaatatgttcctgccgttttcaagctatcataaaaatgaaaaatacattccctctatgcatctgagttctaaatacggaccaatttcttataaggagcagttccgtagcgaaaacccaaaaaagtggatctgcgataaggacttccagacagtcctcccaagttttgagctgttttccaagtatggcaaattgtatagtaaagctggccaaattgtgtag

SEQ ID NO: 284303 - DNA, 1086 bp, Artificial Sequence
  derived and/or modified sequence
atggctacgctagccaggctgcaggccagatcgtcgacagtgggaaaccagtactactttagaaattctgtggtggatccgtttcggaagaaagaaaatgatgctgcagtcaagatccagtcttggttccgcggatgccaggtcagggcctacatacgacacctgaaccgtattgtgacaataatacaaaaatggtggagatcctttctcggaaggaagcaatatcagctaaccgtgcaggtggcatattataccatgatgatgaatctgtataacgcgatggccgttcgcatccaacgaagatggaggggctaccgggtaaggaaatacctcttcaactattactatcttaaggagtacctcaaagtggtgagcgaaacaaatgacgccataaggaaggcactggaggagtttgccgagatgaaggaacgggaggagaaaaaggctaacctcgagcgcgaagaaaaaaaacgcgattatcaggcccgtaaaatgcactacttgctgagtactaaacagattccaggcatctacaattctccgtttcggaaagaacctgatccttgggaacttcaattacaaaaggcaaagccattgacgcaccggagaccaaaggtcaaacaaaaggattccacaagcctcaccgactggctcgcctgtacttcagcacggtcatttccccgtagcgagatcctaccaccaattaatcggaagcagtgccagggccctttccgcgacattacggaagtgctggagcagaggtacagaccgcttgagcccaccctccgagtagcagaacccatagacgaactcaagctcgcacgggaggagttgcggagagaggaatggctccaaaatgtgaatgacaatatgtttttgccattctctagttaccataagaacgagaagtatatccccagcatgcatctgagttcaaagtatgggcctatctcatacaaggaacagtttcggagcgagaaccccaagaagtggatctgcgataaggattttcaaaccgtcctcccaagctttgaactcttcagcaaatatggtaaattatacagtaaggccggtcaaatcgtgtag

SEQ ID NO: 284304 - DNA, 5818 bp, Artificial Sequence
  derived and/or modified sequence
cagttaccatggagaccggtagtaacaccagttgtaaacccaaggccaagagaccatggccacgttagcccggctgcaagctaggtcgtcgactgtaggaaatcagtactactttaggaacagtgttgtagatccatttagaaaaaaggagaatgatgcagcagttaaaatccaaagctggtttcgaggatgtcaagttcgggcatatatcaggcatttaaacaggattgtaacaattattcaaaaatggtggagaagtttcttaggcagaaagcaatatcaactaactgtgcaggtagcatattatactatgatgatgaatctctacaatgcaatggctgtcaggattcagagacgatggcgaggctatagggttcggaagtacctctttaattattattatttgaaagagtacctgaaagtcgtttcagagaccaatgatgcaattaggaaggcactggaggagtttgcagaaatgaaagaaagagaagagaagaaggctaacctcgaaagggaagagaagaaaagagattaccaagcccgaaagatgcattacctcctcagcacaaagcagattccaggaatatacaattcacccttcagaaaagagcctgatccatgggagctgcaattacagaaggcaaagcctttaacacaccgaagacctaaagttaagcagaaggactccaccagccttactgattggctagcttgtacaagcgcccgttcttttcctcggtctgaaattctaccacctattaatagaaagcaatgtcaggggcccttccgagatatcaccgaagtattagaacaacgctacaggcctttggagccaacgttgcgggtggcagaaccaatcgatgagttaaagttggccagagaggagctcagaagagaggaatggctgcaaaatgtaaatgacaatatgtttttgccattttcttcataccataaaaatgaaaagtacatcccatcaatgcatttatcaagcaagtatggtcctatttcttacaaagaacaattccgaagtgaaaatcctaagaaatggatctgtgacaaggatttccagactgtattaccatcatttgagctcttctcaaagtatggaaaattatattcaaaagctggacagattgtataaaggcgtcagaagaagaaactgaagccatctgcattttaaaacttaacagttctgaaaggaaaacacagatgaagatcctgtaggaaatatacttgctatgattcaataaactataaaattttgtagctctagtcatgaattaattattgtgtgtatgtatttgaaatctcttagacatatcttttcaaacaaatacttaaacttgagtctgttacctctgagaatgtctgtcacaatcacagcccctggtgaccaacagtgccataaatggttcccctgaaatacccatattctgaccccatcacccgggtcacaaatgatgacaccagtgctgggtacccaaattaagggcgactaacatgtaagtaggatgatgaatggtttgaagtgtaaattgtgtgaaatagttcagcatgaaagctctgccctgagaaataatgactgattataccagttagaaacccttcagactgttgaacttgagacacacagacacaacagacacagactagtgggtgtgggagcagaagcataggcactctcaaatagagaagacatttgcaagtctctgctgccaagggagcaaagagataatctcgatgccagggctgtgtcagatcctgcatggctctgaactacagttggtttccaaaaagctgggcttttgtgaggtttctgttttttatgcgatgcttagattttcctggaatccttggaagttaactcaacatttgaggttcctatatcctttaatcccatcccatgtgtatctttacaataaaacttcctgctagaggtatcctgagggaatctttgtttcttgcatctgaagagaataacactaaacttattgcatatgatttgggggttggatccaatgatagcacagagggacaggaaatgtgatttattgaccataaaagctttaatttaaaattgctggccagcgaaatccagactctgggaaatgttataggccaaatgatctgtttcttcaacaaataaattacaaaactgaggggaaaaaaaggaacctattaaaaagacattatctatcaatcactgtgtgtgtacagttttgagctcctgatttaaataaacaaattgtaaaataaaagatcttttgaaacaattggaagtttgaacactgattggatattggtggtataaaagaattattggttttttttaggtgtcatggtattgttttggtttacaaagttatagatataaatgttgaaatatttacagatgcagtgatatgttggctgggatttaatttgaaagtcaaagaagtgagttaaaatacatatactcctcctcttataatcggttatgtgccaataaatccattgtaaattgaaaatatcctaagttgaaaatattgtaagttaaaaatgcatttaatacagctaacttaccagacagcttagcttagcctcacctaccttaaatatgctcagaacacatacgttagcctatagttgggcaaaatcatctaacacaaagcctattttataatattgaacagcccatgtaatttattgaatattgtactaaaagtgaaaaactgaatagttgtatgcatactcaaagtatggtttctactgaatgcattgtaaaccagaaagtatctgagacaatgttttttttttttttttttttttttttaatttctgagacagagtctcattctgtcacccaggttggagtgcagtggcatgaactcagctcactgcaaccttcacctcccaggctcaagcagtcctcccatctcagcctcccaagtagctgggaccacaggcatgggccaacaagcctggctaaatattttgtacttttggtagacacgggtttttaccatgttgtgcaggctggtcttgaacgcctgagctcaagtgatctgcctgcctcggcctcccaaagtactgggattacaggcatgagtcactgaacccagccctgagacatgtctcaattagtttagaagtttatttggccaaggttaaggacatgcccttgacactgcacctgtcagtacaggtcctgacaacatgtgtccaaggtggtcaagctatacaacttggttttatacattttaaggagacataagacatcaataaatacatggaagatgtacattggttcagtctggaaaggcaggatgcctcaaacttgaaacaagagaatggggggtgggaggatgtgggagatgcttccaggtcatagttggagtcaaagactttccaattggcaattggttcaaagaatttatctaaagacctggaatccatagaaggctttacctggattaaaataaggggaccaaggttctcatgcagatgaagcctccaggtggcagacttcagagagcatagattgtaaatgtttcttatctgacttaaaaaggtgtcagactcttagtaaattatctcctggatcagtgaaaagatgtgaaaaaaggttctctacagaatgtagattttccccataagagatagcttcgcagggccattgcaaaatatgtcaaaaatatatattttagggtaaaatgcctcaatttatttcaaggcctgatatttgtcatgtgatgctatactacagtcaggctgaaacttggcatcttattgctatgaaaaatcttaagatctctattttaatgttaatgctggtcactggtgcctgaattccaaagggaggagggtataatgaagcatgtccaattccccatgccccacccccacccccacatcctataatggcctgaactagtttttcaggttaactttggaatacccttggccaagaagaggggtccatgcagatgtttggaggggggggtcttaaagctttatttttagattacagcatattgcttttgcactatcataaagtaaaaacatcataagtcaagccaccataaatagcggaccatctgtatatctgaaagaagatgaaccaagacttggttattgttaaagctgatgattggctgtatgaagatttactatacaattttgtgtacttttgtaagttcttggttgtttctaaacttataacaaaataaataattggccatcttcattggattgtgaagccatttcctcccacatgttcgtaaaaatggtagccatggcccctgactgaacccaggtatgaatggccttcattgattttgtagaccctgaccttctctgttcttccagagaaggtggtactcagataaaaactttgaagcattttattgttcagaatatgactttgatcttctcataagactcaagtttttgaatgcttaaggctctttatcgctagtgtatgtaagtaatatcattgtccttaaccaccatctgcctctccccccagacacacataagtttatgataactacagaggtgtccagatgagtaaaaactgcctttgcattaaggtgagagaagaccgagatgaaatcttattagaaaatataactggggaaagcagtttgtctgtttctcctggaaaactactagactacatcaacttatatactacttcttttctatattctcaatatgagccacttaagaaaattaatgagactttatgtttgaccaaagctggtaattccttgatcttattctccaaacttgattctgaatgactactgaccactaaaaacactaagagtaccactgtggatgtttaaaaacatacaccctaagagccttcagaattagacgcttcaattcttctgaaatcaaaagtcacaccagctttgctgtagttaatcaggtaatacctttcttctccactactctctaatttccttgagggcaaatattgtctttcttgataaatgccctggacccaacatctaacagaatacctggcataaagtgaaatccatcgaatgtgctaatgataaataaagaagttcaaaaaaatcttttaatagaagctataaaatagcagataagctaagtcattctcataaaacaccatttgtcatttgaatgcgtgcattgtggcctgttacttttaactagtctcactaatttatagttatatatgatgtagatctagattgtgatgtacactaagtgggttgatcctgagatcaagctatgattgctgcttgcgtaaagtgttccttttgggaaataaataatctttcatatctgtaaactttggtataattggttatttatgcaatgtattgttgtggttgtcaactcaagattgtattctcatctggggacattatgaatcttgttattttatccccttttttgctctgttttttcacatttatggcctacctgttacagctgcacggtatccattttctgtgctaaattcatctttaatttattattttttttcaacctcagcttttaactttgccctgattttctcttccattttattttcacttccattttaagctggctcaaagccttttaggaacaataagttactgaattatatgaacctatttgaggtaatgatgatgcctgggaaggagcagtattgctggatcagaattcactttttccaagttacagattttaataaaccactgtgcaaagcattaggataaatttttattgaaaattgagtgaatgactgaacaaatcgctgggtaatgctgtttaggttgttctattttccacggattaaattaaattctatgta

SEQ ID NO: 284305 - protein, 613 aa, Artificial Sequence
  derived and/or modified sequence
ETAEQNSSLAVGLNDQLHDLSRSRSPAARSSASNIRERRARIARGRWDRVPDVATRRGLLRPAVSGKVRGRRRPSNVGFGNCSSAKALVSLKEGSLSNTWNEKYSSLQKTPVWKGRNTSSAVEMPFRNSKRSRLFSDEDDRQINTRSPKRNQRVAMVPQKFTATMSTPDKKASQKIGFRLRNLLKLPKAHKWCIYEWFYSNIDKPLFEGDNDFCVCLKESFPNLKTRKLTRVEWGKIRRLMGKPRRCSSAFFEEERSALKQKRQKIRLLQQRKVADVSQFKDLPDEIPLPLVIGTKVTARLRGVHDGLFTGQIDAVDTLNATYRVTFDRTGLGTHTIPDYEVLSNEPHETMPIAAFGQKQRPSRFFMTPPRLHYTPPLQSPIIDNDPLLGQSPWRSKISGSDTETLGGFPVEFLIQVTRLSKILMIKKEHIKKLREMNTEAEKLKSYSMPISIEFQRRYATIVLELEQLNKDLNKVLHKVQQYCYELAPDQGLQPADQPTDMRRRCEEEAQEIVRHANSSTGQPCVENENLTDLISRLTAILLQIKCLAEGGDLNSFEFKSLTDSLNDIKSTIDASNISCFQNNVEIHVAHIQSGLSQMGNLHAFAANNTNRD

SEQ ID NO: 284306 - DNA, 1842 bp, Artificial Sequence
  derived and/or modified sequence
gagaccgccgagcagaacagcagcctggccgtgggcctgaacgaccagctgcacgacctgagcagaagcagaagccccgccgccagaagcagcgccagcaacatcagagagagaagagccagaatcgccagaggcagatgggacagagtgcccgacgtggccaccagaagaggcctgctgagacccgccgtgagcggcaaggtgagaggcagaagaagacccagcaacgtgggcttcggcaactgcagcagcgccaaggccctggtgagcctgaaggagggcagcctgagcaacacctggaacgagaagtacagcagcctgcagaagacccccgtgtggaagggcagaaacaccagcagcgccgtggagatgcccttcagaaacagcaagagaagcagactgttcagcgacgaggacgacagacagatcaacaccagaagccccaagagaaaccagagagtggccatggtgccccagaagttcaccgccaccatgagcacccccgacaagaaggccagccagaagatcggcttcagactgagaaacctgctgaagctgcccaaggcccacaagtggtgcatctacgagtggttctacagcaacatcgacaagcccctgttcgagggcgacaacgacttctgcgtgtgcctgaaggagagcttccccaacctgaagaccagaaagctgaccagagtggagtggggcaagatcagaagactgatgggcaagcccagaagatgcagcagcgccttcttcgaggaggagagaagcgccctgaagcagaagagacagaagatcagactgctgcagcagagaaaggtggccgacgtgagccagttcaaggacctgcccgacgagatccccctgcccctggtgatcggcaccaaggtgaccgccagactgagaggcgtgcacgacggcctgttcaccggccagatcgacgccgtggacaccctgaacgccacctacagagtgaccttcgacagaaccggcctgggcacccacaccatccccgactacgaggtgctgagcaacgagccccacgagaccatgcccatcgccgccttcggccagaagcagagacccagcagattcttcatgaccccccccagactgcactacaccccccccctgcagagccccatcatcgacaacgaccccctgctgggccagagcccctggagaagcaagatcagcggcagcgacaccgagaccctgggcggcttccccgtggagttcctgatccaggtgaccagactgagcaagatcctgatgatcaagaaggagcacatcaagaagctgagagagatgaacaccgaggccgagaagctgaagagctacagcatgcccatcagcatcgagttccagagaagatacgccaccatcgtgctggagctggagcagctgaacaaggacctgaacaaggtgctgcacaaggtgcagcagtactgctacgagctggcccccgaccagggcctgcagcccgccgaccagcccaccgacatgagaagaagatgcgaggaggaggcccaggagatcgtgagacacgccaacagcagcaccggccagccctgcgtggagaacgagaacctgaccgacctgatcagcagactgaccgccatcctgctgcagatcaagtgcctggccgagggcggcgacctgaacagcttcgagttcaagagcctgaccgacagcctgaacgacatcaagagcaccatcgacgccagcaacatcagctgcttccagaacaacgtggagatccacgtggcccacatccagagcggcctgagccagatgggcaacctgcacgccttcgccgccaacaacaccaacagagactag

SEQ ID NO: 284307 - DNA, 1842 bp, Artificial Sequence
  derived and/or modified sequence
gaaactgctgagcaaaactctagtttggctgtagggctgaatgatcagctgcatgatctgtccagatcgaggtcacctgcggcccggtcctctgcgtccaacatcagggagcggcgagctaggatcgccaggggcaggtgggatagggtgcccgatgttgcgacacgaaggggacttctaaggccggcagtcagcggtaaagtacggggacgcagacggccttccaatgtaggtttcggtaattgttcatctgctaaagcgctcgtgagtcttaaggagggatccctgtctaatacttggaatgaaaaatatagcagccttcagaagaccccagtctggaaagggaggaatacctctagtgcagtggagatgccattccgcaactccaaaaggagtagattatttagcgacgaagatgatcgtcagatcaacactaggtctcctaagcgcaaccagcgcgtggccatggtccctcagaaattcactgctactatgagtaccccagataaaaaggccagtcagaagatcgggttccggctgagaaatctgctcaaactgcctaaggcccataaatggtgtatttatgagtggttctacagcaacatcgataagccgctcttcgaaggcgataatgatttttgtgtctgcctgaaagagtccttccccaatcttaagactcgcaaactgaccagggtagaatgggggaagattcgaagattgatggggaaaccacgacggtgcagcagtgcgttcttcgaggaagagcggtctgctttgaaacaaaagaggcagaaaattcgcttgctgcagcaacggaaggtcgccgatgtttctcaattcaaagatctgccagatgagatcccactcccattagtaataggaaccaaggtgaccgcgagacttcggggagtgcacgatggactgttcacgggtcagatcgacgccgtcgacactttgaacgccacatacagggtgacattcgatcgcaccggactcgggacacatactataccggattacgaggtgttatcaaacgaaccccatgagactatgccgatcgctgcctttggacaaaagcagagacccagccgcttttttatgacgcctcccaggttgcattacaccccccctctgcagtcccccattatcgataacgaccccctgctgggccagagcccgtggcgctcaaagataagcgggagtgataccgaaaccctcggaggattcccggttgagttcttgattcaagttacccgcttgtcgaaaattctcatgataaagaaggagcatatcaaaaagttgcgcgagatgaatactgaggcggaaaaactgaagtcatatagcatgccaattagcatcgaatttcagcgtagatacgctaccatcgtgcttgagttggagcaactgaataaagatctgaataaggtgctgcacaaggtgcagcagtactgctacgaacttgcgcccgaccagggtttgcaaccggccgaccagcctactgacatgcgtcgaagatgcgaggaagaagcgcaggaaattgtgaggcacgccaattcttcaactggccagccatgtgtcgagaatgagaatctgacggacctcatttctcggctcacagcgattctactgcagatcaagtgtcttgccgagggcggagatctcaattcctttgaatttaagagtctcaccgattcactgaacgacatcaaaagtacaatcgatgcttccaatatatcctgttttcagaataatgtggaaatacacgtagcccacatacagagcggcttgtctcagatgggcaacctgcacgcatttgctgctaataacacaaaccgcgactag

SEQ ID NO: 284308 - DNA, 1842 bp, Artificial Sequence
  derived and/or modified sequence
gagacagctgagcagaacagcagcctggccgtgggcctgaatgaccagctgcatgacctgagccgcagccgcagccctgctgcccggagcagcgccagcaacatccgggagcggcgggcccgcatcgcccggggccgctgggacagagtgcctgatgtggccacccggcggggcctgctgcggcctgctgtgtctgggaaggtgcggggcagaagaagacccagcaatgtgggctttggaaactgcagcagcgccaaggccctggtgtccctgaaggagggcagcctgagcaacacctggaatgagaagtacagcagcctgcagaagacccctgtgtggaagggcaggaacaccagcagcgctgtggagatgcccttcaggaacagcaagaggagccgcctcttcagtgatgaagatgaccggcagatcaacaccaggagccccaagaggaaccagagggtggccatggtgccccagaagttcaccgccaccatgagcaccccagacaagaaggccagccagaagattggcttccggctgaggaacctgctgaagctgcccaaggcccacaagtggtgcatctatgagtggttctacagcaacatcgacaagcccctgtttgaaggagacaatgacttctgtgtgtgcctgaaggagagcttccccaacctgaagaccaggaagctgaccagggtggagtggggcaagatccggcggctgatgggcaagccccggcgctgcagcagcgccttctttgaggaggagaggtctgccctgaagcagaagaggcagaagatccggctgctgcagcagaggaaggtggctgatgtgtcccagttcaaggacctgcctgatgagatccccctgcccctggtgattggcaccaaggtgacagcccggctgcggggcgtgcatgatggcctcttcaccggccagattgatgctgtggacaccctgaatgccacctacagagtgacctttgacagaacaggcctgggcacccacaccatcccagactatgaggtgctgagcaatgagccccatgagaccatgcccatcgccgccttcggccagaagcagaggcccagccgcttcttcatgaccccaccccggctgcactacaccccacccctgcagagccccatcatcgacaatgaccccctgctgggccagagcccctggaggagcaagatcagcggcagtgacacagagaccctgggcggcttccctgtggagttcctgatccaggtgacccggctgagcaagatcctgatgatcaagaaggagcacatcaagaagctgcgggagatgaacacagaagctgagaagctgaagagctacagcatgcccatcagcattgagttccagaggagatatgccaccatcgtgctggagctggagcagctgaacaaggacctgaacaaggtgctgcacaaggtgcagcagtactgctatgagctggccccagaccagggcctgcagcctgctgaccagcccacagacatgagaagaagatgtgaggaggaggcccaggagatcgtgagacatgccaacagcagcacaggccagccctgtgtggagaatgaaaacctgacagacctgatcagccggctgacagccatcctgctgcagatcaagtgcctggccgagggcggggacctgaacagctttgagttcaagagcctgacagacagcctgaatgacatcaagagcaccattgatgccagcaacatcagctgcttccagaacaacgtggagatccacgtggcccacatccagagcggcctgagccagatgggcaacctgcacgcctttgctgccaacaacaccaacagagactag

SEQ ID NO: 284309 - DNA, 3186 bp, Artificial Sequence
  derived and/or modified sequence
gaaacagctgagcagaacagttctttagctgtcggcctaaatgaccaacttcatgacctctcaaggtctcgctccccggctgcacgcagctcagcttccaacattcgggaaaggcgtgcccggatcgcgaggggccgctgggaccgagtcccggacgtcgcgacgcgcagggggctgctgcggccggcggtctcgggaaaagtgaggggacggaggcgcccaagcaacgtgggtttcgggaactgctcttcagcaaaagcccttgtcagtttaaaagaaggaagcttatctaacacgtggaatgaaaagtacagttctttacagaaaacacctgtttggaaaggcaggaatacaagctctgctgtggaaatgcctttcagaaattcaaaacgaagtcgacttttttctgatgaagatgataggcaaataaatacaaggtcacctaaaagaaaccagagggttgcaatggttccacagaaatttacagcaacaatgtcaacaccagataagaaagcttcacagaagattggttttcgattacgtaatctgctcaagcttcctaaagcacataaatggtgtatatacgagtggttctattcaaatatagataaaccactttttgaaggtgataatgacttctgtgtatgtctaaaggaatcttttcctaatttgaaaacaagaaagttaacaagagtagaatggggaaaaattcggcggcttatgggaaaaccacggagatgttcttctgcattttttgaggaagagagatcagcattaaaacagaaacggcagaaaataaggctcttacaacaaaggaaagttgcagatgtttcacaattcaaagatctcccagatgaaattcctttgcctctggttattggaacgaaagttacagcacgattacgtggtgttcatgatggtttgttcactggacaaatagatgctgtggatactcttaatgctacttatagagtaacttttgataggacagggcttggaacccataccatccctgactatgaagttctcagtaatgaacctcatgagacaatgccaattgctgcctttggacaaaaacagcggccttctcgattttttatgaccccaccacggttacattatactcctcctctccagtcaccaattatagataatgatcctttattaggacagtcgccgtggagaagtaaaatttctggctctgacactgaaacattaggtggttttccagtagaatttcttatccaagtgaccagattatcaaaaattctcatgattaaaaaggaacatatcaagaaattaagggaaatgaacacagaagcagaaaaattgaaatcatattccatgcccatcagcattgaatttcagcggagatatgcaacaattgttctggagcttgaacagctgaacaaggacctaaacaaagttttgcataaagttcaacagtattgctatgagcttgctccagaccaggggctccagcctgcagatcagccaacagatatgagacgcaggtgtgaggaagaagcacaggaaattgttcggcatgcaaattcctcaacaggacagccctgcgttgaaaatgaaaatctgacagacttaatttccaggcttacagctattttgttacaaattaagtgtctagcagaaggaggagacctgaattcctttgaattcaaatcacttacagactcattaaatgatatcaagagtacaatagacgcttctaatatcagttgctttcagaataatgtagaaatccatgttgcacatattcagagtggcctgagccagatgggaaacttacatgcctttgcagcaaataacaccaacagagactgagtaaagatttcattattccaactgcacgggacattgtttttgagaagttcttttcctttatataggcttccaacaccaaataacctaactgctggaaaacaagggaaatttaaatctccaaataaggcattttaatagactgtactgcttcttaaaccagcattgctgaccagcattatatttatttttcttttattattcagatgcagtagcattgcttatgttacatatgtttatattcacaaatatttttaaactgaaatatctgaacataatataatttcgtggaagaatacattgaccattttttttaatgtgcatgaattcaccgcaacacatgcagacaactgctgcaatggagagtatgaagaaacctggtctttttattcatgtcggtggcagtgtggaaattccatccagaaaattacaactccacttgatttagttgatcaccatctcagtcttcaaaagataacatcatgaggtgtgggaagtcctagttttaaggaaaccactgaaatatagatgggaaatgtggactttacaagtatatgttatatatacttgcaatgtgacatggttctgtagatcattttataataataaatattttaatttatcataacatataaaagaaacctttgttgtttgttgaaagaaaatgaaggaacagggggaaaaaaggtgcaaaatgctaaatttctaaaaatggatttggcatgtcttcccatcagttcaggtcaaaagtgcattgttgtgagatttattaaaaaaaaaatgataacacactattttcatatttttttgtttatttgcacaacttttaaaccagattactggttaaaatccaacagtacacaatttataaagtaaaaagattttataaggaaaacaaatataataaccagtgctgtgaaatgcagaagaaaggcttgttttggttgtttttcttttttaggaaaacgctgcctaaaatgttaatcttgtaaaaagtatgtatttggaattttcttcgttttaatagaatattataaactcaaaatataaatttttttcaaatttggagtttaagatatagctgtagaggtggttttaattcctttagatgtctcataaaatgagactttttatatgttaatgtataataaaactgaaacaagattattttccatttgaaatttttgtatagtttaaaaaggcttccgtattctttgttggtattgtgccactgcagaactttagtgcagagtttatatttagctaaactgttatgttaattaagaaatgcataaatcttctattcttaatatttgtaattctaaataaattgatctatgaaaatta

SEQ ID NO: 284310 - DNA, 1842 bp, Artificial Sequence
  derived and/or modified sequence
gagaccgccgagcagaacagcagcctggccgtgggcctgaacgaccagttacacgacctgagtcggtccaggtcaccagccgcacgatctagcgcatctaacattagggagcgtcgagctagaattgcccgcggccgctgggatcgagtcccggacgtggcgacccgcagggggcttttaaggcctgccgtttccgggaaggtgcgcggaagaaggcgcccgtcaaatgtcgggttcgggaactgcagcagcgcaaaggctctggtgtccctgaaggaagggtctctctctaacacctggaacgagaagtatagttctcttcaaaaaacaccagtgtggaaaggccggaatacctcttctgctgtggagatgccttttcggaactccaagaggtctagacttttcagtgacgaagacgacaggcaaataaacacaaggtcgccaaaaagaaaccagcgcgtggccatggtgccccaaaagttcacggcgaccatgtccactccagacaagaaggctagccagaagataggctttcgtcttcgcaacttattaaaattgccaaaggcgcacaagtggtgcatttacgagtggttctactccaacatagacaagcctctcttcgaaggtgacaatgacttttgtgtgtgcctcaaggaaagctttcctaaccttaaaacacgtaagctgacacgcgtagagtgggggaagattaggcgcctaatgggcaaacctcgcagatgttccagcgccttttttgaggaagaacggtccgccttgaaacaaaagcgccagaaaattcggttgcttcagcagaggaaggtcgcggacgtcagtcagtttaaggacctcccagatgagatccctctaccactggtgatcggcaccaaggtgacagccaggttgagaggtgtccacgatggtctatttaccgggcagatcgatgcagtggacactctgaacgccacctatcgcgtcacctttgatagaacagggttgggcacccatacaattcctgattatgaagtactttcaaatgaaccccacgagacaatgcctatcgccgcattcggccagaagcaaagaccttctagattttttatgacccctccacggctgcactatacaccacctctccagtcccccatcattgacaacgatcctctgctgggacagtctccctggcgttcaaagataagcggtagcgatactgaaactctaggggggtttcccgtcgaattcctgatccaagttacaagactgagcaagattctcatgatcaagaaggaacatattaagaaactccgtgagatgaacacagaagctgaaaaactgaagagctacagtatgccaatatctatcgaatttcagcgccgctacgcaaccatcgttcttgaacttgaacagctgaataaagaccttaacaaggtcttacacaaagtccagcaatattgttatgagttagctccagatcaaggtctccaaccagcagatcagcctacggacatgcgcagacgttgcgaggaggaagcccaggagatcgtgagacatgcaaattcatcaaccggccagccatgcgtagagaacgagaaccttaccgacctgatctcacgactcacagcgatactgcttcaaataaaatgcctcgccgagggaggcgaccttaactcttttgagttcaagtcgctgacagacagcctgaatgatattaagagcactattgacgccagcaacatctcatgcttccagaataacgttgagatccatgtagctcatattcagtctggcctgagccagatgggaaacttacacgcattcgccgccaataataccaatagagattag

SEQ ID NO: 284311 - DNA, 1842 bp, Artificial Sequence
  derived and/or modified sequence
gaaaccgccgaacagaatagctccctcgcagtgggcctcaacgatcagttacatgacctgagcagaagcaggagtcccgctgcccgttcctctgccagcaatatccgagagcggagggctcgcatcgctagaggacggtgggaccgtgtgcctgatgtcgcaacaagaagaggcctgctgcggccagcggtgagtgggaaggtccgcggacgccgtagaccctccaatgtcggcttcggtaattgttcctccgctaaagccttagtttcattgaaggaaggctctctcagcaacacttggaacgagaagtattcttccctgcagaaaactccagtgtggaaaggaaggaacacatcttcagcagtggagatgccgtttcggaattctaaacggagcaggctttttagtgacgaggatgacagacagatcaacacaaggtctcccaaacgcaaccagcgtgtggcgatggtgccgcaaaagttcaccgcgactatgtccacgccggacaaaaaagcctcgcaaaagattggctttcgcctgcgtaatcttctcaaactcccaaaagcgcacaagtggtgcatttacgaatggttttattctaatatagacaagcccctcttcgagggtgataacgatttttgcgtgtgcttaaaggagtcatttcccaacctcaagacacgtaaactgacacgcgtcgaatggggtaaaatccgtcgcttgatgggcaagccccgtcggtgcagcagcgcttttttcgaagaagagcgctcagcccttaagcaaaagaggcagaagatccgccttctgcagcagcgcaaggtagccgacgtttcccagttcaaggatttgccagacgagataccgctaccactcgtgatcggcaccaaggtaacagcgcgtttacgcggtgtgcacgatgggctgtttacagggcagatcgatgccgtggataccttaaacgccacatacagagttacatttgataggaccgggctgggaacacacactatccctgattatgaagtgttgagtaatgagccacatgagactatgcctatcgctgccttcggtcaaaaacaaaggccttcccggttttttatgacccctccgagactgcactatactcccccattgcaatcacccattatcgataatgacccactgttgggccagtcgccttggaggtctaagattagtgggagcgataccgagacgctcgggggattcccggtagaatttttgattcaagttaccaggttgtccaagattctgatgattaaaaaagaacacattaagaagcttagagaaatgaataccgaggccgagaaactgaaatcctattctatgcctatttctatagagttccaaagacgatacgccaccatcgtcttggaactggaacagcttaataaggacttgaataaagtcctgcataaggtgcagcagtactgttacgaactggccccagatcaaggactacagcccgctgaccagcccactgatatgcgcaggagatgtgaggaggaggcccaggagattgtgcggcacgcaaattctagcacaggacagccctgcgttgagaacgaaaacctgacggacttgatctctcggctcaccgcaattctgctgcagattaaatgcctggcagaggggggtgatctgaactcttttgaattcaaaagcctcacagattcactcaacgatattaaatccactatcgacgccagtaatataagctgctttcaaaataacgtcgagatccacgtcgcacacattcagagcggtcttagccaaatgggcaacctgcacgctttcgccgcaaataacacaaaccgagattag

SEQ ID NO: 284312 - protein, 272 aa, Artificial Sequence
  derived and/or modified sequence
MAGSQKEEIMPPQQGVPFQESGCWGSMGAQSRERSGRDHSGTWICAGGSQETFHLGAPVETTCLAASLLTPRHVGPQACGAERAFGSWEEHPAEEAAPGAQRHLWLQRVPYHEEPEARRGERQREVMQRDIAAGDFIEHAEFSGNLYGTSKVAVQAVQAMNRICVLDVDLQGVRNIKATDLRPIYISVQPPSLHVLEQRLRQRNTETEESLVKRLAAAQADMESRNQESSKDRRLRLAVCSRHPGPIQDQGSSIEPPPWQAIRQLCALGQHV

SEQ ID NO: 284313 - DNA, 819 bp, Artificial Sequence
  derived and/or modified sequence
atggccggctcccagaaggaagagattatgccccctcagcaaggcgtgccctttcaggaatcaggttgttgggggtctatgggcgctcagtctcgggaacggagcggccgggatcactccggaacttggatctgcgcgggagggtcacaggagaccttccacttaggagccccagtggaaacgacctgccttgctgcctctctcctgaccccgcgccacgtgggcccacaggcctgtggcgccgagcgcgcttttggatcctgggaggagcacccggctgaagaggctgcacctggggctcaaagacatctgtggctgcagcgagtgccctatcacgaagaacccgaggctcgccgaggcgagcggcagagagaggtcatgcaaagggacatcgcagccggcgactttattgaacatgccgagttctctggtaacctgtacgggacttctaaggttgctgtccaggcagtccaagctatgaaccgaatttgcgtcttggatgtcgatctgcagggagtgaggaatatcaaggcgaccgacctgcgtccaatctatatctcagtacaacctccttccctccacgtactggagcagagacttcggcagaggaacaccgagactgaggaaagtctcgtcaaaaggttggccgcggcgcaagcggatatggagtccagaaatcaggaaagctccaaagatcgaaggctgaggctcgcagtatgctctaggcaccccggtcctatccaggaccagggctcatcgatcgagcccccgccatggcaagccattcggcagttatgcgcgctggggcagcacgtgtag

SEQ ID NO: 284314 - DNA, 865 bp, Artificial Sequence
  derived and/or modified sequence
ctggccgggctggctgcggccgccctgggccgggccccaccggacggatggctggaagccagaaggaggagattatgccgccacagcagggagtgcctttccaggaaagcggctgctggggcagcatgggagcccagtccagggagcgttctggcagagaccattccggaacatggatctgcgccggcggctcccaggagaccttccatctcggagctcctgtggagaccacgtgcctggcagcctctcttctcacccccaggcatgtcgggccccaggcctgtggtgctgagcgggccttcgggagctgggaagagcaccctgctgaagaggctgctccaggagcacagcggcatctttggcttcagcgtgtcccataccacgaggaacccgaggcccggcgaggagaacggcaaagggaggtgatgcagcgtgacatagcagccggcgacttcatcgagcatgccgagttctcggggaacctgtatggcacgagcaaggtggcggtgcaggccgtgcaggccatgaaccgcatctgtgtgctggacgtggacctgcagggtgtgcggaacatcaaggccaccgatctgcggcccatctacatctctgtgcagccgccttcactgcacgtgctggagcagcggctgcggcagcgcaacactgaaaccgaggagagcctggtgaagcggctggctgctgcccaggccgacatggagagcagaaatcaagaaagctcaaaggaccggcgcctgaggcttgctgtctgttctcggcaccccgggcccatacaggaccagggcagcagcattgagccacccccttggcaggcgatacggcagctctgtgcccttggccagcatgtgga

SEQ ID NO: 284315 - DNA, 819 bp, Artificial Sequence
  derived and/or modified sequence
atggccggcagccagaaggaggagatcatgccaccccagcagggcgtgcccttccaggagagcggctgctggggctccatgggcgcccagagccgggagaggagcggccgggaccacagcggcacctggatctgtgccggcggcagccaggagaccttccacctgggcgcccctgtggagaccacctgcctggccgccagcctgctgacccccaggcatgtgggcccccaggcctgtggggctgagcgggccttcggctcctgggaggagcaccctgctgaggaggccgcccctggggcccagaggcacctgtggctgcagagggtgccctaccacgaggagcctgaggcccggcggggggagcggcagcgggaggtgatgcagagggacattgctgctggggacttcattgaacatgctgagttcagcggcaacctgtatggcaccagcaaggtggccgtgcaggccgtgcaggccatgaaccgcatctgtgtgctggatgtggacctgcagggcgtgaggaacatcaaggccacagacctgcggcccatctacatctctgtgcagccccccagcctgcacgtgctggagcagaggctgcggcagaggaacacagaaacagaggagagcctggtgaagaggctggccgccgcccaggccgacatggagagcaggaaccaggagagcagcaaggaccggcggctgcggctggccgtgtgcagccgccaccctggccccatccaggaccagggcagcagcattgagcccccaccctggcaggccatccggcagctgtgtgccctgggccagcacgtgtag

SEQ ID NO: 284316 - DNA, 819 bp, Artificial Sequence
  derived and/or modified sequence
atggccggcagccagaaggaggagatcatgcccccccagcagggcgtgccattccaagagagtggttgctggggatccatgggcgcccaatctagggagaggtccggcagggatcactccggaacctggatttgcgcaggcggcagccaggagaccttccacttaggggctccagtcgaaacaacgtgtcttgcagcatcactgctaactccaaggcatgtgggccctcaggcgtgtggggccgagagagcctttgggagctgggaggagcatccagcagaggaggccgctccgggtgcccagcgacacctgtggctgcagcgggtaccgtaccacgaggaaccagaggctcgaaggggagaaaggcagcgcgaagtgatgcaaagggacatcgccgcaggcgacttcattgagcacgcagagttcagtgggaatctttatggaaccagcaaggtcgccgtgcaagccgtacaggctatgaaccggatctgtgtcttggatgtggatcttcagggtgtcagaaacataaaggccacagatttacgccctatctacatatccgtgcagccgccgtctttgcacgtcctggaacagaggttacggcagagaaacacagagaccgaagagtctttagtcaaacgcttggctgccgcacaggccgacatggaatcccgcaaccaggagagtagcaaggacagacgtctacgtctggccgtgtgctctcggcatccaggacccattcaggaccagggctcatctatcgaaccccctccctggcaagcaatcagacagctgtgcgccttaggacaacacgtatag

SEQ ID NO: 284317 - DNA, 819 bp, Artificial Sequence
  derived and/or modified sequence
atggcgggatctcaaaaagaagaaatcatgcctccgcagcagggcgtgcccttccaagaatctggatgctggggctctatgggagctcagagcagagaacgaagcgggagggaccatagtggtacctggatttgcgccggtgggagtcaggagacattccatcttggggctcccgttgagacaacctgcctggctgcgtcactgctgactcctcgacatgtgggtcctcaggcatgtggggctgaacgggcattcgggtcctgggaggagcatcctgctgaagaggccgctcctggtgctcaaagacacctatggctgcagagggttccatatcacgaggaacccgaggcaaggcggggagaaaggcagagggaggttatgcagagagacatcgcagcaggggatttcattgaacatgccgagttcagcggcaatctgtacgggacctccaaggtagccgttcaggcagttcaggctatgaaccgcatatgcgtgctggacgtcgaccttcagggggtccgcaatattaaagctacggaccttagacctatttatattagcgtacagcctccatccttacacgtacttgaacaacgcttgagacaacgcaatacagagacagaagagagtctggtcaaaagacttgcggctgctcaggccgatatggaatcaaggaaccaagaatctagcaaagatcggcgactgcgtctagcggtgtgttctcgtcaccccggacctatccaggatcagggatcaagtatcgaacccccaccatggcaggccatccggcagctgtgcgctttaggccagcatgtctag

SEQ ID NO: 284318 - DNA, 819 bp, Artificial Sequence
  derived and/or modified sequence
atggccggcagccagaaggaggagatcatgcccccccagcagggcgtgcccttccaggagagcggctgctggggcagcatgggcgcccagagcagagagagaagcggcagagaccacagcggcacctggatctgcgccggcggcagccaggagaccttccacctgggcgcccccgtggagaccacctgcctggccgccagcctgctgacccccagacacgtgggcccccaggcctgcggcgccgagagagccttcggcagctgggaggagcaccccgccgaggaggccgcccccggcgcccagagacacctgtggctgcagagagtgccctaccacgaggagcccgaggccagaagaggcgagagacagagagaggtgatgcagagagacatcgccgccggcgacttcatcgagcacgccgagttcagcggcaacctgtacggcaccagcaaggtggccgtgcaggccgtgcaggccatgaacagaatctgcgtgctggacgtggacctgcagggcgtgagaaacatcaaggccaccgacctgagacccatctacatcagcgtgcagccccccagcctgcacgtgctggagcagagactgagacagagaaacaccgagaccgaggagagcctggtgaagagactggccgccgcccaggccgacatggagagcagaaaccaggagagcagcaaggacagaagactgagactggccgtgtgcagcagacaccccggccccatccaggaccagggcagcagcatcgagccccccccctggcaggccatcagacagctgtgcgccctgggccagcacgtgtag

SEQ ID NO: 284319 - protein, 253 aa, Artificial Sequence
  derived and/or modified sequence
MAGSQKEEIMPPQQGVPFQESGCWGSMGAQSRERSGRDHSGTWICAGGSQETFHLGAPVETTCLAGMSGPRPVVLSGPSGAGKSTLLKRLLQEHSGIFGFSVSHTTRNPRPGEENGKDYYFVTREVMQRDIAAGDFIEHAEFSGNLYGTSKVAVQAVQAMNRICVLDVDLQGVRNIKATDLRPIYISVQPPSLHVLEQRLRQRNTETEESLVKRLAAAQADMESSKEPGLFDVVIINDSLDQAYAELKEALSE

SEQ ID NO: 284320 - DNA, 762 bp, Artificial Sequence
  derived and/or modified sequence
atggccggtagtcaaaaggaggaaatcatgccaccacagcagggggtgcccttccaggagagcgggtgctggggttccatgggcgcccagtccagggaaaggtctggaagagatcatagtggtacttggatttgtgcgggaggcagtcaggaaacatttcatctgggagcccccgtcgagaccacttgcctggctggcatgtcaggtccaagacctgttgtgctttccggtcccagcggagctggcaagtcaaccctgctcaagaggctcctgcaggagcattcgggaattttcggtttctcagttagccacactacgcgcaaccctaggccaggagaggagaatggaaaggactactactttgtgacaagggaggtgatgcagcgcgacatcgccgccggagattttatcgagcacgctgagttctccgggaatctgtacggaaccagcaaagtggccgtgcaggcagtccaggccatgaaccggatatgtgtcttggacgtagacctgcagggagtcaggaacatcaaggccacggacctgcgtccaatttacatttctgtacaaccgccatcactgcatgttttggaacaaagactgcgacagcgtaatactgaaacggaagaatccttggtgaaaagactcgctgccgcgcaggccgatatggaaagtagtaaagaacccggactttttgatgtggtgatcatcaacgacagtttggaccaggcgtacgcagagctaaaggaggcgctgtccgagtag

SEQ ID NO: 284321 - DNA, 1012 bp, Artificial Sequence
  derived and/or modified sequence
tgaaggccaggatgcgtgctacccggatgtgtgcccagaaaccctgcagccaagagcagccgcctggaccaccagcctccccttcatccacctggcccagcccagagcccaggcccacgtctggtggtttgtgtcttacgagaggccaggcgggggctgaattctctcggttctcagaaggtcaagccctctgttagcatctcctcgaacagtgggccgggggcaaggtggtgactctgttcagtccttaggatggctggaagccagaaggaggagattatgccgccacagcagggagtgcctttccaggaaagcggctgctggggcagcatgggagcccagtccagggagcgttctggcagagaccattccggaacatggatctgcgccggcggctcccaggagaccttccatctcggagctcctgtggagaccacgtgcctggcaggcatgtcgggccccaggcctgtggtgctgagcgggccttcgggagctgggaagagcaccctgctgaagaggctgctccaggagcacagcggcatctttggcttcagcgtgtcccataccacgaggaacccgaggcccggcgaggagaacggcaaagattactactttgtaaccagggaggtgatgcagcgtgacatagcagccggcgacttcatcgagcatgccgagttctcggggaacctgtatggcacgagcaaggtggcggtgcaggccgtgcaggccatgaaccgcatctgtgtgctggacgtggacctgcagggtgtgcggaacatcaaggccaccgatctgcggcccatctacatctctgtgcagccgccttcactgcacgtgctggagcagcggctgcggcagcgcaacactgaaaccgaggagagcctggtgaagcggctggctgctgcccaggccgacatggagagcagcaaggagcccggcctgtttgatgtggtcatcattaacgacagcctggaccaggcctacgcagagctgaaggaggcgctctctgagg

SEQ ID NO: 284322 - DNA, 762 bp, Artificial Sequence
  derived and/or modified sequence
atggccggcagccagaaggaggagatcatgccaccccagcagggcgtgcccttccaggagagcggctgctggggctccatgggcgcccagagccgggagaggagcggccgggaccacagcggcacctggatctgtgccggcggcagccaggagaccttccacctgggcgcccctgtggagaccacctgcctggccggcatgagcggccccaggcctgtggtgctgagcggccccagcggggccggcaagagcaccctgctgaagaggctgctgcaggagcacagcggcatcttcggcttctctgtgagccacaccaccaggaaccccaggcctggagaggagaatggcaaggactactactttgtgacccgggaggtgatgcagagggacattgctgctggggacttcattgaacatgctgagttcagcggcaacctgtatggcaccagcaaggtggccgtgcaggccgtgcaggccatgaaccgcatctgtgtgctggatgtggacctgcagggcgtgaggaacatcaaggccacagacctgcggcccatctacatctctgtgcagccccccagcctgcacgtgctggagcagaggctgcggcagaggaacacagaaacagaggagagcctggtgaagaggctggccgccgcccaggccgacatggagagcagcaaggagcccggcctgtttgatgtggtgatcatcaatgacagcctggaccaggcctatgcagagctgaaggaggccctgtctgagtag

SEQ ID NO: 284323 - DNA, 762 bp, Artificial Sequence
  derived and/or modified sequence
atggccggcagccagaaggaggagatcatgcccccccagcagggcgtgccattccaggaaagcggctgttgggggagcatgggagctcagagccgggagagatccggtcgcgatcatagcggcacatggatctgcgccggcggatcgcaagagacctttcatttaggagccccagtcgaaacaacttgtctggccggcatgagcggtccaaggcctgttgtcttatcgggccctagcggggcagggaaatctaccctgctgaagagattgttgcaggaacacagcgggatttttggcttttcagtgagccacacaactaggaaccctagaccaggagaggaaaatggcaaggattattacttcgttaccagggaggttatgcagcgggatattgccgctggagattttattgaacacgcggaattctccggtaacctgtacggaaccagcaaggtggcagtgcaggccgtccaagccatgaacagaatctgcgtccttgacgtcgatcttcagggcgtacggaatatcaaggctactgacctgaggccaatatacatttccgtgcagcccccctccctgcacgtgctcgagcagcggctgcgccagagaaataccgaaaccgaagaatccctggtgaagagactggccgctgcccaggccgatatggagagctctaaagaacctggcctgttcgatgtcgtgatcatcaacgactccttggaccaggcatacgccgaattgaaagaggccctgtctgagtag

SEQ ID NO: 284324 - DNA, 762 bp, Artificial Sequence
  derived and/or modified sequence
atggccggaagccagaaagaggaaataatgccacctcagcagggtgtgccttttcaggagtccgggtgttggggatcgatgggcgcacaatccagagagaggtcaggcagggaccacagcggcacctggatctgtgccggtggttcacaggaaacttttcacctgggcgctcccgtggagaccacctgcctagctggaatgagcggacccagaccagtcgtgctctccggaccctccggcgctgggaagtctaccctgctgaagcggctacttcaggagcacagtggcatcttcggcttcagtgtgtcccataccactcgcaatcctcgccctggtgaggagaacggaaaggactattactttgtgacacgtgaagtcatgcaaagggatatcgcggctggagatttcattgagcacgcggaattcagcggaaatttatacggaactagcaaggtggccgtccaggcagtacaggccatgaatcgcatttgcgttctagatgtggacctgcagggagtgaggaatatcaaagccacagacctgcgcccaatctatatctcggtgcagccaccatcacttcatgtcctggagcagcgacttaggcagaggaacacagaaaccgaggaaagtctggtgaagagattggctgcggctcaggcagatatggaatcttccaaggagcctgggctttttgacgtcgttattataaacgactccctagatcaagcttatgctgaacttaaagaagccctgtcggagtag

SEQ ID NO: 284325 - DNA, 762 bp, Artificial Sequence
  derived and/or modified sequence
atggccggcagccagaaggaggagatcatgcccccccagcagggcgtgcccttccaggagagcggctgctggggcagcatgggcgcccagagcagagagagaagcggcagagaccacagcggcacctggatctgcgccggcggcagccaggagaccttccacctgggcgcccccgtggagaccacctgcctggccggcatgagcggccccagacccgtggtgctgagcggccccagcggcgccggcaagagcaccctgctgaagagactgctgcaggagcacagcggcatcttcggcttcagcgtgagccacaccaccagaaaccccagacccggcgaggagaacggcaaggactactacttcgtgaccagagaggtgatgcagagagacatcgccgccggcgacttcatcgagcacgccgagttcagcggcaacctgtacggcaccagcaaggtggccgtgcaggccgtgcaggccatgaacagaatctgcgtgctggacgtggacctgcagggcgtgagaaacatcaaggccaccgacctgagacccatctacatcagcgtgcagccccccagcctgcacgtgctggagcagagactgagacagagaaacaccgagaccgaggagagcctggtgaagagactggccgccgcccaggccgacatggagagcagcaaggagcccggcctgttcgacgtggtgatcatcaacgacagcctggaccaggcctacgccgagctgaaggaggccctgagcgagtag

SEQ ID NO: 284326 - protein, 208 aa, Artificial Sequence
  derived and/or modified sequence
MSPTKDSHPSPHFPRDSGIHAPTPPDSGALTLSPPVSQGPGVGPRTGRGNRLCRPPGRSAARSFCLLPGPPLGTGALGSPRAAQGLGFRGSGQRARHNSFTSPSPPGAHHPLGTHTRALPPPLARCPCAALLAGRECHGGPSPAAPRPLPGTSLTWPSRAPLPRPPPRERQGPGDRSPSPSAPSCPGVGASSPRRRKPREAAGLTPDG

SEQ ID NO: 284327 - DNA, 324 bp, Artificial Sequence
  derived and/or modified sequence
taatctacctctctgaaaatgtacttctacttctacatagatctgaagacaattcatacttcaacaggcaagaatctgctagtgtctgggtggtgggggtttgtcagacacccaaactatctcggggacctcataatggcactggcatggtcattgccatgcggatttaatcacatcttgccttacttttacattatctattttactatgctactggttcacagagaagcccgagacgagtaccactgcaagaaaaagtatggggtggcatgggagaaatactgtcagagggtgccttatcggattttcccgtatatatattag

SEQ ID NO: 284328 - DNA, 536 bp, Artificial Sequence
  derived and/or modified sequence
tctcgacatcattaaaaatgtacttttatttttatatagatttaaaaaccattcatacttcaacgggaaaaaatcttctagtttctggatggtggggctttgttcgccaccccaattacttgggtgatctcatcatggccttggcgtggtccctcccatgtggttttaaccacattctgccttatttctacataatttatttcaccatgttgcttgtccaccgagaagctcgtgacgagtaccactgtaagaagaaatacggcgtggcttgggaaaagtactgtcagcgtgtgccctaccgtatatttccatacatctactaatgctcttctggcttttctacaaaatactcctgcaattccagctgccatttgcaaaaacaaggaaaaaaatccgaaactttcttttgttgcactgacagggtctgtacttttttttttctttttgagtcaggactatggagccgagtagttgatcttttaatatagccgtgtttacttgtattaacttacagttaacataggaaaaatacaagt

SEQ ID NO: 284329 - DNA, 324 bp, Artificial Sequence
  derived and/or modified sequence
tgaagcaccagcctgaagatgtacttctacttctacatcgacctgaagaccatccacaccagcacaggcaagaacctgctggtgtctggctggtggggctttgtgcgccaccccaactacctgggggacctgatcatggccctggcctggagcctgccctgtggcttcaaccacatcctgccctacttctacatcatctacttcaccatgctgctggtgcaccgggaggccagagatgagtaccactgcaagaagaagtatggagtggcctgggagaagtactgccagagggtgccctaccgcatcttcccctacatctactag

SEQ ID NO: 284330 - DNA, 324 bp, Artificial Sequence
  derived and/or modified sequence
tgaagcaccagcctgaagatgtacttctacttctacatcgacctgaagaccatccacacttcaacaggcaagaacctcttagtcagtggctggtgggggtttgtacgtcacccaaattatctcggggacctgataatggcactcgcttggagcctgccgtgtggctttaatcatatcctcccttacttttatataatctactttacaatgcttctggtccaccgcgaggcccgggacgaataccactgcaagaaaaagtacggggtggcttgggagaagtattgccagagagttccctaccgaatattcccatatatatattag

SEQ ID NO: 284331 - DNA, 324 bp, Artificial Sequence
  derived and/or modified sequence
taaagcaccagtctgaagatgtatttctatttctatatcgaccttaagacaatccacacaagcacaggaaaaaacctgctagtgtccggctggtggggctttgtgaggcaccccaactacctcggtgacctaatcatggcactagcttggtctcttccgtgtggcttcaatcatatcttgccttacttttacattatctacttcactatgctgctggttcaccgcgaggccagggacgaatatcactgtaaaaagaagtatggtgtggcctgggagaaatattgtcagagagtaccctatcgaatcttcccctacatttactag

SEQ ID NO: 284332 - DNA, 324 bp, Artificial Sequence
  derived and/or modified sequence
tgaagcaccagcctgaagatgtacttctacttctacatcgacctgaagaccatccacaccagcaccggcaagaacctgctggtgagcggctggtggggcttcgtgagacaccccaactacctgggcgacctgatcatggccctggcctggagcctgccctgcggcttcaaccacatcctgccctacttctacatcatctacttcaccatgctgctggtgcacagagaggccagagacgagtaccactgcaagaagaagtacggcgtggcctgggagaagtactgccagagagtgccctacagaatcttcccctacatctactag

SEQ ID NO: 284333 - protein, 819 aa, Artificial Sequence
  derived and/or modified sequence
GMLDGPSAMTRFCNLIASEPDIAKVPLCIDSSNFAVIEAGLKCCQGKCIVNSISLKEGEATETDTKIRVCTRAYHLLVKKLGFNPNDIIFDPNILTIGTGMEEHNLYAINFIHATKVIKETLPGARISGGLSNLSFSFRGMEAIREAMHGVFLYHAIKSGMDMGIVNAGNLPVYDDIHKELLQLCEDLIWNKDPEATEKLLRYAQTQGTGGKKVIQTDEWRNGPVEERLEYALVKGIEKHIIEDTEEARLNQKKYPRPLNIIEGPLMNGMKIVGDLFGAGKMFLPQVIKSARVMKKAVGHLIPFMEKEREETRVLNGTVEEEDPYQGTIVLATVKGDVHDIGKNIVGVVLGCNNFRVIDLGVMTPCDKILKAALDHKADIIGLSGLITPSLDEMIFVAKEMERLAIRIPLLIGGATTSKTHTAVKIAPRYSAPVIHVLDASKSVVVCSQLLDENLKDEYFEEIMEEYEDIRQDHYESLKERRYLPLSQARKSGFQMDWLSEPHPVKPTFIGTQVFEDYDLQKLVDYIDWKPFFDVWQLRGKYPNRGFPKIFNDKTVGGEARKVYDDAHNMLNTLISQKKLRARGVVGFWPAQSIQDDIHLYAEAAVPQAAEPIATFYGLRQQAEKDSASTEPYYCLSDFIAPLHSGIRDYLGLFAVACFGVEELSKAYEDDGDDYSSIMVKALGDRLAEAFAEELHERVRRELWAYCGSEQLDVADLRRLRYKGIRPAPGYPSQPDHTEKLTMWRLADIEQSTGIRLTESLAMAPASAVSGLYFSNLKSKYFAVGKISKDQVEDYALRKNISVAEVEKWLGPILGYDTD

SEQ ID NO: 284334 - protein, 1118 aa, Artificial Sequence
  derived and/or modified sequence
MSPALQDLSQPEGLKKTLRDEINAILQKRIMVLDGGMGTMIQREKLNEEHFRGQEFKDHARPLKGNNDILSITQPDVIYQIHKEYLLAGADIIETNTFSSTSIAQADYGLEHLAYRMNMCSAGVARKAAEEVTLQTGIKRFVAGALGPTNKTLSVSPSVERPDYRNITFDELVEAYQEQAKGLLDGGVDILLIETIFDTANAKAALFALQNLFEEKYAPRPIFISGTIVDKSGRTLSGQTGEGFVISVSHGEPLCIGLNCALGAAEMRPFIEIIGKCTTAYVLCYPNAGLPNTFGDYDETPSMMAKHLKDFAMDGLVNIVGGCCGSTPDHIREIAEAVKNCKPRVPPATAFEGHMLLSGLEPFRIGPYTNFVNIGERCNVAGSRKFAKLIMAGNYEEALCVAKVQVEMGAQVLDVNMDDGMLDGPSAMTRFCNLIASEPDIAKVPLCIDSSNFAVIEAGLKCCQGKCIVNSISLKEGEDDFLEKARKIKKYGAAMVVMAFDEEGQTQGTGGKKVIQTDEWRNGPVEERLEYALVKGIEKHIIEDTEEARLNQKKYPRPLNIIEGPLMNGMKIVGDLFGAGKMFLPQVIKSARVMKKAVGHLIPFMEKEREETRVLNGTVEEEDPYQGTIVLATVKGDVHDIGKNIVGVVLGCNNFRVIDLGVMTPCDKILKAALDHKADIIGLSGLITPSLDEMIFVAKEMERLAIRIPLLIGGATTSKTHTAVKIAPRYSAPVIHVLDASKSVVVCSQLLDENLKDEYFEEIMEEYEDIRQDHYESLKERRYLPLSQARKSGFQMDWLSEPHPVKPTFIGTQVFEDYDLQKLVDYIDWKPFFDVWQLRGKYPNRGFPKIFNDKTVGGEARKVYDDAHNMLNTLISQKKLRARGVVGFWPAQSIQDDIHLYAEAAVPQAAEPIATFYGLRQQAEKDSASTEPYYCLSDFIAPLHSGIRDYLGLFAVACFGVEELSKAYEDDGDDYSSIMVKALGDRLAEAFAEELHERVRRELWAYCGSEQLDVADLRRLRYKGIRPAPGYPSQPDHTEKLTMWRLADIEQSTGIRLTESLAMAPASAVSGLYFSNLKSKYFAVGKISKDQVEDYALRKNISVAEVEKCMSVYRKIGE

SEQ ID NO: 284335 - DNA, 925 bp, Artificial Sequence
  derived and/or modified sequence
ctttgaattcctagctcctgtggtctccagatttcaggcctaagatgaaagcctctagtcttgccttcagccttctctctgctgcgttttatctcctatggactccttccactggactgaagacactcaatttgggaagctgtgtgatcgccacaaaccttcaggaaatacgaaatggattttctgagatacggggcagtgtgcaagccaaagatggaaacattgacatcagaatcttaaggaggactgagtctttgcaagacacaaagcctgcgaatcgatgctgcctcctgcgccatttgctaagactctatctggacagggtatttaaaaactaccagacccctgaccattatactctccggaagatcagcagcctcgccaattcctttcttaccatcaagaaggacctccggctctgtcatgcccacatgacatgccattgtggggaggaagcaatgaagaaatacagccagattctgagtcactttgaaaagctggaacctcaggcagcagttgtgaaggctttgggggaactagacattcttctgcaatggatggaggagacagaataggaggaaagtgatgctgctgctaagaatattcgaggtcaagagctccagtcttcaatacctgcagaggaggcatgaccccaaaccaccatctctttactgtactagtcttgtgctggtcacagtgtatcttatttatgcattacttgcttccttgcatgattgtctttatgcatccccaatcttaattgagaccatacttgtataagatttttgtaatatctttctgctattggatatatttattagttaatatatttatttattttttgctatttaatgtatttatttttttacttggacatgaaactttaaaaaaattcacagattatatttataacctgactagagca

SEQ ID NO: 284336 - DNA, 1553 bp, Artificial Sequence
  derived and/or modified sequence
gatggcgcagccacagcttctgtgagattcgatttctccccagttcccctgtgggtctgaggggaccagaagggtgagctacgttggctttctggaaggggaggctatatgcgtcaattccccaaaacaagttttgacatttcccctgaaatgtcattctctatctattcactgcaagtgcctgctgttccaggccttacctgctgggcactaacggcggagccaggatggggacagaataaaggagccacgacctgtgccaccaactcgcactcagactctgaactcagacctgaaatcttctcttcacgggaggcttggcagtttttcttactcctgtggtctccagatttcaggcctaagatgaaagcctctagtcttgccttcagccttctctctgctgcgttttatctcctatggactccttccactggactgaagacactcaatttgggaagctgtgtgatcgccacaaaccttcaggaaatacgaaatggattttctgagatacggggcagtgtgcaagccaaagatggaaacattgacatcagaatcttaaggaggactgagtctttgcaagacacaaagcctgcgaatcgatgctgcctcctgcgccatttgctaagactctatctggacagggtatttaaaaactaccagacccctgaccattatactctccggaagatcagcagcctcgccaattcctttcttaccatcaagaaggacctccggctctgtcatgcccacatgacatgccattgtggggaggaagcaatgaagaaatacagccagattctgagtcactttgaaaagctggaacctcaggcagcagttgtgaaggctttgggggaactagacattcttctgcaatggatggaggagacagaataggaggaaagtgatgctgctgctaagaatattcgaggtcaagagctccagtcttcaatacctgcagaggaggcatgaccccaaaccaccatctctttactgtactagtcttgtgctggtcacagtgtatcttatttatgcattacttgcttccttgcatgattgtctttatgcatccccaatcttaattgagaccatacttgtataagatttttgtaatatctttctgctattggatatatttattagttaatatatttatttattttttgctatttaatgtatttatttttttacttggacatgaaactttaaaaaaattcacagattatatttataacctgactagagcaggtgatgtatttttatacagtaaaaaaaaaaaaccttgtaaattctagaagagtggctaggggggttattcatttgtattcaactaaggacatatttactcatgctgatgctctgtgagatatttgaaattgaaccaatgactacttaggatgggttgtggaataagttttgatgtggaattgcacatctaccttacaattactgaccatccccagtagactccccagtcccataattgtgtatcttccagccaggaatcctacacggccagcatgtatttctacaaataaagttttctttgcataaca

SEQ ID NO: 284337 - protein, 213 aa, Artificial Sequence
  derived and/or modified sequence
  misc_feature (1)..(1): Xaa can be any naturally occurring amino acid
XFSTSRQTLMWIPDSFFSSLLSGRISTLRDETGAIFIDRDPAAFAPILNFLRTKELDLRGVSINVLRHEAEFYGITPLVRRLLLCEELERSSCGSVLFHGYLPPPGIPSRKINNTVRSADSRNGLNSTEGEARGNGTQPVLSGTGEETVRLGFPVDPRKVLIVAGHHNWIVAAYAHFAVCYRVFWLGTVGHACNPSTLGGRDGWSSRSARPTW

SEQ ID NO: 284338 - DNA, 723 bp, Artificial Sequence
  derived and/or modified sequence
atggcgggcggtcactgtggaagttttccggccgcagcggcagggtccggggaaatcgtacaactcaatgtaggaggaacccgcttctctacatcgcgtcagaccttaatgtggattcctgactcattcttcagttccctgctgtccggtcgaatcagcactctgcgggacgagacgggggccatatttatcgaccgggatcccgccgcttttgcccccatcttgaatttcctcagaaccaaggagctggaccttagaggggtttcgatcaatgtgttgcgacacgaagctgaattctacggcattacccccctggtcaggcgactactactgtgtgaggaactggagcgaagctcttgtggatcagtgttgttccacggttatctgcccccccccggaatccctagtcggaagatcaataacactgtccgttctgccgactctcgcaatggtctgaattccacagaaggcgaagctagaggaaacggcacacaaccagtgctgtccgggaccggggaggaaaccgtgagactggggttcccggtggaccctagaaaggttcttatcgtcgcaggccatcacaattggattgttgctgcctatgctcacttcgctgtgtgttacagagtgttttggttgggaaccgttgggcatgcctgcaatcccagtacattgggtggaagggatggttggtcatcaaggtcagctcgccctacttggtag

SEQ ID NO: 284339 - DNA, 642 bp, Artificial Sequence
  derived and/or modified sequence
tgattttccacatcacgccagacacttatgtggattccagacagcttcttctcgtccctcctgtccggacggatctctaccctgcgggatgaaaccggggctatattcatcgacagggaccccgccgcatttgcaccgatattgaattttcttcgcacaaaggaactggacctccggggcgtctcgataaacgtgctacggcatgaggcggagttttacggaattacgccattggtccgacgtcttctgctgtgcgaggaactggaaagatccagttgtggctccgttctgtttcacgggtacttgccaccaccgggcataccaagtcgtaagatcaataacacggttcgatcagccgattcacggaacgggcttaactctacagaaggggaggcccgcgggaacggcactcagcctgtccttagtggcaccggtgaggaaactgtgcgcttgggctttccagtcgacccgaggaaggtgctcattgtagctgggcatcacaattggattgtcgctgcctatgcacatttcgcagtatgttatagagtattttggctcggtactgtaggccatgcatgcaatccgagtactctggggggaagggatgggtggtccagcaggagcgcccgccctacctggtag

SEQ ID NO: 284340 - DNA, 723 bp, Artificial Sequence
  derived and/or modified sequence
atggccggcggccactgcggcagcttccctgctgctgctgctggcagcggggagatcgtgcagctgaatgtgggcggcacccgcttcagcaccagccggcagaccctgatgtggatcccagacagcttcttcagcagcctgctgagcggccgcatcagcaccctgagagatgaaacaggagccatcttcatcgaccgggaccctgctgcctttgcccccatcctgaacttcctgcggaccaaggagctggacctgcggggcgtgtccatcaacgtgctgcggcatgaagctgagttctacggcatcacccccctggtgcggcggctgctgctgtgtgaggagctggagaggagcagctgtggctctgtgctcttccacggctacctgcccccacctggcatccccagcaggaagatcaacaacacagtgcgctctgctgacagcagaaatggcctgaacagcacagaaggagaggcccggggaaatggcacccagcctgtgctgtctggaactggagaggagaccgtgcggctgggcttccctgtggaccccaggaaggtgctgattgtggccggccaccacaactggatcgtggccgcctatgcccactttgctgtgtgctacagagtcttctggctgggcaccgtgggccacgcctgcaaccccagcaccctgggcggcagagatggctggagcagccgcagcgcccggcccacctggtag

SEQ ID NO: 284341 - DNA, 642 bp, Artificial Sequence
  derived and/or modified sequence
tgattcagcaccagccggcagaccctgatgtggatcccagacagcttcttcagcagcctgctgagcggccgcatcagcaccctgagagatgagaccggggccatcttcatcgaccgggaccctgctgcctttgcccccatcctgaacttcctgcggaccaaggagctggacctgcggggcgtgtccatcaacgtgctgcggcatgaggccgagttctacggcatcacccccctggtgcggcggctgctgctgtgtgaggagctggagaggagcagctgtggctctgtgctcttccacggctacctgcccccacctggcatccccagcaggaagatcaacaacacagtgcgctctgctgacagcagaaatggcctgaacagcacagaaggagaggcccggggaaatggcacccagcctgtgctgagcggcaccggggaggagaccgtgcggctgggcttccctgtggaccccaggaaggtgctgattgtggccggccaccacaactggatcgtggccgcctatgcccactttgctgtgtgctacagagtcttctggctgggcaccgtgggccacgcctgcaaccccagcaccctgggcggcagagatggctggagcagccgcagcgcccggcccacctggtag

SEQ ID NO: 284342 - DNA, 723 bp, Artificial Sequence
  derived and/or modified sequence
atggccggcggccactgcggcagcttccccgccgccgccgccggcagtggggagatagtccaactcaatgtgggaggcacgagattttcaactagtagacagactctaatgtggatcccagactccttctttagtagcctcctgtcaggcagaattagtacactccgcgacgaaactggcgctatattcatagacagagatccagccgctttcgccccaatactgaattttctgaggactaaagaactcgacttaaggggggtgagcatcaatgtgctccgtcacgaggctgagttttatggcattacgccccttgtgcggcggctgctcctatgcgaggaactggaacgaagctcttgcggtagtgtcctcttccatgggtatcttccaccacccgggatcccctctaggaaaattaacaacaccgtgcgttccgcagatagtcggaatgggctcaatagcacagagggcgaagccagggggaatgggacgcagcctgttctttcagggaccggcgaagaaaccgtgcggttggggttccccgtggacccaaggaaagtgctcatcgttgccggtcatcataactggattgtcgccgcctatgcacactttgcagtctgttatcgcgtgttctggttagggaccgtgggtcacgcatgtaacccctctaccctggggggtcgagacggctggtcatcaagatcagctcgacccacatggtag

SEQ ID NO: 284343 - DNA, 642 bp, Artificial Sequence
  derived and/or modified sequence
tgattcagcaccagccggcagaccctgatgtggatccccgacagcttcttctcttccctcctgtcaggccgcatttctactctgcgggacgagacaggcgcgatcttcattgatagagaccctgccgctttcgctcctatactaaatttcctgcgcacaaaagaattggacctaagaggtgtatcaatcaatgtgctgcgacacgaagctgagttctacggaatcactcctttggtgagacggctcctgctatgtgaagagcttgaacggtcctcatgcggaagcgtcttgttccacggatatcttccccctcctggcattccgagcagaaagatcaacaacacagtgaggagcgccgatagtcgtaatggcctgaactccactgagggtgaggctagagggaacggtacgcagccagttttgagtggcacaggagaagaaactgtgaggttaggtttcccagtggatcccagaaaggtgctgatagtggctggccaccataactggatagtggccgcgtatgcccacttcgctgtgtgctatagagtgttctggctgggcaccgtcggtcacgcttgcaatccaagtaccctggggggacgggatggttggtcatcaaggtctgctagaccaacttggtag

SEQ ID NO: 284344 - DNA, 1017 bp, Artificial Sequence
  derived and/or modified sequence
gtcggtggcagcggagcacggagaagaggcccgggcggcccggcggcctggaggccgcgaaaggtggaggccgggccgcccttgtgcaccgcaggattgacccgggaaggggcagaagctagcgagccccgcccggccgccgggaaggtgggggaagccccgtgcaccccccgccctccggccgccgccgccccgctggccctgcagccgtcgccgctgcctcgggctacagccccgggctcggcggtcccggctggggaaggagggcggcgagcgcgtccggagccgccggagatggcgggagggcactgcggcagcttccccgcggcggcggccggcagcggcgagatcgtccaactgaacgtaggggggaccagatttagtacctcaagacaaactcttatgtggattccagattcttttttttccagtttgctgagtgggagaatttcaacacttcgagatgaaactggtgctatatttattgatagagatccagcagcatttgcacccattttaaattttcttcggacaaaagaactagacttaaggggagtgagtattaatgttctcaggcatgaagcagaattttacgggatcactccattagtaagaaggcttctcttatgtgaagaattggagcgttcctcttgtggcagtgtcctttttcatggttacttgcccccaccaggtattcctagtcgtaaaataaacaacacagtcagatctgctgattctaggaatggtctaaattctacagaaggtgaagcccggggaaatggtacacagcctgttctctctggaacgggagaagaaactgttaggctaggatttcctgtggatccacgaaaggtgctaatagtagctggccatcacaactggattgtagctgcatatgcccattttgctgtgtgttacagagtgttttggctgggcacggtgggtcacgcctgtaatcccagcactttgggaggccgagatgggtggagttcaagatcagcccgaccaacatggtga

SEQ ID NO: 284345 - DNA, 1905 bp, Artificial Sequence
  derived and/or modified sequence
gtcggtggcagcggagcacggagaagaggcccgggcggcccggcggcctggaggccgcgaaaggtggaggccgggccgcccttgtgcaccgcaggattgacccgggaaggggcagaagctagcgagccccgcccggccgccgggaaggtgggggaagccccgtgcaccccccgccctccggccgccgccgccccgctggccctgcagccgtcgccgctgcctcgggctacagccccgggctcggcggtcccggctggggaaggagggcggcgagcgcgtccggagccgccggagatggcgggagggcactgcggcagcttccccgcggcggcggccggcagcggcgagatcgtccaactgaacgtaggggggaccagatttagtacctcaagacaaactcttatgtggattccagattcttttttttccagtttgctgagtgggagaatttcaacacttcgagatgaaactggtgctatatttattgatagagatccagcagcatttgcacccattttaaattttcttcggacaaaagaactagacttaaggggagtgagtattaatgttctcaggcatgaagcagaattttacgggatcactccattagtaagaaggcttctcttatgtgaagaattggagcgttcctcttgtggcagtgtcctttttcatggttacttgcccccaccaggtattcctagtcgtaaaataaacaacacagtcagatctgctgattctaggaatggtctaaattctacagaaggtgaagcccggggaaatggtacacagcctgttctctctggaacgggagaagaaactgttaggctaggatttcctgtggatccacgaaaggtgctaatagtagctggccatcacaactggattgtagctgcatatgcccattttgctgtgtgttacagaatcaaagaatcttcaggatggcagcaagtgtttacgagcccatatttggattggactatcgaacgagtagctttaaatgcaaaggtggttggagggccacatggagacaaagacaaaatggttgctgttgcctcagagagtagcatcatcttgtggagtgttcaggatgggggaagtggaagtgaaattggagtgttcagcctgggtgttcctgtagatgctctcttctttattggtaaccagttggtggccacgagtcatacagggaaagtgggagtgtggaatgctgtcactcagcactggcaggttcaagatgttgttcctataactagttatgacactgctggatcattccttctgcttggatgtaacaatggatcaatatattacatagatatgcagaagttccccttgcgaatgaaagataatgatcttcttgtaactgaactgtatcatgatccttcaaatgatgctattactgctctgagtgtttacctcacacccaaaacaagtgtcagtggtaactggatcgagatcgcctatggtacgagctctggagcagtacgagtgattgtacaacacccagagacagttgggtcaggtcctcagctttttcagactttcacagttcaccgaagtcccgtaacaaaaatcatgctatcagagaagcatcttgtatcagtctgtgcagataataatcatgtccggacgtggacagtaacacgattcagaggaatgatctctactcagccaggttctactcctttagcgtcattcaagatactatccctggaggagacagaaagtcatggtagctattcctctggaaatgacataggaccttttggagagcgagacgatcaacaggtgtttatccagaaagttgttcccatcaccaacaaactatttgtaagactctcatcgactggaaaaagtctgtgtggtgtcagtttggtttctagatccagccaagagcccacataa

SEQ ID NO: 284346 - DNA, 751 bp, Artificial Sequence
  derived and/or modified sequence
atttagtacctcaagacaaactcttatgtggattccagattcttttttttccagtttgctgagtgggagaatttcaacacttcgagatgaaactggtgctatatttattgatagagatccagcagcatttgcacccattttaaattttcttcggacaaaagaactagacttaaggggagtgagtattaatgttctcaggcatgaagcagaattttacgggatcactccattagtaagaaggcttctcttatgtgaagaattggagcgttcctcttgtggcagtgtcctttttcatggttacttgcccccaccaggtattcctagtcgtaaaataaacaacacagtcagatctgctgattctaggaatggtctaaattctacagaaggtgaagcccggggaaatggtacacagcctgttctctctggaacgggagaagaaactgttaggctaggatttcctgtggatccacgaaaggtgctaatagtagctggccatcacaactggattgtagctgcatatgcccattttgctgtgtgttacagagtgttttggctgggcacggtgggtcacgcctgtaatcccagcactttgggaggccgagatgggtggagttcaagatcagcccgaccaacatggtgaaaccccatctctactgaagatacaaaaattagccaggtgtggtgatgcatgcctgtaatcccagctactcgggaggctgaggcaggagaatcacttgaacccaggaggtgg

SEQ ID NO: 284347 - DNA, 723 bp, Artificial Sequence
  derived and/or modified sequence
atggccggagggcactgtggaagttttcctgccgcagctgccggatccggagagatcgtacagttgaatgttggcggaaccaggttcagcacaagcaggcaaactcttatgtggatcccagattctttcttcagcagccttttgagtggcagaatttccactctcagagatgaaaccggggcaattttcattgaccgggaccctgccgcattcgccccaattctgaactttctgaggaccaaagagctagatctacggggagtgagtattaatgtgctgagacacgaagccgaattctacggcatcacgcccctggtgcgccgactgctgctgtgtgaggaactcgaaaggagctcttgcgggagcgtgctcttccacggatatctgccacctcccggaattccatctagaaagattaataacacagtgcgatccgctgattcacgcaacggtttgaacagcactgagggtgaggcgaggggtaatggcacacagccagtgctgagcggcacgggggaggaaacagttcgcctggggtttcctgtggatcctaggaaggtgctcatagtggcaggtcatcacaattggattgtggctgcgtatgcccacttcgctgtctgctatcgggtcttctggctgggcaccgtgggtcacgcatgtaaccccagtaccctaggcggaagggatggatggtctagccgtagcgcgagaccgacgtggtag

SEQ ID NO: 284348 - DNA, 642 bp, Artificial Sequence
  derived and/or modified sequence
taattctctacaagccgtcaaacgttaatgtggataccagactcctttttttcatcactgttgagcggcagaatctccaccctgcgtgacgaaacgggtgcgattttcattgatcgcgaccccgcagcctttgcacccatcttaaacttcttgaggaccaaagagttggacctgcggggagtttccattaacgtccttagacacgaggccgagttttatgggattaccccactggtgcgacgccttctactgtgtgaggaactggagcggtccagctgtggctccgtcctgtttcacggctatttgccccctccagggatccccagccgcaagataaacaatactgtgagatcggccgactctcggaatggactgaacagtacagagggtgaagcgaggggcaatggcactcaacccgtgctctcaggaactggcgaggaaactgttcggttaggattccctgttgacccaagaaaggttctgatcgtggccggacaccacaattggatagtggcagcttatgctcactttgctgtctgctatagagtgttctggcttggaacagtcggccacgcctgtaatcccagcaccctaggtggaagagatggttggtcctcacggagcgccaggccaacatggtag

SEQ ID NO: 284349 - DNA, 723 bp, Artificial Sequence
  derived and/or modified sequence
atggccggcggccactgcggcagcttccccgccgccgccgccggcagcggcgagatcgtgcagctgaacgtgggcggcaccagattcagcaccagcagacagaccctgatgtggatccccgacagcttcttcagcagcctgctgagcggcagaatcagcaccctgagagacgagaccggcgccatcttcatcgacagagaccccgccgccttcgcccccatcctgaacttcctgagaaccaaggagctggacctgagaggcgtgagcatcaacgtgctgagacacgaggccgagttctacggcatcacccccctggtgagaagactgctgctgtgcgaggagctggagagaagcagctgcggcagcgtgctgttccacggctacctgcccccccccggcatccccagcagaaagatcaacaacaccgtgagaagcgccgacagcagaaacggcctgaacagcaccgagggcgaggccagaggcaacggcacccagcccgtgctgagcggcaccggcgaggagaccgtgagactgggcttccccgtggaccccagaaaggtgctgatcgtggccggccaccacaactggatcgtggccgcctacgcccacttcgccgtgtgctacagagtgttctggctgggcaccgtgggccacgcctgcaaccccagcaccctgggcggcagagacggctggagcagcagaagcgccagacccacctggtag

SEQ ID NO: 284350 - DNA, 642 bp, Artificial Sequence
  derived and/or modified sequence
tgattcagcaccagcagacagaccctgatgtggatccccgacagcttcttcagcagcctgctgagcggcagaatcagcaccctgagagacgagaccggcgccatcttcatcgacagagaccccgccgccttcgcccccatcctgaacttcctgagaaccaaggagctggacctgagaggcgtgagcatcaacgtgctgagacacgaggccgagttctacggcatcacccccctggtgagaagactgctgctgtgcgaggagctggagagaagcagctgcggcagcgtgctgttccacggctacctgcccccccccggcatccccagcagaaagatcaacaacaccgtgagaagcgccgacagcagaaacggcctgaacagcaccgagggcgaggccagaggcaacggcacccagcccgtgctgagcggcaccggcgaggagaccgtgagactgggcttccccgtggaccccagaaaggtgctgatcgtggccggccaccacaactggatcgtggccgcctacgcccacttcgccgtgtgctacagagtgttctggctgggcaccgtgggccacgcctgcaaccccagcaccctgggcggcagagacggctggagcagcagaagcgccagacccacctggtag

SEQ ID NO: 284351 - protein, 188 aa, Artificial Sequence
  derived and/or modified sequence
MKDNDLLVTELYHDPSNDAITALSVYLTPKTSVSGNWIEIAYGTSSGAVRVIVQHPETVGSGPQLFQTFTVHRSPVTKIMLSEKHLVSVCADNNHVRTWTVTRFRGMISTQPGSTPLASFKILSLEETESHGSYSSGNDIGPFGERDDQQVFIQKVVPITNKLFVRLSSTGKSLCGVSLVSRSSQEPT

SEQ ID NO: 284352 - protein, 168 aa, Artificial Sequence
  derived and/or modified sequence
  misc_feature (1)..(1): Xaa can be any naturally occurring amino acid
XALSVYLTPKTSVSGNWIEIAYGTSSGAVRVIVQHPETVGSGPQLFQTFTVHRSPVTKIMLSEKHLVSVCADNNHVRTWTVTRFRGMISTQPGSTPLASFKILSLEETESHGSYSSGNDIGPFGERDDQQVFIQKVVPITNKLFVRLSSTGKSLCGVSLVSRSSQEPT

SEQ ID NO: 284353 - DNA, 567 bp, Artificial Sequence
  derived and/or modified sequence
atgaaagacaacgacttacttgtgaccgaattgtaccatgaccccagtaacgatgcaattacagccctctcagtatatctgaccccaaagacctccgtcagtggcaactggatcgaaattgcttatggcacctcaagcggcgcggtcagggttattgtgcagcatcctgaaaccgtggggtctggacctcaacttttccagacatttacagtccaccggtctcccgtgacaaagattatgctgtccgagaaacatctagtgtctgtctgcgccgacaacaaccatgtgcgcacatggacagtcacccgttttcggggtatgatttccactcagccagggtctaccccacttgcatctttcaagatcctttcattggaggagacggaatcccacggatcatatagcagcggcaacgatattgggccatttggggagagagacgatcagcaggtctttatccaaaaggtggttcctatcacaaacaaattgttcgtccgcctgagttctactggaaaatccctttgcggcgtgagtctggtcagtcggtctagtcaggaacctacttag

SEQ ID NO: 284354 - DNA, 507 bp, Artificial Sequence
  derived and/or modified sequence
taagctctttccgtgtatctgactccaaagacctcagtgtccggaaattggatcgagatcgcctatgggacctccagcggtgcagtaagagtgattgtgcagcatccagaaaccgttggctccgggccccagctcttccagacatttactgttcacaggtctcctgtcaccaagattatgcttagcgagaagcaccttgtgtccgtgtgtgctgataataatcatgtacgtacttggaccgttaccagatttagggggatgatctcaacgcaaccaggaagtacgccgctcgcgtctttcaagatcctgtccctggaggaaacagaatcccacggtagctacagctcgggcaacgacattggaccctttggcgaacgcgacgaccagcaggtgttcattcaaaaagtggtgccaatcacaaataagttgttcgtgcggctgtcctccaccggaaagagcttgtgtggtgtttctctggtatctagatcttcccaggaaccgacttag

SEQ ID NO: 284355 - DNA, 567 bp, Artificial Sequence
  derived and/or modified sequence
atgaaggacaatgacctgctggtgacagagctgtaccatgaccccagcaatgatgccatcacagccctgtctgtgtacctgacccccaagacctctgtgtctggcaactggattgagatcgcctacggcaccagcagcggggctgtgcgggtcatcgtgcagcaccctgagaccgtgggcagcggcccccagctgttccagaccttcaccgtgcacaggagccctgtgaccaagatcatgctgtctgagaagcacctggtgtctgtgtgtgccgacaacaaccacgtgaggacctggacagtgacccgcttccggggcatgatcagcacccagcccggcagcacccccctggccagcttcaagatcctgagcctggaggagacagagagccacggcagctacagcagtggaaatgacatcggcccctttggagagagagatgaccagcaggtgttcatccagaaggtggtgcccatcaccaacaagctgtttgtgcggctgagcagcacaggcaagagcctgtgtggggtgtccctggtgagccgcagcagccaggagcccacctag

SEQ ID NO: 284356 - DNA, 507 bp, Artificial Sequence
  derived and/or modified sequence
tgagccctgtctgtgtacctgacccccaagacctctgtgtctggcaactggattgagatcgcctacggcaccagcagcggggctgtgcgggtcatcgtgcagcaccctgagaccgtgggcagcggcccccagctgttccagaccttcaccgtgcacaggagccctgtgaccaagatcatgctgtctgagaagcacctggtgtctgtgtgtgccgacaacaaccacgtgaggacctggacagtgacccgcttccggggcatgatcagcacccagcccggcagcacccccctggccagcttcaagatcctgagcctggaggagacagagagccacggcagctacagcagtggaaatgacatcggcccctttggagagagagatgaccagcaggtgttcatccagaaggtggtgcccatcaccaacaagctgtttgtgcggctgagcagcacaggcaagagcctgtgtggggtgtccctggtgagccgcagcagccaggagcccacctag

SEQ ID NO: 284357 - DNA, 567 bp, Artificial Sequence
  derived and/or modified sequence
atgaaggacaacgacctgctggtgaccgagctgtaccacgacccctccaatgatgccatcaccgccctgtcggtgtacctgacccctaaaacttctgtatcaggaaactggattgagatcgcatatggcacatcctccggtgccgtgcgcgtcatagtgcagcatcccgagacagtcgggtccggaccacagcttttccaaaccttcacagttcatcggagccccgttacaaaaattatgctgtccgagaaacatctggtctcggtgtgcgccgataacaatcatgtcaggacctggacagtaacccgattcaggggaatgatcagcacccagccagggtccacaccactggcctcctttaagatactcagtctggaggagactgaaagtcatggctcctattcttctggcaacgacataggaccatttggcgaaagagacgaccagcaagtgtttattcagaaggttgtgccaattacgaataaactgttcgtacgactaagctccacaggcaagtcactgtgcggcgtttcgctggttagtagatcatcccaggaacccacatag

SEQ ID NO: 284358 - DNA, 507 bp, Artificial Sequence
  derived and/or modified sequence
tgagccctgagcgtgtacctgacccccaagaccagcgtgagcggcaattggatcgagatagcctatggaacctcgagtggcgccgtacgcgtaatcgtgcagcaccctgaaaccgtcggaagtgggccgcagttatttcagacgtttactgtgcaccgctctcccgtcactaagattatgttaagtgaaaagcacttagtatcggtttgtgctgacaacaatcacgtccgcacctggacggtcacgagatttaggggcatgatcagcacacaaccaggcagcacccccttagcgagtttcaaaatcctcagtcttgaggagacagaatcgcacgggagctatagcagcggaaatgacatcggaccttttggcgagagggacgaccaacaggtcttcattcaaaaggttgtaccaattactaataaactattcgtgcgactctcttcaaccgggaagtccctatgtggcgtttcattggtgtcaagatccagtcaggagcccacctag

SEQ ID NO: 284359 - DNA, 589 bp, Artificial Sequence
  derived and/or modified sequence
tgctctgagtgtttacctcacacccaaaacaagtgtcagtggtaactggatcgagatcgcctatggtacgagctctggagcagtacgagtgattgtacaacacccagagacagttgggtcaggtcctcagctttttcagactttcacagttcaccgaagtcccgtaacaaaaatcatgctatcagagaagcatcttgtatcagtctgtgcagataataatcatgtccggacgtggacagtaacacgattcagaggaatgatctctactcagccaggttctactcctttagcgtcattcaagatactatccctggaggagacagaaagtcatggtagctattcctctggaaatgacataggaccttttggagagcgagacgatcaacaggtgtttatccagaaagttgttcccatcaccaacaaactatttgtaagactctcatcgactggaaaaagtctgtgtggtgtcagtttggtttctagatccagccaagagcccacataactaaaagggcatttggagaatatgtgagatccaggctgttgactgtactacaatatcctcatttacagtgagggaatgtgaggg

SEQ ID NO: 284360 - DNA, 567 bp, Artificial Sequence
  derived and/or modified sequence
atgaaggacaacgatctgttggtgactgagctataccatgatccttccaacgatgctattaccgctctcagcgtgtatctcactccaaagacctctgtttcaggtaattggatcgaaatcgcttatggcactagttccggtgccgtcagagtgatcgtccagcatcccgagactgtcgggtcaggaccacaactcttccagacgttcacagtccataggtctccagttaccaagatcatgctttccgagaaacatctcgttagtgtgtgcgccgataataaccacgtgcgaacttggacagtaacacgatttcgcggaatgatcagcacacagcctggaagcacgcccttggccagctttaagattctttctctcgaggagactgagtctcatggcagttatagcagcgggaacgacattggacccttcggggagcgcgacgaccagcaggtgtttatccagaaagtagtgcctatcactaataagctattcgtgcgattgtctagcaccggcaaatctctgtgtggcgtttcccttgtctctcggtcttcccaggagcccacgtag

SEQ ID NO: 284361 - DNA, 507 bp, Artificial Sequence
  derived and/or modified sequence
taggcactgtcggtgtatctgacccctaagactagcgtgtccgggaattggatcgagatagcttatggcacctcttccggtgccgtgagagtgattgttcagcacccagagactgtcggtagcggtccacagctcttccaaacattcacagtccaccgcagccccgtaaccaagatcatgctgtccgagaaacacctcgttagcgtttgcgccgataacaatcatgtacggacatggaccgtgacaagattcaggggtatgatctcaacccagccaggttctactcccctcgcttctttcaaaattctaagcctggaggagaccgagagccatggaagctactccagtggcaatgatattggaccatttggagagcgggacgaccagcaggtcttcatccagaaggtggtgcctatcactaataaactgttcgtgcggctgtcatctaccggtaagagtctgtgcggggtgagtctggtgagcagaagctcacaggaacccacctag

SEQ ID NO: 284362 - DNA, 567 bp, Artificial Sequence
  derived and/or modified sequence
atgaaggacaacgacctgctggtgaccgagctgtaccacgaccccagcaacgacgccatcaccgccctgagcgtgtacctgacccccaagaccagcgtgagcggcaactggatcgagatcgcctacggcaccagcagcggcgccgtgagagtgatcgtgcagcaccccgagaccgtgggcagcggcccccagctgttccagaccttcaccgtgcacagaagccccgtgaccaagatcatgctgagcgagaagcacctggtgagcgtgtgcgccgacaacaaccacgtgagaacctggaccgtgaccagattcagaggcatgatcagcacccagcccggcagcacccccctggccagcttcaagatcctgagcctggaggagaccgagagccacggcagctacagcagcggcaacgacatcggccccttcggcgagagagacgaccagcaggtgttcatccagaaggtggtgcccatcaccaacaagctgttcgtgagactgagcagcaccggcaagagcctgtgcggcgtgagcctggtgagcagaagcagccaggagcccacctag

SEQ ID NO: 284363 - DNA, 507 bp, Artificial Sequence
  derived and/or modified sequence
tgagccctgagcgtgtacctgacccccaagaccagcgtgagcggcaactggatcgagatcgcctacggcaccagcagcggcgccgtgagagtgatcgtgcagcaccccgagaccgtgggcagcggcccccagctgttccagaccttcaccgtgcacagaagccccgtgaccaagatcatgctgagcgagaagcacctggtgagcgtgtgcgccgacaacaaccacgtgagaacctggaccgtgaccagattcagaggcatgatcagcacccagcccggcagcacccccctggccagcttcaagatcctgagcctggaggagaccgagagccacggcagctacagcagcggcaacgacatcggccccttcggcgagagagacgaccagcaggtgttcatccagaaggtggtgcccatcaccaacaagctgttcgtgagactgagcagcaccggcaagagcctgtgcggcgtgagcctggtgagcagaagcagccaggagcccacctag

SEQ ID NO: 284364 - DNA, 1452 bp, Artificial Sequence
  derived and/or modified sequence
atgaaagcactcgacgagcctccatacctcacagtcggaacagatgtgagtgccaagtaccgcggcgcattttgtgaggcgaaaattaagacagcgaagagactagtgaaggtgaaggtgaccttcaggcacgattcgtcaactgttgaagtccaggatgatcacatcaaaggtcctcttaaagtaggtgctatcgttgaagttaagaatctagatggggcctatcaggaagctgtgatcaataagcttaccgacgccagttggtacactgtcgtttttgacgatggcgacgagaaaacacttcgtcgctcttcgctgtgcttgaagggagagaggcacttcgcagagagtgagaccctagaccaactcccactgactaaccccgaacatttcggaactccagtgatagggaaaaagaccaaccgaggcaggagatctaatcacatcccagaggaagagtcatcttcgtcatctagcgacgaggatgaagatgatcgtaaacagatcgatgagctcttaggcaaggtcgtttgcgtggattacatcagtctggataagaagaaagctctctggtttccagccctggtggtgtgcccggattgctctgacgagatcgcagtgaagaaggacaatattctggtgcggtccttcaaggatggcaagtttacaagtgtgccacggaaagacgttcacgagattacaagcgacaccgcgccgaaacctgatgccgtcttaaaacaagctttcgaacaggcgctggagttccataaatcccggaccatcccggccaattggaaaaccgagctgaaggaagatagcagctcatctgaggcagaggaagaagaggaggaagaggacgatgagaaagagaaggaggataactcaagcgaagaagaggaggaaatcgaaccttttccagaagaaagggagaatttcttacagcagctctacaagtttatggaggatagaggaacacccatcaacaagagaccagtgttgggctaccggaatctgaacctgtttaaacttttccgtctggtgcacaagctgggagggttcgacaacattgaatcgggagccgtgtggaagcaggtataccaagacctgggcatacctgtgctgaattcagcggcagggtacaacgtcaagtgcgcctacaaaaagtacctgtatggattcgaagagtattgcaggagtgcaaacatcgagtttcaaatggcacttcctgagaaagtagtgaataaacaatgtaaggaatgcgagaacgtaaaggaaattaaagttaaagaggaaaatgaaaccgagattaaagaaatcaaaatggaggaggaaagaaacattattccacgagaggagaagcccattgaggatgagatcgagagaaaggagaacatcaagccctccctgggcagtaagaaaaatctacttgagtcaatccctacccactcctag

SEQ ID NO: 284365 - DNA, 1452 bp, Artificial Sequence
  derived and/or modified sequence
atgaaggccctggatgagcccccctacctgactgtgggcacagatgtgtctgccaagtacagaggagccttctgtgaggccaagatcaagacagccaagaggctggtgaaggtgaaggtgaccttcagacatgacagcagcacagtggaggtgcaggatgaccacatcaagggccccctgaaggtgggcgccatcgtggaggtgaagaacctggatggagcctaccaggaggccgtcatcaacaagctgacagatgcctcctggtacacagtggtgtttgatgatggagatgagaagaccctgcggcgcagcagcctgtgcctgaagggggagcggcactttgctgagagcgagaccctggaccagctgcccctgaccaaccctgagcacttcggcacccctgtgattggcaagaagaccaacagaggccgccgcagcaaccacatccctgaggaggagagcagcagcagcagcagtgatgaagatgaagatgacaggaagcagattgatgagctgctgggcaaggtggtgtgtgtggactacatcagcctggacaagaagaaggccctgtggttccctgccctggtggtgtgcccagactgcagtgatgaaattgctgtgaagaaggacaacatcctggtgcgctccttcaaggatggcaagttcacctctgtgcccaggaaggatgtgcatgagatcaccagtgacacagcccccaagccagatgctgtgctgaagcaggcctttgagcaggccctggagttccacaagagcaggaccatcccagccaactggaagacagagctgaaggaggacagcagcagcagcgaggccgaggaggaggaggaggaggaggatgatgagaaggagaaggaggacaacagcagcgaggaggaggaggagattgagcccttccctgaggagcgggagaacttcctgcagcagctgtacaagttcatggaggaccggggcacccccatcaacaagaggcctgtgctgggctacagaaacctgaacctcttcaagctgttccggctggtgcacaagctgggcggctttgacaacatcgagagcggggctgtgtggaagcaggtgtaccaggacctgggcatccctgtgctgaacagcgctgctggctacaacgtgaagtgtgcctacaagaagtacctgtatggctttgaggagtactgccgcagcgccaacatcgagttccagatggccctgcctgagaaggtggtgaacaagcagtgcaaggaatgtgaaaatgtgaaggagatcaaggtgaaggaggagaatgaaacagagatcaaggagatcaagatggaggaggagaggaacatcatcccccgggaggagaagcccattgaagatgaaattgaaagaaaagaaaacatcaagcccagcctgggcagcaagaagaacctgctggagagcatccccacccacagctag

SEQ ID NO: 284366 - DNA, 1452 bp, Artificial Sequence
  derived and/or modified sequence
atgaaggccctggacgagcccccctacctgaccgtgggcaccgacgtgtccgcaaagtatcgtggggctttctgtgaagctaagattaagacagccaagcggctggtcaaggtgaaagtgacgtttagacatgacagttccaccgtcgaggtgcaagacgatcatattaaaggtcccctcaaggtgggggcgatcgtggaagttaagaacctggacggggcctatcaggaagcggtaattaacaagctgactgatgcatcctggtacacagtggtgtttgacgacggcgacgaaaagactttgagacgcagctcactctgcctcaagggggaaagacactttgctgagtcagaaacactggaccagttgcctctgacgaaccctgagcattttggcacgcctgttattggaaaaaagacgaatcgtggacggaggtctaatcatatccccgaagaggaaagcagcagctcaagctctgatgaagacgaagatgatagaaagcagatcgatgaattgttggggaaggtggtgtgcgtggactacatcagtctggataagaagaaggcactatggttcccagccctggtggtgtgccctgattgtagcgatgagatcgctgtcaaaaaggacaacattctcgtcagaagttttaaggacgggaagttcacatctgtccccaggaaagatgtgcacgaaataactagcgatacagctccaaagcccgatgctgtattaaagcaggcattcgaacaggctcttgagttccacaagtccagaaccatccctgctaattggaaaaccgagctaaaggaggattctagcagcagcgaggccgaggaagaggaagaagaagaggatgatgaaaaggagaaggaggacaattcatcagaagaggaagaagagattgagccatttccagaggagagggagaattttctgcagcagctatacaaattcatggaggacagagggaccccaattaacaagcgaccagtcctgggctacaggaacctcaacctgttcaagctcttcagactcgttcacaaacttggcggtttcgataatatcgagtcgggagccgtctggaagcaggtctaccaggacttggggattcctgtccttaacagcgcggcaggatacaatgtgaagtgtgcctataaaaagtatttgtacgggttcgaggaatactgccggagtgcaaacatcgagttccagatggctctgcccgaaaaagtggtcaataagcagtgcaaggagtgtgagaacgttaaggaaatcaaggtgaaagaggaaaatgaaaccgaaataaaagagattaaaatggaagaggaaagaaacatcattccgcgtgaggagaaaccgattgaagacgagatagagcgcaaagagaatatcaaacccagcctggggtcaaagaagaatcttctagaatctattcccactcactcttag

SEQ ID NO: 284367 - DNA, 1452 bp, Artificial Sequence
  derived and/or modified sequence
atgaaggccctggatgagcccccatatctaacggtgggcacagatgtgtctgcaaaatataggggggcattttgtgaggctaaaatcaagactgcaaagagactcgtcaaggtaaaagtcacgttccgccatgattcctcaaccgtagaggtgcaggacgatcacatcaagggtcctttaaaggttggggctatcgtggaggtgaaaaatctggacggcgcttatcaggaggccgtgatcaacaagttaactgacgcatcatggtatacagtcgtgttcgatgacggagatgagaaaaccctgaggcggagtagcctttgcctgaagggtgaacggcacttcgcagagagcgagaccctggaccaactgccccttactaaccccgagcatttcggcaccccagtaattgggaagaagaccaacaggggccgaagatctaatcatattccagaggaagagagctcttccagcagttctgacgaagacgaagatgataggaaacagattgacgagctcctcggaaaggtcgtgtgtgtggactatatttccctggataagaaaaaggcgctttggtttcccgctctggtcgtgtgccccgactgttccgatgaaatcgctgttaagaaggacaacatcctcgtccggagtttcaaggacggcaaatttacttctgtgccacggaaagacgtacacgaaattaccagtgacactgctcccaagcctgacgccgtgctcaagcaagcctttgaacaggctctcgaatttcataaatctcgtactatcccagcaaactggaagaccgagctgaaagaagactcttcttcttccgaggcagaggaggaagaggaggaggaggacgacgagaaagagaaagaagacaactcttctgaagaggaagaggaaatcgaaccatttccggaggaacgggaaaactttttgcagcagctgtacaaatttatggaagacagaggaacacctatcaacaagaggcccgtgctgggctatcgtaacctcaacctgtttaagctgtttcggctggtacacaaattgggaggcttcgataatattgagtccggcgcagtctggaagcaggtgtatcaggatctgggaattcctgtgctgaattccgccgcaggttataacgtcaaatgcgcatacaaaaagtatctgtatggttttgaagagtattgtaggtctgccaatattgagttccagatggccttacctgaaaaggtggtaaacaaacagtgcaaggagtgtgagaatgtgaaggagatcaaggtgaaagaggagaatgagactgagattaaagagatcaagatggaagaggagagaaacataatccccagggaagaaaaacctattgaggatgagatcgagcgtaaggagaatatcaagcccagtctgggatccaagaaaaacctgctggaatctatcccaacccattcctag

SEQ ID NO: 284368 - DNA, 1759 bp, Artificial Sequence
  derived and/or modified sequence
ggtgggggggaagcgatgtttgcccgtcagtcgagtccggagtgaggagctcggtcgccgaagcggagggagactcttgagcttcatcttgccgccgccacggccaccgcctggacctttgcccggagggagctgcagagggtccatcgccgccgtcctctggagggcagcgcgattgggggcccggacctccagtccgggggggatttttcgtcgtccccctccccccaaccagggagcccgagcggccgccaaacaaaggtgcagctgaacctggtgttttagaggataccttggtcccagagtcatcatgaaggcccttgatgagcctccctatttgacagtgggcactgatgtgagtgctaaatacagaggagccttttgtgaagccaagatcaagacagcaaaaagacttgtcaaagtcaaggtgacatttagacatgattcttcaacagtggaagttcaggatgaccacataaagggcccactaaaggtaggagctattgtggaagtgaagaatcttgatggtgcatatcaggaagctgttatcaataaactaacagatgcgagttggtacactgtagtttttgatgacggagatgagaagacactgagacgatcttcactgtgcctgaaaggagagaggcattttgctgaaagtgaaacattagaccagctcccactcaccaaccctgagcattttggcactccagtcataggaaagaaaacaaatagaggaagaagatctaatcatataccagaggaagagtcttcatcatcctccagtgatgaagatgaggatgataggaaacagattgatgagctactaggcaaagttgtatgtgtagattacattagtttggataaaaagaaagcactgtggtttcctgcattggtggtttgtcctgattgtagtgatgagattgctgtaaaaaaggacaatattcttgttcgatctttcaaagatggaaaatttacttcagttccaagaaaagatgtccatgaaattactagtgacactgcaccaaagcctgatgctgttttaaagcaagcctttgaacaggcacttgaatttcacaaaagtagaactattcctgctaactggaagactgaattgaaagaagatagctctagcagtgaagcagaggaagaagaggaggaggaagatgatgaaaaagaaaaggaggataatagcagtgaagaagaagaagaaatagaaccatttccagaagaaagggagaactttcttcagcaattgtacaaatttatggaagatagaggtacacctattaacaaacgacctgtacttggatatcgaaatttgaatctctttaagttattcagacttgtacacaaacttggaggatttgataatattgaaagtggagctgtttggaaacaagtctaccaagatcttggaatccctgtcttaaattcagctgcaggatacaatgttaaatgtgcttataaaaaatacttatatggttttgaggagtactgtagatcagccaacattgaatttcagatggcattgccagagaaagttgttaacaagcaatgtaaggagtgtgaaaatgtaaaagaaataaaagttaaggaggaaaatgaaacagagatcaaagaaataaagatggaggaggagaggaatataataccaagagaagaaaagcctattgaggatgaaattgaaagaaaagaaaatattaagccctctctgggaagtaaaaagaatttattagaatctatacctacacattct

SEQ ID NO: 284369 - DNA, 1452 bp, Artificial Sequence
  derived and/or modified sequence
atgaaggccctggacgagcccccctacctgaccgtgggcaccgacgtgagcgccaagtacagaggcgccttctgcgaggccaagatcaagaccgccaagagactggtgaaggtgaaggtgaccttcagacacgacagcagcaccgtggaggtgcaggacgaccacatcaagggccccctgaaggtgggcgccatcgtggaggtgaagaacctggacggcgcctaccaggaggccgtgatcaacaagctgaccgacgccagctggtacaccgtggtgttcgacgacggcgacgagaagaccctgagaagaagcagcctgtgcctgaagggcgagagacacttcgccgagagcgagaccctggaccagctgcccctgaccaaccccgagcacttcggcacccccgtgatcggcaagaagaccaacagaggcagaagaagcaaccacatccccgaggaggagagcagcagcagcagcagcgacgaggacgaggacgacagaaagcagatcgacgagctgctgggcaaggtggtgtgcgtggactacatcagcctggacaagaagaaggccctgtggttccccgccctggtggtgtgccccgactgcagcgacgagatcgccgtgaagaaggacaacatcctggtgagaagcttcaaggacggcaagttcaccagcgtgcccagaaaggacgtgcacgagatcaccagcgacaccgcccccaagcccgacgccgtgctgaagcaggccttcgagcaggccctggagttccacaagagcagaaccatccccgccaactggaagaccgagctgaaggaggacagcagcagcagcgaggccgaggaggaggaggaggaggaggacgacgagaaggagaaggaggacaacagcagcgaggaggaggaggagatcgagcccttccccgaggagagagagaacttcctgcagcagctgtacaagttcatggaggacagaggcacccccatcaacaagagacccgtgctgggctacagaaacctgaacctgttcaagctgttcagactggtgcacaagctgggcggcttcgacaacatcgagagcggcgccgtgtggaagcaggtgtaccaggacctgggcatccccgtgctgaacagcgccgccggctacaacgtgaagtgcgcctacaagaagtacctgtacggcttcgaggagtactgcagaagcgccaacatcgagttccagatggccctgcccgagaaggtggtgaacaagcagtgcaaggagtgcgagaacgtgaaggagatcaaggtgaaggaggagaacgagaccgagatcaaggagatcaagatggaggaggagagaaacatcatccccagagaggagaagcccatcgaggacgagatcgagagaaaggagaacatcaagcccagcctgggcagcaagaagaacctgctggagagcatccccacccacagctag

SEQ ID NO: 284370 - DNA, 201 bp, Artificial Sequence
  derived and/or modified sequence
atgggcaccagcagcatcttcctgtgcgtgctgttcctgtgcggcgccctgggcctgaccatgagccccgccagaggcagactgagatgctacatctgcggcttcaccaagccctgccaccccgtgcccaccgagtgcagagacgacgaggcctgcggcatcagcatcggcaccagcgaccagagcgagatcaccgagtag

SEQ ID NO: 284371 - DNA, 201 bp, Artificial Sequence
  derived and/or modified sequence
atgggaacatcatcgattttcctgtgcgtcttgttcctctgtggagctctgggcctaactatgtcaccagcacgagggagactgaggtgctacatttgcggcttcactaagccctgccatcccgttcctacggagtgtcgcgacgatgaggcatgcggtatcagtattgggacaagcgatcagtctgaaattactgaatag

SEQ ID NO: 284372 - protein, 71 aa, Artificial Sequence
  derived and/or modified sequence
MNKHGICVVDDFLGKETGQQIGDEVRALHDTGKFTDGSWSARRVTRPRTSEAIRSPGSRARSPAAKPLGCS

SEQ ID NO: 284373 - DNA, 3353 bp, Artificial Sequence
  derived and/or modified sequence
tccggtgctcagtggctagccgaatagccgtgtttgggacctgggctcgggcttcttgcgtccccgctaagaacatgtcacggggccgaatcgtccgtattctctcagcttcaagctcctctacttttcaaccaggtcactagcccttgactcctcttatcaaacttccggaactgccaccccaccagtgactccacaggcaccagggcatgcaacagggctgggacaggaaggctctcttcttcacctcaagcctgctgggctaacacttgcgatttttactagagttaactttgtaatgtatgtctctgactctagaatttcaagagaagttccacttagtgactcctaagtggaagttctaagatggcttcccagtgaggtgatgaagaggtttgagctttagagtgcggttgcaaagctcttctctgacctgaacaatggctgtagctgtggaccaacaaatccagactccttcagtacaagatctccaaatagttaaactggaagaagattcccactgggagcaggaaatttcccttcaagggaattaccctggaccagagacatcctgccagagcttttggcatttccgttaccaagaagcatcacgaccccgagaggccctcctccagctccagaagctctgttgtcagtggctaaggccagagaagtgtacaaaagagcagatcctggagttgctggtcctagaacagttcccgactgtccttctccaggagatccagatctgggtcagacagcagcatccggagagtggagaggaggcagtggccctggtggaagacttgcagaaagaacctggaagacagaggctggagcctcgggcgaggccgtccggccgcacccctcctgctcagctgcggtcgccatggccaatgacagctgcgggcccggcgagccgagctcgagcgagcgagaccggcagtactgcgagctgtgcgggaagatggagaacctgctgcgctgcagccgcagctccttctgctgcaaggagcgccagcgccaggactggaagaagcacaagctcgtgtgccagggcagcgagggcgccctcggccacggagggggccctcaccaggactccggccccgcgccgcccgctgcagcgccgccgtccagggaccgggccctggaggccaggaaggcagcgaggcgccgggacagcgcctccggggacgcagccaaggcaaaggccaagtccgcggccgaccccgcggcggccgcgtccccgcctcgcgcgtccccgggccggacaaaagccatggctgcttgttatccggtcaatggaacgggttatgtacgtcatgttgataatccaaatggagacggaagacgtgtgaaatgtattacattacgttaaagaacgggatgccaaggtaagtggaggtatacttcgaatttttctagaaggtaaagcctagtttgctgacattgaacccaaatttgatagactgctgtttttctggtctgaccatcgcaaccctcatgaagtacaaccagcatatgctacaaagtacgcaataactgtttggtatttgatgcagatgagagagcacgagctaaagtaaaatatctaacaggtgaaaaaggtgtgaggattgaactcaataaaccttcagattcagtcagtaaagacgtcttatagagcctttgatccagcaataccccacttcacctacaataattgttgacgctatttgttaatttgtgaatacgaataaatgggataaagaaaaatagacaaccagttcgcattttagtaaggaaacaaacaactttgtgtgttgcatcaaacagaagattctgactgctgtgactttgtaccgcatgatcaacttagaatctgtgattgcttacaggaagaagataagctactaatagaaaatgtttttacctctggatatgaaataagtgccctgtgtagaatttttttcattcttatattttgccagatctgttacgtagctgagttaatttcatctctacttttttaatatatgtcaagtttgaattggaataatttttctatgattaggtacaatttatcaaaactgaattgagaaaaaattacagtatttctcaaaataacgtcaatctatttttgtaaacctcttcatactattaaattttgccctaaaagacctcttaataatgattgttgccagtgactgattaattttattttacttaaaataagaaaaggagcactttaattacaactgaaaaatcagattgttttgcagtccttcctatcttacactaatttgaactcttaaagattgctgcttttttttgatattgtcaataatgaaacccaattgtaaaacagtcaccatttactaccagtaacttttagttaatgtcttacaaggaaaaagacacaataagaagagtttaattttttttttttttttgacctgggcgacagagtgagactccgtctcaaaaaaaaaaaaaaaaagaaatgtttcattttggtttttcaccaaccttcctttgataggacaaagcagatactaagagggggaggaaaggctgttctgtgtctgaacccagttgggctagtccccaagaggagctgagagccatgtactctaatgcctcccttttcttcccccagccctgcctgatgtggctctgggaattcctgcagagaagagcaggggtggccaggagatagtgagcagctcccaggaggcatggagggatccagaacctggactgaagaaccacctagaaataactcagcagaattctgaaaatgaggtcacgctgggtaagaatgcctttttttttttttcatagtcaaagttagctatggagtttctgtagtattcactactccagacctttttcaagttgaattttttttctttttccctatgtctgttcttacgtattttttttaaacttttatttcagtagtgtttggggaacaagtagtgtttggttgcatggaaaagttcttcagtggtgatttctgagattttggtgcacccatcacccaagggtagtcttttttatccatcaagtctgtacccaatgtgtagtctttgtttttttcttttttttttttttgagactgagtctcattctatcacccaggctggagtggagtggtatgatcttgactcactgcaacatctgcctcccgggttcaagtgattctcctgcctcagcctcctgagtcgctgggattactgtgatcatgccactgcattccagcctgggcgacagagtgagacccagactcagctgaaaaataataatattattaaaagaatttaaaataaagtgttccatagatgtgaaaaaaaaaaaaaaaaaaaaaa

SEQ ID NO: 284374 - DNA, 216 bp, Artificial Sequence
  derived and/or modified sequence
atgaacaaacacggcatatgcgttgtggacgatttcttgggcaaagagactggacaacagatcggtgacgaagttcgcgcactgcacgacaccggaaagttcacggatggctcatggtccgctcgccgagtcacaaggccgcggacgagtgaggctattaggtcacccggaagtcgggcaagatccccagcggccaaacctctcggatgttcttag

SEQ ID NO: 284375 - DNA, 216 bp, Artificial Sequence
  derived and/or modified sequence
atgaacaagcacggcatctgtgtggtggatgacttcctgggcaaggagaccggccagcagattggagatgaggtgcgggccctgcatgacaccgggaagttcacagatggctcctggagcgcccggcgggtgacccggcccaggaccagcgaggccatccgcagccctggcagccgggcccggagccctgctgccaagcccctgggctgcagctag

SEQ ID NO: 284376 - DNA, 216 bp, Artificial Sequence
  derived and/or modified sequence
atgaacaagcacggcatctgcgtggtggacgacttcctgggcaaggagacaggccaacagataggagacgaggtgcgtgcgctccatgacacaggtaagtttactgacggatcttggagcgcccgcagagttacacggccccggacaagtgaggcaattcgcagtccaggaagccgcgccaggtcacccgctgctaagccccttgggtgctcttag

SEQ ID NO: 284377 - DNA, 216 bp, Artificial Sequence
  derived and/or modified sequence
atgaataaacatggaatctgtgttgtggatgactttctggggaaggagactggtcagcagattggggacgaggtgagggcactacacgacacaggaaagtttactgacggttcttggtccgccaggagggtgacacgacccagaaccagtgaggccattcgctcccctgggagtagagctaggtctcctgccgctaagcctcttggatgcagctag

SEQ ID NO: 284378 - DNA, 216 bp, Artificial Sequence
  derived and/or modified sequence
atgaacaagcacggcatctgcgtggtggacgacttcctgggcaaggagaccggccagcagatcggcgacgaggtgagagccctgcacgacaccggcaagttcaccgacggcagctggagcgccagaagagtgaccagacccagaaccagcgaggccatcagaagccccggcagcagagccagaagccccgccgccaagcccctgggctgcagctag

SEQ ID NO: 284379 - DNA, 419 bp, Artificial Sequence
  derived and/or modified sequence
agggctcggcggtggctgccgaagccgagcccggcaaggaggagccgccggcccgctcatcgctgttccaggagaaggcgaacctgtaccccccaagcaacacgcccggggatgcgctgagccccggcggcggcctgcggcccaacgggcagacgaagcccctgccggcgctgaagctggcgctcgagtacatcgtgccgtgcatgaacaagcacggcatctgtgtggtggacgacttcctcggcaaggagaccggacagcagatcggcgacgaggtgcgcgccctgcacgacaccgggaagttcacggacggcagctggtcagccagaagagtgactcgtccaaggacatccgaggcgataagatcacctggatcgagggcaaggagcccggctgcgaaaccattgggctgctcatga

SEQ ID NO: 284380 - DNA, 993 bp, Artificial Sequence
  derived and/or modified sequence
atggtgagcctgtgcagagacgacggcacctggaacaacctgcccatctgccagggctgcctgagacccctggccagcagcaacggctacgtgaacatcagcgagctgcagaccagcttccccgtgggcaccgtgatcagctacagatgcttccccggcttcaagctggacggcagcgcctacctggagtgcctgcagaacctgatctggagcagcagcccccccagatgcctggccctggaggtgtgccccctgccccccatggtgagccacggcgacttcgtgtgccaccccagaccctgcgagagatacaaccacggcaccgtggtggagttctactgcgaccccggctacagcctgaccagcgactacaagtacatcacctgccagtacggcgagtggttccccagctaccaggtgtactgcatcaagagcgagcagacctggcccagcacccacgagaccctgctgaccacctggaagatcgtggccttcaccgccaccagcgtgctgctggtgctgctgctggtgatcctggccagaatgttccagaccaagttcaaggcccacttcccccccagaggcccccccagaagcagcagcagcgaccccgacttcgtggtggtggacggcgtgcccgtgatgctgcccagctacgacgaggccgtgagcggcggcctgagcgccctgggccccggctacatggccagcgtgggccagggctgccccctgcccgtggacgaccagagcccccccgcctaccccggcagcggcgacaccgacaccggccccggcgagagcgagacctgcgacagcgtgagcggcagcagcgagctgctgcagagcctgtacagcccccccagatgccaggagagcacccaccccgccagcgacaaccccgacatcatcgccagcaccgccgaggaggtggccagcaccagccccggcatcgacatcgccgacgagatccccctgatggaggaggacccctag

SEQ ID NO: 284381 - DNA, 993 bp, Artificial Sequence
  derived and/or modified sequence
atggtttcactctgtcgggacgacgggacctggaacaatctgccaatctgccagggctgtctgagacctctggcctcctcaaacgggtatgtaaatatctctgagcttcagacttcgttcccagtcggcacagttatatcctatcgatgcttccctggttttaaactggacggttctgcatatctcgagtgcttgcagaacctcatttggtcaagttctccaccccgctgtctcgccttagaggtttgcccccttcctccaatggtgagtcatggcgatttcgtctgccatcctcgaccctgtgagagatacaaccacggcacggtggtagagttctattgtgatcctggctacagtctgaccagcgattataagtatatcacttgccaatatggagaatggtttcccagctaccaggtgtactgcattaagtcagaacaaacatggccttccactcatgagacactgctgacgacctggaaaatcgtggcatttacggcaacatctgtgttgctggtacttttgcttgtcatactggcacgcatgttccagactaagttcaaggctcatttccccccccgtggcccccctaggtctagcagctccgacccagattttgttgtggtggatggggtaccagtaatgctgcctagttacgatgaggcagtgtcgggtggattgtccgccttggggccagggtacatggcctctgtgggacagggttgccctctgccagtggacgatcagagtccgcctgcatacccagggtcaggcgacaccgacacaggacctggagagagcgaaacttgcgactccgtgagcggctcttcggagctactgcagtcattatattctccccctcggtgtcaggaaagcactcacccggcaagcgacaatccagacattatcgcttctactgccgaagaggttgcctctacctctcctggaattgacatcgccgatgagatacctctcatggaggaagatccatag

SEQ ID NO: 284382 - DNA, 993 bp, Artificial Sequence
  derived and/or modified sequence
atggtgtccctgtgcagagatgatggcacctggaacaacctgcccatctgccagggctgcctgcggcccctggccagcagcaatggctacgtgaacatcagcgagctgcagaccagcttccctgtgggcaccgtcatctcctaccgctgcttccctggcttcaagctggatggcagcgcctacctggagtgcctgcagaacctgatctggagcagcagccccccacgctgcctggccctggaggtgtgccccctgccccccatggtgtcccatggagactttgtgtgccacccccggccctgtgagcgctacaaccacggcaccgtggtggagttctactgtgaccccggctacagcctgaccagtgactacaagtacatcacctgccagtatggagagtggttccccagctaccaggtgtactgcatcaagtctgagcagacctggcccagcacccatgagaccctgctgaccacctggaagatcgtggccttcaccgccacctctgtgctgctggtgctgctgctggtgatcctggccaggatgttccagaccaagttcaaggcccacttccccccccggggcccccccaggagcagcagcagtgaccctgactttgtggtggtggatggagtgcctgtgatgctgcccagctatgatgaggccgtgtctgggggcctgagcgccctgggccctggctacatggcctctgtgggccagggctgccccctgcctgtggatgaccagagccccccagcctacccaggcagcggggacacagacaccggccctggagagagcgagacctgtgacagcgtgtctggcagcagcgagctgctgcagagcctgtacagccccccacgctgccaggagagcacccacccagccagtgacaacccagacatcatcgccagcacagctgaggaggtggccagcaccagccctggcattgatattgctgatgagatccccctgatggaggaggacccctag

SEQ ID NO: 284383 - DNA, 993 bp, Artificial Sequence
  derived and/or modified sequence
atggtgagcctgtgccgggacgacggcacctggaacaacctgcccatatgccaggggtgcctgcgacccctagccagctctaacgggtatgtcaatatcagcgaacttcaaacctctttccccgtgggtactgtgatctcataccggtgctttcccgggtttaaactggatgggtcagcataccttgagtgcttgcaaaacctaatttggtctagttctcccccacggtgcttggcccttgaagtatgtcccctgccacctatggtatcgcacggcgattttgtctgccaccctcgaccttgcgaacgctataatcacgggacagtagtggaattttactgtgatccaggatattctctgacgtccgattataagtacattacctgtcagtacggagagtggttcccaagttaccaggtttattgcattaaatccgaacagacctggccctcaactcacgagacactgctaacaacttggaaaattgttgcgttcacagccacatccgtcctgcttgtgcttctgctggtgatcttggcaagaatgttccaaaccaagtttaaagctcatttcccgcctagaggcccgccacgtagctcatcatccgaccccgattttgtggtggtcgatggagtccccgtgatgctgcctagttatgatgaggcagtgtcaggcggcctcagtgccttaggtccgggatacatggcctcagtggggcagggttgccccctgcccgtcgacgatcagtccccacccgcctaccccggcagcggtgatacagacaccgggcccggcgaatctgagacgtgtgactccgtgtccggctcctctgaactcctgcaatccttgtactcaccccctcggtgtcaggagagtactcacccggcctctgataatcccgacattatcgcgtccaccgccgaggaggttgctagcacaagtccaggaatcgatatagctgacgaaatacctctgatggaggaggatccttag

SEQ ID NO: 284384 - DNA, 993 bp, Artificial Sequence
  derived and/or modified sequence
atggtttccctgtgccgagatgacggaacctggaacaatctacctatttgtcagggctgtcttcggcctttggcctcctcaaatggctacgttaacattagcgaactccagacttcattccccgtcggaacagtcatttcataccggtgttttccagggttcaagctcgatggtagcgcgtacttggaatgccttcagaacttaatatggtctagttcaccgcctcgatgtctggcgctagaagtttgccccctgccacccatggtttctcacggggattttgtatgccatccaaggccgtgtgaacggtacaatcatggcacggtagtggaattctactgtgacccgggatattctctcacatctgattacaagtacatcacctgccagtatggagagtggttcccctcctaccaggtatactgcataaagtccgaacagacctggcctagcacccatgagactcttctcactacctggaagatagtggcgttcacagctacctccgtactcctggttctcctgcttgtgattcttgcacgcatgttccagactaagttcaaggcgcacttccctccgcgaggaccaccacgctcttcttctagcgaccccgacttcgtggtggttgacggcgttccagtgatgctgccttcctacgatgaggctgttagtggcggactgagcgccctgggccctggctatatggcaagtgtgggccagggctgtccattgcccgttgacgaccagtctccacccgcttatcccggtagcggtgataccgacaccggcccaggggagtccgaaacttgcgacagcgtctcagggagcagcgaattattgcaaagcctgtacagtccccctagatgccaggagtcgacccacccagcctcggataacccagacatcatagcttccaccgctgaggaggtggccagcacctcacccggaatcgatatcgctgacgaaatccccctcatggaagaggatccatag

SEQ ID NO: 284385 - protein, 415 aa, Artificial Sequence
  derived and/or modified sequence
MLTFMASDSEEEVCDERTSLMSAESPTPRSCQEGRQGPEDGENTAQWRSQENEEDGEEDPDRYVCSGVPGRPPGLEEELTLKYGAKHVIMLFVPVTLCMIVVVATIKSVRFYTEKNGQLIYTPFTEDTPSVGQRLLNSVLNTLIMISVIVVMTIFLVVLYKYRCYKFIHGWLIMSSLMLLFLFTYIYLGEVLKTYNVAMDYPTLLLTVWNFGAVGMVCIHWKGPLVLQQAYLIMISALMALVFIKYLPEWSAWVILGAISVYAAMVWTVGMAKLDPSSQGALQLPYDPEMEEDSYDSFGEPSYPEVFEPPLTGYPGEELEEEEERGVKLGLGDFIFYSVLVGKAAATGSGDWNTTLACFVAILIGLCLTLLLLAVFKKALPALPISITFGLIFYFSTDNLVRPFMDTLASHQLYI

SEQ ID NO: 284386 - protein, 481 aa, Artificial Sequence
  derived and/or modified sequence
MLAGTVRFARHCLKFFPAQKPACVDFGASRGRAMLTFMASDSEEEVCDERTSLMSAESPTPRSCQEGRQGPEDGENTAQWRSQENEEDGEEDPDRYVCSGVPGRPPGLEEELTLKYGAKHVIMLFVPVTLCMIVVVATIKSVRFYTEKNGQLIYTPFTEDTPSVGQRLLNSVLNTLIMISVIVVMTIFLVVLYKYRCYKFIHGWLIMSSLMLLFLFTYIYLGEVLKTYNVAMDYPTLLLTVWNFGAVGMVCIHWKGPLVLQQAYLIMISALMALVFIKYLPEWSAWVILGAISVYDLVAVLCPKGPLRMLVETAQERNEPIFPALIYSSAMVWTVGMAKLDPSSQGALQLPYDPEMEEDSYDSFGEPSYPEVFEPPLTGYPGEELEEEEERGVKLGLGDFIFYSVLVGKAAATGSGDWNTTLACFVAILIGLCLTLLLLAVFKKALPALPISITFGLIFYFSTDNLVRPFMDTLASHQLYI

SEQ ID NO: 284387 - protein, 448 aa, Artificial Sequence
  derived and/or modified sequence
MLTFMASDSEEEVCDERTSLMSAESPTPRSCQEGRQGPEDGENTAQWRSQENEEDGEEDPDRYVCSGVPGRPPGLEEELTLKYGAKHVIMLFVPVTLCMIVVVATIKSVRFYTEKNGQLIYTPFTEDTPSVGQRLLNSVLNTLIMISVIVVMTIFLVVLYKYRCYKFIHGWLIMSSLMLLFLFTYIYLGEVLKTYNVAMDYPTLLLTVWNFGAVGMVCIHWKGPLVLQQAYLIMISALMALVFIKYLPEWSAWVILGAISVYDLVAVLCPKGPLRMLVETAQERNEPIFPALIYSSAMVWTVGMAKLDPSSQGALQLPYDPEMEEDSYDSFGEPSYPEVFEPPLTGYPGEELEEEEERGVKLGLGDFIFYSVLVGKAAATGSGDWNTTLACFVAILIGLCLTLLLLAVFKKALPALPISITFGLIFYFSTDNLVRPFMDTLASHQLYI

SEQ ID NO: 284388 - protein, 129 aa, Artificial Sequence
  derived and/or modified sequence
MLTFMASDSEEEVCDERTSLMSAESPTPRSCQEGRQGPEDGENTAQWRSQENEEDGEEDPDRYVCSGVPGRPPGLEEELTLKYGAKHVIMLFVPVTLCMIVVVATIKSVRFYTEKNGQLIYTPFTEDTP

SEQ ID NO: 284389 - protein, 21 aa, Artificial Sequence
  derived and/or modified sequence
MLTFMASDSEEEVCDERTSLM

SEQ ID NO: 284390 - DNA, 2302 bp, Artificial Sequence
  derived and/or modified sequence
ggggcctgggccggcgccgggtccggccgggcgctcagccagctgcgtaaactccgctggagcgcggcggcagagcaggcatttccagcagtgaggagacagccagaagcaagcttttggagctgaaggaacctgagacagaagctagtcccccctctgaattttactgatgaagaaactgaggccacagagctaaagtgacttttcccaaggtcgcccagcgaggacgtgggacttctcagacgtcaggagagtgatgtgagggagctgtgtgaccatagaaagtgacgtgttaaaaaccagcgctgccctctttgaaagccagggagcatcattcatttagcctgctgagaagaagaaaccaagtgtccgggattcagacctctctgcggccccaagtgttcgtggtgcttccagaggcagggctatgctcacattcatggcctctgacagcgaggaagaagtgtgtgatgagcggacgtccctaatgtcggctgagagccccacgccgcgctcctgccaggagggcaggcagggcccagaggatggagagaacactgcccagtggagaagccaggagaacgaggaggacggtgaggaggaccctgaccgctatgtctgtagtggggttcccgggcggccgccaggcctggaggaagagctgaccctcaaatacggagcgaagcacgtgatcatgctgtttgtgcctgtcactctgtgcatgatcgtggtggtagccaccatcaagtctgtgcgcttctacacagagaagaatggacagctcatctacacgccattcactgaggacacaccctcggtgggccagcgcctcctcaactccgtgctgaacaccctcatcatgatcagcgtcatcgtggttatgaccatcttcttggtggtgctctacaagtaccgctgctacaagttcatccatggctggttgatcatgtcttcactgatgctgctgttcctcttcacctatatctaccttggggaagtgctcaagacctacaatgtggccatggactaccccaccctcttgctgactgtctggaacttcggggcagtgggcatggtgtgcatccactggaagggccctctggtgctgcagcaggcctacctcatcatgatcagtgcgctcatggccctagtgttcatcaagtacctcccagagtggtccgcgtgggtcatcctgggcgccatctctgtgtatgatctcgtggctgtgctgtgtcccaaagggcctctgagaatgctggtagaaactgcccaggagagaaatgagcccatattccctgccctgatatactcatctgccatggtgtggacggttggcatggcgaagctggacccctcctctcagggtgccctccagctcccctacgacccggagatggaagaagactcctatgacagttttggggagccttcataccccgaagtctttgagcctcccttgactggctacccaggggaggagctggaggaagaggaggaaaggggcgtgaagcttggcctcggggacttcatcttctacagtgtgctggtgggcaaggcggctgccacgggcagcggggactggaataccacgctggcctgcttcgtggccatcctcattggcttgtgtctgaccctcctgctgcttgctgtgttcaagaaggcgctgcccgccctccccatctccatcacgttcgggctcatcttttacttctccacggacaacctggtgcggccgttcatggacaccctggcctcccatcagctctacatctgagggacatggtgtgccacaggctgcaagctgcagggaattttcattggatgcagttgtatagttttacactctagtgccatatatttttaagacttttctttccttaaaaaataaagtacgtgtttacttggtgaggaggaggcagaaccagctctttggtgccagctgtttcatcaccagactttggctcccgctttggggagcgcctcgcttcacggacaggaagcacagcaggtttatccagatgaactgagaaggtcagattagggcggggagaagagcatccggcatgagggctgagatgcgcaaagagtgtgctcgggagtggcccctggcacctgggtgctctggctggagaggaaaagccagttccctacgaggagtgttcccaatgctttgtccatgatgtccttgttattttattgcctttagaaactgagtcctgttcttgttacggcagtcacactgctgggaagtggcttaatagtaatatcaataaatagatgagtcctgttagaatcttgaaaa

SEQ ID NO: 284391 - DNA, 1248 bp, Artificial Sequence
  derived and/or modified sequence
atgcttaccttcatggcatcagactccgaagaggaagtatgtgatgaacgcaccagcctcatgtctgctgagagccccacccccagaagctgtcaggaaggtagacaaggccccgaagacggcgaaaatacagctcagtggagatcgcaggaaaatgaagaagacggggaggaggaccccgacagatacgtctgcagcggcgtccccgggaggccacccggtctagaggaggaacttaccctgaaatacggcgcgaagcatgtcattatgctgtttgtgcccgtcacactgtgtatgattgttgtagtggcaacaatcaaatccgttaggttctatactgaaaaaaacgggcaacttatttatactccctttacggaagataccccttctgtggggcagcgtctgttgaattctgtgctcaacactctcataatgatatccgtaattgtcgttatgactatcttccttgtcgtgctgtataaatatcgctgttataagtttatccatggttggctgattatgtccagcctcatgttgctcttcctgtttacctatatctacctcggcgaggtgctaaagacttacaatgtagcaatggattatcctaccctcttgctgaccgtatggaattttggcgctgtaggaatggtgtgcatccactggaaagggcctctagtcctacagcaggcttacctgattatgatttctgcccttatggccctcgtcttcataaagtatctacccgaatggtctgcgtgggtgatactgggcgctatatctgtgtatgccgcgatggtttggacagtcggcatggctaaactggacccttcctcacaaggtgcgctccagctcccctatgatccggaaatggaagaagattcatatgattcctttggagagcctagctaccctgaggtatttgaaccccctctcaccggatatccaggcgaagaactggaggaagaagaggagaggggggtgaaactcggtctcggggactttatcttttactctgtgctggtggggaaagcggccgcaacaggtagcggcgactggaatactaccttggcctgtttcgtggccatattaattgggctctgcctgaccttactccttctagcggtgtttaagaaagccctccctgcactgcccatttccattactttcgggcttatcttttatttctctacggacaacctggtaagacccttcatggacactttagcaagtcaccaattgtatatttag

SEQ ID NO: 284392 - DNA, 1446 bp, Artificial Sequence
  derived and/or modified sequence
atgttggctggaaccgtgagattcgctagacactgcctaaaattctttccagcccagaagccagcttgcgtagattttggcgcctcacggggccgcgccatgctcacttttatggccagtgacagcgaggaagaggtctgcgatgagcggacatctctgatgtctgctgaaagccctacacccaggtcgtgtcaggagggccggcagggtccagaggatggagagaatacagcacagtggaggagccaggaaaacgaggaagatggtgaagaggacccagatcggtacgtatgcagcggcgtccctgggcggccccctgggctggaagaagaactgaccctcaagtacggtgcaaagcacgtgattatgctcttcgttccggttaccctgtgcatgatcgtagtagtagccacgatcaaaagcgtgcggttctacaccgaaaaaaatgggcagctcatctatactcctttcactgaggacacacctagtgtgggtcagcgcctccttaactcagtgttgaatacactgattatgatttctgtgattgtggtcatgactatctttcttgtggttctgtataagtacaggtgctacaaatttatccacgggtggctgataatgtcctctctgatgctactctttttatttacatatatatacctgggtgaggtgctgaagacatataacgtagctatggactatccgactctgctgcttaccgtgtggaatttcggcgcggtgggcatggtgtgcattcattggaagggcccgctggtcttgcaacaggcctacctaatcatgatatctgctcttatggccctggtgttcattaagtatctgccggagtggtccgcctgggtgatactgggggccatttccgtgtatgacctcgttgccgtgctgtgccccaagggtcctctccggatgttagtggagaccgcacaggagaggaacgaaccaatcttcccggctttaatttatagcagtgccatggtgtggacagtggggatggcgaagcttgatccaagcagtcagggcgctttgcagctcccttatgacccagaaatggaggaggactcgtacgattcattcggggaaccgagttacccagaggtgtttgagccgccgctgacaggctacccaggcgaggaacttgaggaagaggaagaacgaggggtcaaacttgggctcggcgatttcattttctattctgtgctggttgggaaagctgccgccactggcagcggagactggaacaccacattggcatgctttgtggctatcctgataggactttgcctgaccctactgttgctagcagtgttcaagaaggctctcccagcactacctataagtatcaccttcggcttgatcttctatttctccaccgataacttagtgaggccattcatggatactctggcctctcaccagttgtacatctag

SEQ ID NO: 284393 - DNA, 1347 bp, Artificial Sequence
  derived and/or modified sequence
atgcttacctttatggcatcagattcagaggaagaagtctgtgatgagagaacaagtcttatgagcgcagagtctccaaccccgagatcgtgtcaagagggaagacagggccccgaagatggagaaaacacagcccagtggagatcgcaggagaatgaagaggacggtgaggaggatcctgacaggtatgtctgttcaggtgtacccggcagaccaccaggcctggaagaggagctcaccttgaaatatggggccaagcacgtaattatgctttttgtgccagtgacgttgtgtatgatcgtggtcgtggccactattaagtcagttcgcttctacacagagaagaatgggcaactgatctatactcctttcacagaggacacacccagcgtcggtcagcgcttgctgaactctgtcctgaacactctgattatgatttctgtgatcgtggttatgaccatctttcttgtcgttttgtataaatacagatgttataagttcatccatggctggctgattatgagttctctaatgttgctgttcctgtttacttatatatacttgggagaagttctcaaaacttataatgtggccatggactatcctacactacttctgaccgtttggaacttcggcgctgtcggaatggtgtgtatccactggaagggaccccttgtgctacagcaagcatacctaatcatgatctctgcactgatggccctggtgttcatcaaatacttgcctgagtggtctgcatgggtgatcctgggagctatttcagtttatgatttggtcgccgtgctgtgtccaaaaggaccgctgagaatgttagttgagactgctcaggaacggaatgagcccatcttcccagctttgatttatagtagcgcaatggtgtggactgtcggaatggcaaagcttgaccctagcagtcagggagccctgcagctcccctacgatcccgagatggaggaggacagttatgatagtttcggagagccaagttatccagaagtcttcgagccgccccttacaggataccccggtgaggagttggaggaggaagaggagagaggtgtgaaactcgggcttggagactttattttctactcggtgctagtgggcaaagctgcagcaactgggtccggagattggaacacgactctggcctgcttcgtggcaattttgataggcctgtgcttaaccctgctgttgctggccgtgttcaagaaagccctccccgcacttccaattagtataaccttcgggctgatattctatttttctacggacaacctagtgagaccctttatggacacactggcaagtcaccagctgtacatatag

SEQ ID NO: 284394 - DNA, 1446 bp, Artificial Sequence
  derived and/or modified sequence
atgctcgccgggaccgtgagatttgcccggcattgtttgaaatttttccccgcacaaaaacctgcgtgtgtggactttggcgctagccggggccgagccatgctgacttttatggcttcagactccgaagaagaggtatgcgatgagcggacgagcctcatgagtgccgagtcgcctacacctcgttcctgccaggaggggaggcagggacctgaagacggcgagaacacagctcaatggcgtagccaggaaaatgaagaggatggtgaagaagaccccgacagatatgtctgcagtggcgtgcccggccggccgcccggcctcgaggaggaactcacgcttaagtatggtgccaaacatgttatcatgttgtttgtaccggttaccttatgtatgattgttgtggtggccacgataaaatcggtgcgcttctacaccgagaaaaacggccagctcatctatacgccctttaccgaggatacaccctctgtggggcagaggcttttaaactcagtgttaaatactctcatcatgatatccgtgattgttgtgatgactatatttctcgtggttttgtataagtatagatgctataaatttattcatgggtggctgatcatgtcttccctgatgctcctgtttttgttcacgtacatttacctgggggaggttcttaaaacttataacgtggccatggattatcccacattgctgctgactgtgtggaacttcggggcggttggcatggtctgcatccactggaaggggcccttagttctccagcaggcctatttgattatgatctccgctttgatggccttagtctttatcaagtacctgcctgagtggtctgcctgggtcatcctgggcgcaatctctgtgtacgatttggttgcggtgctgtgtcccaaggggccccttagaatgctggtggagacagctcaggagagaaatgagcccatctttccagccctgatctatagttcggctatggtatggaccgtggggatggcaaagctcgacccatcatcccagggagccctgcagttaccctacgatcccgagatggaggaggacagttacgattcctttggcgagcccagctaccccgaagtcttcgagcccccattaactggatacccaggagaggagctcgaagaagaggaggaaaggggggtgaagttggggctgggggacttcatcttttactcagtgctggtcggaaaggctgctgccactggcagcggtgattggaatacaacattggcctgtttcgtagctatcctcattggtctctgtctgactttgcttctcctggcagtgtttaaaaaggccctccccgcactgcccatcagcatcacttttgggttaattttttatttctcgacggacaatctcgttcgtccttttatggataccctggcatcgcaccaattatacatttag

SEQ ID NO: 284395 - DNA, 66 bp, Artificial Sequence
  derived and/or modified sequence
atgctgacattcatggcttcagatagtgaggaggaagtgtgcgatgaacggacgtccctcatgtag

SEQ ID NO: 284396 - DNA, 1248 bp, Artificial Sequence
  derived and/or modified sequence
atgctgaccttcatggccagtgacagcgaggaggaggtgtgtgatgagaggaccagcctgatgtctgctgagagccccacccccaggagctgccaggagggccggcagggcccagaagatggagagaacacagcccagtggaggagccaggagaatgaggaggatggagaggaggaccctgacagatatgtgtgcagcggcgtgcccggccggcccccaggcctggaggaggagctgaccctgaagtatggagccaagcacgtgatcatgctgtttgtgcctgtgaccctgtgcatgattgtggtggtggccaccatcaagtctgtgcgcttctacacagagaagaatggccagctgatctacacccccttcacagaggacacccccagcgtgggccagaggctgctgaacagcgtgctgaacaccctcatcatgatctctgtgattgtggtgatgaccatcttcctggtggtgctgtacaagtaccgctgctacaagttcatccacggctggctgatcatgagcagcctgatgctgctcttcctgttcacctacatctacctgggggaggtgctgaagacctacaacgtggccatggactaccccaccctgctgctgactgtgtggaactttggagctgtgggcatggtgtgcatccactggaagggccccctggtgctgcagcaggcctacctgatcatgatcagcgccctgatggccctggtgttcatcaagtacctgcctgagtggagcgcctgggtgatcctgggcgccatctctgtgtatgctgccatggtgtggacagtgggcatggccaagctggaccccagcagccagggcgccctgcagctgccctatgaccctgagatggaggaggacagctatgacagctttggagagcccagctacccagaggtgtttgagccccccctgaccggctacccaggagaggagctggaggaggaggaggagcggggcgtgaagctgggcctgggggacttcatcttctacagcgtgctggtgggcaaggctgctgccactggaagtggggactggaacaccaccctggcctgctttgtggccatcctgattggcctgtgcctgaccctgctgctgctggccgtgttcaagaaggccctgcctgccctgcccatcagcatcaccttcggcctcatcttctacttcagcacagacaacctggtgcggcccttcatggacaccctggccagccaccagctgtacatctag

SEQ ID NO: 284397 - DNA, 1446 bp, Artificial Sequence
  derived and/or modified sequence
atgctggccggcaccgtgcgctttgcccggcactgcctgaagttcttccctgcccagaagccagcctgtgtggactttggagccagccggggccgggccatgctgaccttcatggccagtgacagcgaggaggaggtgtgtgatgagaggaccagcctgatgtctgctgagagccccacccccaggagctgccaggagggccggcagggcccagaagatggagaaaatacagcccagtggaggagccaggagaatgaagaagatggagaagaagatcctgaccgctacgtgtgcagcggcgtgcccggccggcccccaggcctggaggaggagctgaccctgaagtacggggccaagcacgtgatcatgctgtttgtgcctgtgaccctgtgcatgattgtggtggtggccaccatcaagtctgtgcgcttctacacagagaagaatggccagctgatctacacccccttcacagaggacaccccatctgtgggccagaggctgctgaacagcgtgctgaacaccctcatcatgatcagcgtcatcgtggtgatgaccatcttcctggtggtgctgtacaagtaccgctgctacaagttcatccacggctggctgatcatgagcagcctgatgctgctcttcctgttcacctacatctacctgggggaggtgctgaagacctacaacgtggccatggactaccccaccctgctgctgactgtgtggaactttggagctgtgggcatggtgtgcatccactggaagggccccctggtgctgcagcaggcctacctgatcatgatcagcgccctgatggccctggtgttcatcaagtacctgcctgagtggagcgcctgggtgatcctgggcgccatctctgtgtatgacctggtggccgtgctgtgccccaagggccccctgaggatgctggtggagacagcccaggagagaaatgagcccatcttccctgccctgatctacagcagcgccatggtgtggacagtgggcatggccaagctggaccccagcagccagggcgccctgcagctgccctatgaccctgagatggaggaggacagctatgacagctttggagagcccagctacccagaggtgtttgagccccccctgaccggctacccaggagaggagctggaggaggaggaggagcggggcgtgaagctgggcctgggggacttcatcttctacagcgtgctggtgggcaaggctgctgccactggaagtggggactggaacaccaccctggcctgctttgtggccatcctgattggcctgtgcctgaccctgctgctgctggccgtgttcaagaaggccctgcctgccctgcccatcagcatcaccttcggcctcatcttctacttcagcacagacaacctggtgcggcccttcatggacaccctggccagccaccagctgtacatctag

SEQ ID NO: 284398 - DNA, 1347 bp, Artificial Sequence
  derived and/or modified sequence
atgctgaccttcatggccagtgacagcgaggaggaggtgtgtgatgagaggaccagcctgatgtctgctgagagccccacccccaggagctgccaggagggccggcagggcccagaagatggagagaacacagcccagtggaggagccaggagaatgaggaggatggagaggaggaccctgacagatatgtgtgcagcggcgtgcccggccggcccccaggcctggaggaggagctgaccctgaagtatggagccaagcacgtgatcatgctgtttgtgcctgtgaccctgtgcatgattgtggtggtggccaccatcaagtctgtgcgcttctacacagagaagaatggccagctgatctacacccccttcacagaggacacccccagcgtgggccagaggctgctgaacagcgtgctgaacaccctcatcatgatctctgtgattgtggtgatgaccatcttcctggtggtgctgtacaagtaccgctgctacaagttcatccacggctggctgatcatgagcagcctgatgctgctcttcctgttcacctacatctacctgggggaggtgctgaagacctacaacgtggccatggactaccccaccctgctgctgactgtgtggaactttggagctgtgggcatggtgtgcatccactggaagggccccctggtgctgcagcaggcctacctgatcatgatcagcgccctgatggccctggtgttcatcaagtacctgcctgagtggagcgcctgggtgatcctgggcgccatctctgtgtatgacctggtggccgtgctgtgccccaagggccccctgaggatgctggtggagacagcccaggagagaaatgagcccatcttccctgccctgatctacagcagcgccatggtgtggacagtgggcatggccaagctggaccccagcagccagggcgccctgcagctgccctatgaccctgagatggaggaggacagctatgacagctttggagagcccagctacccagaggtgtttgagccccccctgaccggctacccaggagaggagctggaggaggaggaggagcggggcgtgaagctgggcctgggggacttcatcttctacagcgtgctggtgggcaaggccgccgccaccggcagcggggactggaacaccaccctggcctgctttgtggccatcctgattggcctgtgcctgaccctgctgctgctggccgtgttcaagaaggccctgcctgccctgcccatcagcatcaccttcggcctcatcttctacttcagcacagacaacctggtgcggcccttcatggacaccctggccagccaccagctgtacatctag

SEQ ID NO: 284399 - DNA, 66 bp, Artificial Sequence
  derived and/or modified sequence
atgctgaccttcatggccagtgacagcgaggaggaggtgtgtgatgagaggaccagcctgatgtag

SEQ ID NO: 284400 - DNA, 1248 bp, Artificial Sequence
  derived and/or modified sequence
atgctgaccttcatggccagcgacagcgaggaggaggtgtgcgacgagcggacttctttgatgtctgccgagtcccctacaccacggtcttgccaggagggccgccaaggccccgaagacggcgaaaataccgcccagtggagaagccaggagaacgaagaagatggcgaggaggacccggatcggtacgtgtgtagtggagtcccggggaggccccctggactggaggaagagctgacactgaagtacggagccaagcatgttataatgctctttgtccccgtaaccctttgtatgattgttgttgttgcaactatcaaatccgtccgattttacacagaaaagaacggccagctcatttacaccccttttactgaggacacccccagcgttggacagaggctgctgaattcggtgctgaacacgctgatcatgatttctgtcattgtagttatgaccatcttcctcgtggtgctttacaaatatagatgctacaaattcattcacggctggctcattatgtctagcctcatgctgctattcctcttcacatatatttatctaggtgaggttctaaaaacttataacgtagcaatggattaccctactctgttgctcaccgtatggaattttggcgcggtagggatggtttgcatccactggaaggggcctttggtgctgcagcaggcctacctgattatgatatcagcgctaatggcactcgtttttataaagtacctgcccgagtggagcgcatgggtgatactcggtgccatcagtgtgtatgctgcaatggtgtggaccgtgggaatggccaaactggacccatcatctcagggagcacttcagctgccctatgatcctgagatggaagaagacagctacgactcctttggtgaacccagttatccggaggtctttgaacccccgctgacaggatatcctggtgaggagcttgaggaggaggaggaaagaggtgtaaagttgggtctaggggactttatcttttacagtgtgttggtcgggaaagctgcagccactggaagcggggattggaacaccacactagcttgtttcgtggctatcctcatcggactgtgtctcacacttctcctgctggccgtctttaagaaagctcttcctgccctgcctatcagtatcactttcggtctcatcttttacttctcaaccgataacctagtgagacctttcatggacaccctggcttcccaccaactgtacatctag

SEQ ID NO: 284401 - DNA, 1446 bp, Artificial Sequence
  derived and/or modified sequence
atgctggccggcaccgtgcggttcgcccggcactgcctgaagttcttcccagctcagaaaccagcctgtgtcgacttcggcgcaagtaggggcagggccatgctaacctttatggcatccgactctgaagaggaggtgtgcgacgaaagaacgtcgttaatgtctgccgaatccccgacgccacggagctgtcaagagggacggcagggacctgaagacggggaaaatacggcacagtggaggagtcaagaaaacgaagaggacggagaagaagatccggaccgctatgtatgttccggtgtcccaggccgtccgcctgggcttgaggaagaactcacgctgaaatacggggccaagcatgtcataatgctcttcgttcctgtcacactgtgcatgatcgttgttgttgctactattaagtcagttaggttttacacggagaagaacgggcaactgatctacaccccatttacggaggatactcctagcgtgggtcagagactactaaactctgtcctgaatacacttatcatgatcagtgtgattgtggtcatgaccatctttttggtcgtcctctataagtatcgatgctacaaatttatccatggatggctgattatgagttccctgatgctactgttcctatttacatacatctatctgggagaggtcctcaaaacttacaacgttgccatggattaccctaccctgctgctgactgtgtggaatttcggtgcagtcgggatggtctgcattcactggaaaggaccgctagttttacagcaggcttatctaattatgattagcgctttgatggccctagtctttattaagtacttacccgaatggtcagcttgggttattctgggcgcaatttccgtttatgatttggtagccgtgctttgccccaaggggcctttgcgcatgctggtcgaaacagcccaggaaaggaatgagcctatctttccggccctgatttatagtagcgcaatggtctggacagttggcatggcgaagcttgatccttcatcccaaggagcactacagctaccctacgatccggaaatggaagaagactcctatgattccttcggcgagcccagctatcctgaggtctttgaaccacccctgactggctaccctggtgaagagctagaagaggaagaagaaagaggtgtgaaacttggcctcggagacttcattttctacagtgtcctcgtgggcaaggcggccgcgactgggtcaggcgattggaatacaactctggcctgctttgtcgcgatccttatcggtctctgtctgacgctgctgttgttagcagtgtttaaaaaggccctccccgcactgcctatctcaattacatttggtctgattttctactttagcaccgacaacctggtgagaccttttatggacacccttgcatcacaccagctctacatatag

SEQ ID NO: 284402 - DNA, 1347 bp, Artificial Sequence
  derived and/or modified sequence
atgctgaccttcatggccagcgacagcgaggaggaggtgtgcgacgaacgcacctccctgatgtcagcggaaagtccaaccccacggagctgtcaggagggtcggcagggtccagaagatggagagaacaccgcacagtggcggtctcaggagaacgaggaagatggcgaggaggaccctgaccgttacgtttgcagcggagtgccaggtcggccgccagggctggaagaagagctcactctgaagtatggcgctaaacatgtgatcatgctgtttgtgcccgtgactttatgtatgattgtagtggtcgccacaatcaagtcagtccggttctacaccgaaaagaatggacagctaatctatacccctttcactgaagataccccgagtgttggacagaggcttctgaattctgttctaaatacccttatcatgatcagcgtaattgttgttatgacgatcttcctggtggtcctctataaatatagatgttacaagttcattcacgggtggttgataatgagctctcttatgctgctgtttcttttcacatacatctacttgggggaggtcttgaagacatataatgtcgccatggattatccaaccctgttactcaccgtgtggaatttcggcgctgtaggaatggtctgcattcactggaaaggcccgctcgtactgcagcaagcgtacttgataatgatctctgcactgatggcgctggtatttatcaaatacctgcctgagtggagcgcttgggtgatactgggtgctatcagcgtgtacgacctcgtggctgtgctttgtccaaaaggaccattgagaatgctcgttgagacagctcaggagcgcaacgaaccgattttcccagccctgatttactcgtctgccatggtgtggactgttggcatggccaagctggacccttcctcacagggagccctgcagcttccatatgaccctgaaatggaagaggactcatacgatagctttggggagccttcctaccctgaggtattcgagccaccactaactgggtacccgggcgaggagctcgaggaagaggaggagcggggtgttaagttgggtctgggggacttcatcttttatagtgtactcgtcggcaaagcggccgccaccggcagtggcgattggaatactaccttggcgtgtttcgttgcaatcctgattggcctgtgtcttaccctcctgcttctcgcagtctttaaaaaggctcttcctgctcttcctattagcatcacgtttggtctgatcttctatttcagtaccgataacctcgtacggccttttatggacactctagcgagtcaccagctttacatttag

SEQ ID NO: 284403 - DNA, 1446 bp, Artificial Sequence
  derived and/or modified sequence
atgctggccggcaccgtgcggttcgcccggcactgcctgaagttctttcctgcacagaagccggcctgtgtcgattttggagctagcagaggccgagctatgttgacgtttatggcctccgattctgaggaagaagtgtgcgacgagcggacgtcactcatgagcgctgaaagccctacgcctcgcagttgccaggaggggcgccaggggccagaagatggggagaacaccgcgcaatggagaagccaggaaaacgaggaagatggggaggaggatccagaccgttacgtctgtagtggagtgcctggaagaccacctggtctggaggaagagctaaccctgaaatacggggctaaacacgtcatcatgctgtttgtgcccgtaactctctgcatgattgtggtggtggcaacaataaagagtgtgaggttttataccgagaagaatggccaattaatttatacgcctttcacagaggacaccccttcagtgggacaaagactccttaattccgtcctgaatactctcataatgatatcggtgatcgttgtcatgaccatctttctcgtggtcctgtacaaataccggtgttacaagtttatccatggatggctgatcatgtcttcactgatgctgctgttcctctttacttacatttacttaggggaagtcttgaaaacctataatgtggcgatggattatcccacactgctgctgaccgtgtggaatttcggggctgtgggaatggtctgcattcactggaaaggacccctggttctgcagcaggcctatctcatcatgatatcagctctcatggctctggttttcatcaaatatctgccggagtggagtgcctgggttattctgggtgcgataagtgtgtatgatctggtcgctgtgctgtgccctaaggggcccctcaggatgcttgtcgaaaccgctcaggagagaaacgaacctatttttcctgccctgatttactcgtccgctatggtgtggaccgtagggatggccaagttggatcccagcagccaaggtgctctgcagcttccatatgacccggaaatggaggaggattcgtatgactcattcggcgagccttcgtacccggaggtgtttgagccacctctgacgggatatcccggcgaggagctggaggaagaggaggagaggggcgttaagctgggactgggagatttcatattctacagtgtattggtgggaaaggctgccgccaccggcagcggagactggaacaccaccttagcgtgtttcgtggccattctgattggtctttgcttgacccttttgttgctagccgtgtttaagaaggcactgcctgccctaccaatctctattaccttcggcctgattttctacttctcaaccgataatttagtgcggcctttcatggataccctcgcgagccaccagctatatatttag

SEQ ID NO: 284404 - DNA, 66 bp, Artificial Sequence
  derived and/or modified sequence
atgctgaccttcatggccagcgacagcgaggaggaggtgtgcgacgagagaactagccttatgtag

SEQ ID NO: 284405 - DNA, 2201 bp, Artificial Sequence
  derived and/or modified sequence
ggggcctgggccggcgccgggtccggccgggcgctcagccagctgcgtaaactccgctggagcgcggcggcagagcaggcatttccagcagtgaggagacagccagaagcaagcttttggagctgaaggaacctgagacagaagctagtcccccctctgaattttactgatgaagaaactgaggccacagagctaaagtgacttttcccaaggtcgcccagcgaggacgtgggacttctcagacgtcaggagagtgatgtgagggagctgtgtgaccatagaaagtgacgtgttaaaaaccagcgctgccctctttgaaagccagggagcatcattcatttagcctgctgagaagaagaaaccaagtgtccgggattcagacctctctgcggccccaagtgttcgtggtgcttccagaggcagggctatgctcacattcatggcctctgacagcgaggaagaagtgtgtgatgagcggacgtccctaatgtcggctgagagccccacgccgcgctcctgccaggagggcaggcagggcccagaggatggagagaacactgcccagtggagaagccaggagaacgaggaggacggtgaggaggaccctgaccgctatgtctgtagtggggttcccgggcggccgccaggcctggaggaagagctgaccctcaaatacggagcgaagcacgtgatcatgctgtttgtgcctgtcactctgtgcatgatcgtggtggtagccaccatcaagtctgtgcgcttctacacagagaagaatggacagctcatctacacgccattcactgaggacacaccctcggtgggccagcgcctcctcaactccgtgctgaacaccctcatcatgatcagcgtcatcgtggttatgaccatcttcttggtggtgctctacaagtaccgctgctacaagttcatccatggctggttgatcatgtcttcactgatgctgctgttcctcttcacctatatctaccttggggaagtgctcaagacctacaatgtggccatggactaccccaccctcttgctgactgtctggaacttcggggcagtgggcatggtgtgcatccactggaagggccctctggtgctgcagcaggcctacctcatcatgatcagtgcgctcatggccctagtgttcatcaagtacctcccagagtggtccgcgtgggtcatcctgggcgccatctctgtgtatgctgccatggtgtggacggttggcatggcgaagctggacccctcctctcagggtgccctccagctcccctacgacccggagatggaagaagactcctatgacagttttggggagccttcataccccgaagtctttgagcctcccttgactggctacccaggggaggagctggaggaagaggaggaaaggggcgtgaagcttggcctcggggacttcatcttctacagtgtgctggtgggcaaggcggctgccacgggcagcggggactggaataccacgctggcctgcttcgtggccatcctcattggcttgtgtctgaccctcctgctgcttgctgtgttcaagaaggcgctgcccgccctccccatctccatcacgttcgggctcatcttttacttctccacggacaacctggtgcggccgttcatggacaccctggcctcccatcagctctacatctgagggacatggtgtgccacaggctgcaagctgcagggaattttcattggatgcagttgtatagttttacactctagtgccatatatttttaagacttttctttccttaaaaaataaagtacgtgtttacttggtgaggaggaggcagaaccagctctttggtgccagctgtttcatcaccagactttggctcccgctttggggagcgcctcgcttcacggacaggaagcacagcaggtttatccagatgaactgagaaggtcagattagggcggggagaagagcatccggcatgagggctgagatgcgcaaagagtgtgctcgggagtggcccctggcacctgggtgctctggctggagaggaaaagccagttccctacgaggagtgttcccaatgctttgtccatgatgtccttgttattttattgcctttagaaactgagtcctgttcttgttacggcagtcacactgctgggaagtggcttaatagtaatatcaataaatagatgagtcctgttagaatcttgga

SEQ ID NO: 284406 - DNA, 2465 bp, Artificial Sequence
  derived and/or modified sequence
ccagcagtgaggagacagccagaagcaagcttttggagctgaaggaacctgagacagaagctagtcccccctctgaattttactgatgaagaaactgaggccacagagctaaagtgacttttcccaaggtcgcccagcgaggacgtgggacttctcagacgtcaggagagtgatgtgagggagctgtgtgaccatagaaagtgacgtgttaaaaaccagcgctgccctctttgaaagccagggagcatcattcatttagcctgctgagaagaagaaaccaagtgtccgggattcagacctctctgcggccccaagtgttcgtgggtgtgaagctcagccctgagggtctctggacagcgatcactcagcctctggacagcgatcactcagcctctggacagacagcgatcactcagcctctggacagcgatcactcagcctctggacagcgatcactcagcctctggacagcgataactcagcctctgtccccgtctgagatgttggcagggactgtcagatttgccaggcattgtttgaagttcttcccagcccagaaacctgcatgtgtagattttggtgcttccagaggcagggctatgctcacattcatggcctctgacagcgaggaagaagtgtgtgatgagcggacgtccctaatgtcggctgagagccccacgccgcgctcctgccaggagggcaggcagggcccagaggatggagagaacactgcccagtggagaagccaggagaacgaggaggacggtgaggaggaccctgaccgctatgtctgtagtggggttcccgggcggccgccaggcctggaggaagagctgaccctcaaatacggagcgaagcacgtgatcatgctgtttgtgcctgtcactctgtgcatgatcgtggtggtagccaccatcaagtctgtgcgcttctacacagagaagaatggacagctcatctacacgccattcactgaggacacaccctcggtgggccagcgcctcctcaactccgtgctgaacaccctcatcatgatcagcgtcatcgtggttatgaccatcttcttggtggtgctctacaagtaccgctgctacaagttcatccatggctggttgatcatgtcttcactgatgctgctgttcctcttcacctatatctaccttggggaagtgctcaagacctacaatgtggccatggactaccccaccctcttgctgactgtctggaacttcggggcagtgggcatggtgtgcatccactggaagggccctctggtgctgcagcaggcctacctcatcatgatcagtgcgctcatggccctagtgttcatcaagtacctcccagagtggtccgcgtgggtcatcctgggcgccatctctgtgtatgatctcgtggctgtgctgtgtcccaaagggcctctgagaatgctggtagaaactgcccaggagagaaatgagcccatattccctgccctgatatactcatctgccatggtgtggacggttggcatggcgaagctggacccctcctctcagggtgccctccagctcccctacgacccggagatggaagaagactcctatgacagttttggggagccttcataccccgaagtctttgagcctcccttgactggctacccaggggaggagctggaggaagaggaggaaaggggcgtgaagcttggcctcggggacttcatcttctacagtgtgctggtgggcaaggcggctgccacgggcagcggggactggaataccacgctggcctgcttcgtggccatcctcattggcttgtgtctgaccctcctgctgcttgctgtgttcaagaaggcgctgcccgccctccccatctccatcacgttcgggctcatcttttacttctccacggacaacctggtgcggccgttcatggacaccctggcctcccatcagctctacatctgagggacatggtgtgccacaggctgcaagctgcagggaattttcattggatgcagttgtatagttttacactctagtgccatatatttttaagacttttctttccttaaaaaataaagtacgtgtttacttggtgaggaggaggcagaaccagctctttggtgccagctgtttcatcaccagactttggctcccgctttggggagcgcctcgcttcacggacaggaagcacagcaggtttatccagatgaactgagaaggtcagattagggcggggagaagagcatccggcatgagggctgagatgcgcaaagagtgtgctcgggagtggcccctggcacctgggtgctctggctggagaggaaaagccagttccctacgaggagtgttcccaatgctttgtccatgatgtccttgttattttattgcctttagaaactgagtcctgttcttgttacggcagtcacactgctgggaagtggcttaatagtaatatcaataaatagatgagtcctgttagaa

SEQ ID NO: 284407 - DNA, 2302 bp, Artificial Sequence
  derived and/or modified sequence
gcgtggggcggggcctgggccggcgccgggtccggccgggcgctcagccagctgcgtaaactccgctggagcgcggcggcagagcaggcatttccagcagtgaggagacagccagaagcaagcttttggagctgaaggaacctgagacagaagctagtcccccctctgaattttactgatgaagaaactgaggccacagagctaaagtgacttttcccaaggtcgcccagcgaggacgtgggacttctcagacgtcaggagagtgatgtgagggagctgtgtgaccatagaaagtgacgtgttaaaaaccagcgctgccctctttgaaagccagggagcatcattcatttagcctgctgagaagaagaaaccaagtgtccgggattcagacctctctgcggccccaagtgttcgtggtgcttccagaggcagggctatgctcacattcatggcctctgacagcgaggaagaagtgtgtgatgagcggacgtccctaatgtcggctgagagccccacgccgcgctcctgccaggagggcaggcagggcccagaggatggagagaacactgcccagtggagaagccaggagaacgaggaggacggtgaggaggaccctgaccgctatgtctgtagtggggttcccgggcggccgccaggcctggaggaagagctgaccctcaaatacggagcgaagcacgtgatcatgctgtttgtgcctgtcactctgtgcatgatcgtggtggtagccaccatcaagtctgtgcgcttctacacagagaagaatggacagctcatctacacgccattcactgaggacacaccctcggtgggccagcgcctcctcaactccgtgctgaacaccctcatcatgatcagcgtcatcgtggttatgaccatcttcttggtggtgctctacaagtaccgctgctacaagttcatccatggctggttgatcatgtcttcactgatgctgctgttcctcttcacctatatctaccttggggaagtgctcaagacctacaatgtggccatggactaccccaccctcttgctgactgtctggaacttcggggcagtgggcatggtgtgcatccactggaagggccctctggtgctgcagcaggcctacctcatcatgatcagtgcgctcatggccctagtgttcatcaagtacctcccagagtggtccgcgtgggtcatcctgggcgccatctctgtgtatgatctcgtggctgtgctgtgtcccaaagggcctctgagaatgctggtagaaactgcccaggagagaaatgagcccatattccctgccctgatatactcatctgccatggtgtggacggttggcatggcgaagctggacccctcctctcagggtgccctccagctcccctacgacccggagatggaagaagactcctatgacagttttggggagccttcataccccgaagtctttgagcctcccttgactggctacccaggggaggagctggaggaagaggaggaaaggggcgtgaagcttggcctcggggacttcatcttctacagtgtgctggtgggcaaggcggctgccacgggcagcggggactggaataccacgctggcctgcttcgtggccatcctcattggcttgtgtctgaccctcctgctgcttgctgtgttcaagaaggcgctgcccgccctccccatctccatcacgttcgggctcatcttttacttctccacggacaacctggtgcggccgttcatggacaccctggcctcccatcagctctacatctgagggacatggtgtgccacaggctgcaagctgcagggaattttcattggatgcagttgtatagttttacactctagtgccatatatttttaagacttttctttccttaaaaaataaagtacgtgtttacttggtgaggaggaggcagaaccagctctttggtgccagctgtttcatcaccagactttggctcccgctttggggagcgcctcgcttcacggacaggaagcacagcaggtttatccagatgaactgagaaggtcagattagggcggggagaagagcatccggcatgagggctgagatgcgcaaagagtgtgctcgggagtggcccctggcacctgggtgctctggctggagaggaaaagccagttccctacgaggagtgttcccaatgctttgtccatgatgtccttgttattttattgcctttagaaactgagtcctgttcttgttacggcagtcacactgctgggaagtggcttaatagtaatatcaataaatagatgagtcctgttagaa

SEQ ID NO: 284408 - DNA, 1972 bp, Artificial Sequence
  derived and/or modified sequence
atgttggcagggactgtcagatttgccaggcattgtttgaagttcttcccagcccagaaacctgcatgtgtagattttggtgcttccagaggcagggctatgctcacattcatggcctctgacagcgaggaagaagtgtgtgatgagcggacgtccctaatgtcggctgagagccccacgccgcgctcctgccaggagggcaggcagggcccagaggatggagagaacactgcccagtggagaagccaggagaacgaggaggacggtgaggaggaccctgaccgctatgtctgtagtggggttcccgggcggccgccaggcctggaggaagagctgaccctcaaatacggagcgaagcacgtgatcatgctgtttgtgcctgtcactctgtgcatgatcgtggtggtagccaccatcaagtctgtgcgcttctacacagagaagaatggacagctcatctacacgccattcactgaggacacaccctcggtgggccagcgcctcctcaactccgtgctgaacaccctcatcatgatcagcgtcatcgtggttatgaccatcttcttggtggtgctctacaagtaccgctgctacaagttcatccatggctggttgatcatgtcttcactgatgctgctgttcctcttcacctatatctaccttggggaagtgctcaagacctacaatgtggccatggactaccccaccctcttgctgactgtctggaacttcggggcagtgggcatggtgtgcatccactggaagggccctctggtgctgcagcaggcctacctcatcatgatcagtgcgctcatggccctagtgttcatcaagtacctcccagagtggtccgcgtgggtcatcctgggcgccatctctgtgtatgatctcgtggctgtgctgtgtcccaaagggcctctgagaatgctggtagaaactgcccaggagagaaatgagcccatattccctgccctgatatactcatctgccatggtgtggacggttggcatggcgaagctggacccctcctctcagggtgccctccagctcccctacgacccggagatggaagaagactcctatgacagttttggggagccttcataccccgaagtctttgagcctcccttgactggctacccaggggaggagctggaggaagaggaggaaaggggcgtgaagcttggcctcggggacttcatcttctacagtgtgctggtgggcaaggcggctgccacgggcagcggggactggaataccacgctggcctgcttcgtggccatcctcattggcttgtgtctgaccctcctgctgcttgctgtgttcaagaaggcgctgcccgccctccccatctccatcacgttcgggctcatcttttacttctccacggacaacctggtgcggccgttcatggacaccctggcctcccatcagctctacatctgagggacatggtgtgccacaggctgcaagctgcagggaattttcattggatgcagttgtatagttttacactctagtgccatatatttttaagacttttctttccttaaaaaataaagtacgtgtttacttggtgaggaggaggcagaaccagctctttggtgccagctgtttcatcaccagactttggctcccgctttggggagcgcctcgcttcacggacaggaagcacagcaggtttatccagatgaactgagaaggtcagattagggcggggagaagagcatccggcatgagggctgagatgcgcaaagagtgtgctcgggagtggcccctggcacctgggtgctctggctggagaggaaaagccagttccctacgaggagtgttcccaatgctttgtccatgatgtccttgttattttattgcctttagaaactgagtcctgttcttgttacggcagtcacactgctgggaagtggcttaatagtaatatcaataaatagatgagtcctgttagaatcttgga

SEQ ID NO: 284409 - DNA, 1248 bp, Artificial Sequence
  derived and/or modified sequence
atgttaactttcatggcatctgattcagaggaggaagtgtgcgacgagagaacatctctaatgtccgcggagtcccccacaccccgatcctgtcaggagggacggcagggcccagaagacggagagaatactgcccaatggagatcacaggagaacgaggaggatggagaggaggatcctgatagatacgtgtgttctggcgtgcccggacgcccacccggactcgaggaagagctcacgctgaagtacggcgctaagcatgtgatcatgctgttcgtgccagtgaccctttgtatgatcgtcgtagtggccacaattaagtcggtgaggttctacacagaaaagaacggtcaattgatttacacgccattcactgaggacactccttctgttggccagagactgttgaattccgtgctcaacacacttatcatgatctctgtcattgtggtgatgaccatcttcctggttgtgttgtataaatacagatgctataaattcattcacggatggctcattatgagtagcttgatgctgttgttcctgtttacctacatctacttgggggaagtgctgaagacatacaacgtggctatggattaccccaccctgttactgacagtatggaactttggggcagttggcatggtttgcattcactggaaaggacctctggtcttgcagcaggcctacctaatcatgatatccgcactgatggcactggtgttcatcaaatacctccctgaatggagcgcatgggtgatcctcggcgctataagcgtttacgccgcaatggtgtggacggtcgggatggctaagctggatccaagtagccaaggagccctccagttgccttatgatccggagatggaagaggactcttatgattcgtttggtgagcccagttatccggaggtgtttgagccgccacttacagggtatcccggagaggaactcgaggaggaagaagagcggggtgtgaagctggggttaggtgacttcatattttattcagtgctggtgggaaaggccgctgcgaccggtagcggggactggaacaccactttggcctgcttcgtggccatcctgatcggactgtgcttaactctgcttttgctggccgtgttcaagaaagccctgcccgcactcccaataagtattacatttgggctcatcttttatttttccacagacaacctagtgcgaccattcatggacacactggcatcccaccaactctatatttag

SEQ ID NO: 284410 - DNA, 1446 bp, Artificial Sequence
  derived and/or modified sequence
atgctggctggcacagtgcggtttgccaggcactgcctcaagttttttccggctcagaaacccgcttgcgtggactttggtgcaagccggggacgcgctatgctgaccttcatggcaagtgactccgaggaggaggtctgtgatgaaaggacgagtctaatgagcgcagagtcgccaactcctcgctcatgtcaggaaggcaggcagggacccgaggacggcgagaatactgcacaatggagatcacaggagaatgaggaagacggggaggaggacccagatcggtacgtatgtagtggtgtcccaggacgacctccgggactagaggaggagcttaccctcaagtacggggctaagcacgtcattatgctattcgtgccagtcaccctgtgcatgatcgtcgtggtggcgaccattaagagtgtgagattttacaccgagaagaatgggcagcttatctatactcccttcactgaggacacccctagtgtcggccagcggcttctgaacagcgtgctcaacactctaatcatgatctcagtgatcgtcgtcatgactattttccttgtggtgctgtacaagtatcgatgctataaattcatccatggctggttaatcatgagctcgctgatgctactgttcctgttcacttacatctacctgggggaggtcttgaaaacatataacgtggccatggattatccgacactgctactgacagtttggaatttcggagctgtgggtatggtctgtatccattggaaaggccctctagttcttcagcaggcatacctcattatgatctcagccctcatggcactggtctttattaagtaccttcccgagtggagtgcatgggttatccttggggcaatatccgtttatgacctcgtcgcggtactgtgtccaaagggtcccttgaggatgcttgtggagactgctcaagaaagaaacgaaccgatctttcctgctctgatttacagttctgcaatggtttggactgtagggatggctaaactggaccccagctcgcagggagccctgcagctaccttacgaccccgaaatggaagaggatagctacgattccttcggcgaaccctcctaccccgaggtgttcgagccgccattgacagggtacccaggcgaggaactggaggaggaggaggagcggggagtgaaattaggactcggagatttcatattctattcggtgttagtcggcaaggctgccgcaacaggctctggcgactggaacaccacacttgcctgttttgttgcaatcctgatcggcctgtgtctcactctgctccttctggcagtgttcaaaaaagctctccccgctcttccaatcagcattacttttggcctgatcttctatttttccacagacaatctggtgcggcctttcatggacaccttggcctcacaccagttatatatttag

SEQ ID NO: 284411 - DNA, 1347 bp, Artificial Sequence
  derived and/or modified sequence
atgctgacgttcatggcgagtgacagcgaggaggaagtatgcgatgaaaggacatcactgatgagcgccgaaagcccaacccccaggagctgccaggaggggagacagggtccagaggatggcgagaacaccgcacagtggagatcacaagagaacgaggaggacggagaagaggacccggacagatatgtctgcagtggtgtgccaggtcggccaccagggcttgaagaagagctcacactgaagtacggagctaaacacgttatcatgctgtttgtgcccgtcactctctgtatgattgttgtcgtggctaccataaagagcgtgcggttttataccgagaaaaacgggcagttgatctacacgcccttcacagaggatactccatctgttgggcagagactgttgaactcggtgctcaatacacttattatgattagcgttatcgtcgtaatgacaatttttctggtggtgctctataagtatcggtgttataagtttatccacggttggttgatcatgagctccctaatgttactcttcctgttcacgtatatctatctgggggaggtccttaagacctataacgtggccatggactatcctacactgctcctgaccgtgtggaactttggagctgtgggaatggtttgcatacattggaagggcccattggtgctccagcaggcctatctgatcatgatcagcgctctgatggcgttggtttttattaagtatttgccagagtggtctgcctgggtcatactgggcgcaatctcagtgtacgacctcgtcgctgtcctgtgccccaagggcccactgagaatgctggttgaaacagcccaggagcgcaatgaaccaatttttcctgcactgatctactcatcagccatggtgtggactgtaggtatggccaagttggacccctcttcccagggtgccctgcagctgccttacgacccggaaatggaagaagacagctacgatagtttcggcgaaccctcgtacccagaggtgtttgaaccacccctaaccggctatcctggcgaggaactcgaggaggaagaggagcggggagtaaaacttggcctgggggattttattttttattctgtcctggtcggaaaggcagccgctaccggctcgggggattggaacaccactctggcctgtttcgtggctattttgattggcttgtgcttaactctgctgctccttgcggtcttcaagaaagctttgcccgcactcccaatctcaatcacattcggcctcatattctatttcagtacagacaatctagtgcggccttttatggacacattggcatcacatcaactctacatctag

SEQ ID NO: 284412 - DNA, 1446 bp, Artificial Sequence
  derived and/or modified sequence
atgctggctgggacagtccgcttcgctagacactgcctgaaatttttccctgctcagaagcccgcatgcgtagattttggcgcaagccggggtagagccatgctgaccttcatggcctcagactcagaggaggaggtttgcgatgaacggacatccttgatgagtgccgagagccccactcctcgaagttgtcaggaagggcgtcagggccctgaggatggagaaaataccgcgcaatggcgcagtcaagaaaacgaggaggacggcgaggaggaccccgaccggtacgtttgttccggtgttcccggacgcccacccggacttgaggaagagctcacccttaagtacggagcaaaacacgttattatgctcttcgtgcccgtgacgctgtgcatgattgtggtcgtggcgactataaaatcggtcagattttacacagagaaaaacgggcagctaatttacaccccattcacggaagacacgccaagtgtggggcagagactactgaactctgtgctaaacaccttgattatgattagtgtaatagtggttatgacaatctttctcgtggttctctacaaataccgttgctacaaattcatacatgggtggctgatcatgtcctccctgatgcttttattcctgttcacctacatttacctgggggaggttctcaagacgtacaatgttgccatggactatccgacgcttttgctcaccgtgtggaatttcggagccgttggtatggtctgcatacactggaagggcccactggttttgcagcaagcctatctgatcatgatttcggctttgatggcccttgtcttcatcaaatacctgccggagtggtcagcatgggtcatcctgggggcaatttctgtttacgacttggtagcagtactctgcccaaagggcccactgcggatgctggtggagacagcccaggaacggaacgagcctatttttcccgcactaatctacagttctgcaatggtgtggacagtaggaatggccaagttagaccccagctcgcagggagcgctccagcttccctacgatccagagatggaggaggattcttacgacagctttggcgaaccatcttatccggaggttttcgagcctccgctgactggttaccctggcgaggaacttgaagaggaagaggaacggggtgtgaaactgggactgggtgatttcatcttttacagcgtgctggtcggtaaggcagctgcaactggaagcggagactggaacaccactttggcctgcttcgtcgcaatcctcatcgggttatgtctcaccctcttattgttggctgtgtttaaaaaggcactgcccgcactgccgatcagtataacctttggcctgatcttttatttctctaccgataacctggtacgcccatttatggatactctcgcatctcatcaactatatatatag

SEQ ID NO: 284413 - DNA, 66 bp, Artificial Sequence
  derived and/or modified sequence
atgttgactttcatggcctccgatagcgaggaagaggtctgcgacgaaaggacatcattgatgtag

SEQ ID NO: 284414 - DNA, 1248 bp, Artificial Sequence
  derived and/or modified sequence
atgctgaccttcatggccagcgacagcgaggaggaggtgtgcgacgagagaaccagcctgatgagcgccgagagccccacccccagaagctgccaggagggcagacagggccccgaggacggcgagaacaccgcccagtggagaagccaggagaacgaggaggacggcgaggaggaccccgacagatacgtgtgcagcggcgtgcccggcagaccccccggcctggaggaggagctgaccctgaagtacggcgccaagcacgtgatcatgctgttcgtgcccgtgaccctgtgcatgatcgtggtggtggccaccatcaagagcgtgagattctacaccgagaagaacggccagctgatctacacccccttcaccgaggacacccccagcgtgggccagagactgctgaacagcgtgctgaacaccctgatcatgatcagcgtgatcgtggtgatgaccatcttcctggtggtgctgtacaagtacagatgctacaagttcatccacggctggctgatcatgagcagcctgatgctgctgttcctgttcacctacatctacctgggcgaggtgctgaagacctacaacgtggccatggactaccccaccctgctgctgaccgtgtggaacttcggcgccgtgggcatggtgtgcatccactggaagggccccctggtgctgcagcaggcctacctgatcatgatcagcgccctgatggccctggtgttcatcaagtacctgcccgagtggagcgcctgggtgatcctgggcgccatcagcgtgtacgccgccatggtgtggaccgtgggcatggccaagctggaccccagcagccagggcgccctgcagctgccctacgaccccgagatggaggaggacagctacgacagcttcggcgagcccagctaccccgaggtgttcgagccccccctgaccggctaccccggcgaggagctggaggaggaggaggagagaggcgtgaagctgggcctgggcgacttcatcttctacagcgtgctggtgggcaaggccgccgccaccggcagcggcgactggaacaccaccctggcctgcttcgtggccatcctgatcggcctgtgcctgaccctgctgctgctggccgtgttcaagaaggccctgcccgccctgcccatcagcatcaccttcggcctgatcttctacttcagcaccgacaacctggtgagacccttcatggacaccctggccagccaccagctgtacatctag

SEQ ID NO: 284415 - DNA, 1446 bp, Artificial Sequence
  derived and/or modified sequence
atgctggccggcaccgtgagattcgccagacactgcctgaagttcttccccgcccagaagcccgcctgcgtggacttcggcgccagcagaggcagagccatgctgaccttcatggccagcgacagcgaggaggaggtgtgcgacgagagaaccagcctgatgagcgccgagagccccacccccagaagctgccaggagggcagacagggccccgaggacggcgagaacaccgcccagtggagaagccaggagaacgaggaggacggcgaggaggaccccgacagatacgtgtgcagcggcgtgcccggcagaccccccggcctggaggaggagctgaccctgaagtacggcgccaagcacgtgatcatgctgttcgtgcccgtgaccctgtgcatgatcgtggtggtggccaccatcaagagcgtgagattctacaccgagaagaacggccagctgatctacacccccttcaccgaggacacccccagcgtgggccagagactgctgaacagcgtgctgaacaccctgatcatgatcagcgtgatcgtggtgatgaccatcttcctggtggtgctgtacaagtacagatgctacaagttcatccacggctggctgatcatgagcagcctgatgctgctgttcctgttcacctacatctacctgggcgaggtgctgaagacctacaacgtggccatggactaccccaccctgctgctgaccgtgtggaacttcggcgccgtgggcatggtgtgcatccactggaagggccccctggtgctgcagcaggcctacctgatcatgatcagcgccctgatggccctggtgttcatcaagtacctgcccgagtggagcgcctgggtgatcctgggcgccatcagcgtgtacgacctggtggccgtgctgtgccccaagggccccctgagaatgctggtggagaccgcccaggagagaaacgagcccatcttccccgccctgatctacagcagcgccatggtgtggaccgtgggcatggccaagctggaccccagcagccagggcgccctgcagctgccctacgaccccgagatggaggaggacagctacgacagcttcggcgagcccagctaccccgaggtgttcgagccccccctgaccggctaccccggcgaggagctggaggaggaggaggagagaggcgtgaagctgggcctgggcgacttcatcttctacagcgtgctggtgggcaaggccgccgccaccggcagcggcgactggaacaccaccctggcctgcttcgtggccatcctgatcggcctgtgcctgaccctgctgctgctggccgtgttcaagaaggccctgcccgccctgcccatcagcatcaccttcggcctgatcttctacttcagcaccgacaacctggtgagacccttcatggacaccctggccagccaccagctgtacatctag

SEQ ID NO: 284416 - DNA, 1347 bp, Artificial Sequence
  derived and/or modified sequence
atgctgaccttcatggccagcgacagcgaggaggaggtgtgcgacgagagaaccagcctgatgagcgccgagagccccacccccagaagctgccaggagggcagacagggccccgaggacggcgagaacaccgcccagtggagaagccaggagaacgaggaggacggcgaggaggaccccgacagatacgtgtgcagcggcgtgcccggcagaccccccggcctggaggaggagctgaccctgaagtacggcgccaagcacgtgatcatgctgttcgtgcccgtgaccctgtgcatgatcgtggtggtggccaccatcaagagcgtgagattctacaccgagaagaacggccagctgatctacacccccttcaccgaggacacccccagcgtgggccagagactgctgaacagcgtgctgaacaccctgatcatgatcagcgtgatcgtggtgatgaccatcttcctggtggtgctgtacaagtacagatgctacaagttcatccacggctggctgatcatgagcagcctgatgctgctgttcctgttcacctacatctacctgggcgaggtgctgaagacctacaacgtggccatggactaccccaccctgctgctgaccgtgtggaacttcggcgccgtgggcatggtgtgcatccactggaagggccccctggtgctgcagcaggcctacctgatcatgatcagcgccctgatggccctggtgttcatcaagtacctgcccgagtggagcgcctgggtgatcctgggcgccatcagcgtgtacgacctggtggccgtgctgtgccccaagggccccctgagaatgctggtggagaccgcccaggagagaaacgagcccatcttccccgccctgatctacagcagcgccatggtgtggaccgtgggcatggccaagctggaccccagcagccagggcgccctgcagctgccctacgaccccgagatggaggaggacagctacgacagcttcggcgagcccagctaccccgaggtgttcgagccccccctgaccggctaccccggcgaggagctggaggaggaggaggagagaggcgtgaagctgggcctgggcgacttcatcttctacagcgtgctggtgggcaaggccgccgccaccggcagcggcgactggaacaccaccctggcctgcttcgtggccatcctgatcggcctgtgcctgaccctgctgctgctggccgtgttcaagaaggccctgcccgccctgcccatcagcatcaccttcggcctgatcttctacttcagcaccgacaacctggtgagacccttcatggacaccctggccagccaccagctgtacatctag

SEQ ID NO: 284417 - DNA, 66 bp, Artificial Sequence
  derived and/or modified sequence
atgctgaccttcatggccagcgacagcgaggaggaggtgtgcgacgagagaaccagcctgatgtag

SEQ ID NO: 284418 - protein, 495 aa, Artificial Sequence
  derived and/or modified sequence
MAQGNNYGQTSNGVADESPNMLVYRKMEDVIARMQDEKNGIPIRTVKSFLSKIPSVFSGSDIVQWLIKNLTIEDPVEALHLGTLMAAHGYFFPISDHVLTLKDDGTFYRFQTPYFWPSNCWEPENTDYAVYLCKRTMQNKARLELADYEAESLARLQRAFARKWEFIFMQAEAQAKVDKKRDKIERKILDSQERAFWDVHRPVPGCVNTTEVDIKKSSRMRNPHKTRKSVYGLQNDIRSHSPTHTPTPETKPPTEDELQQQIKYWQIQLDRHRLKMSKVADSLLSYTEQYLEYDPFLLPPDPSNPWLSDDTTFWELEASKEPSQQRVKRWGFGMDEALKDPVGREQFLKFLESEFSSENLRFWLAVEDLKKRPIKEVPSRVQEIWQEFLAPGAPSAINLDSKSYDKTTQNVKEPGRYTFEDAQEHIYKLMKSDSYPRFIRSSAYQELLQAKKKSGNSMDRRTSFEKFAQNVGRNIPIFPCHKNCTPTLRASTNLL

SEQ ID NO: 284419 - protein, 326 aa, Artificial Sequence
  derived and/or modified sequence
QAEAQAKVDKKRDKIERKILDSQERAFWDVHRPVPGCVNTTEVDIKKSSRMRNPHKTRKSVYGLQNDIRSHSPTHTPTPETKPPTEDELQQQIKYWQIQLDRHRLKMSKVADSLLSYTEQYLEYDPFLLPPDPSNPWLSDDTTFWELEASKEPSQQRVKRWGFGMDEALKDPVGREQFLKFLESEFSSENLRFWLAVEDLKKRPIKEVPSRVQEIWQEFLAPGAPSAINLDSKSYDKTTQNVKEPGRYTFEDAQEHIYKLMKSDSYPRFIRSSAYQELLQAKKKSGNSMDRRTSFEKFAQNVGRNIPIFPCHKNCTPTLRASTNLL

SEQ ID NO: 284420 - DNA, 1488 bp, Artificial Sequence
  derived and/or modified sequence
atggctcagggcaacaactacgggcagacaagcaacggagtcgcggatgagagcccgaatatgctggtttacagaaaaatggaggacgtcatcgccaggatgcaagatgagaagaacggaataccaatccgaactgtgaaaagctttttgtctaaaatcccatccgtgttcagcggatctgacattgtgcagtggctgatcaagaacctaaccatcgaggacccggttgaggccctgcatcttgggaccctcatggccgctcacggttactttttcccgatcagcgaccacgtcctaactctcaaggatgatggaactttttacagatttcagacaccgtatttttggccctccaactgttgggaacccgaaaacaccgattacgcagtatatctatgtaagcgcactatgcaaaacaaggctcgcctcgaactggctgactacgaggcggagtctctggcccgtttacagcgggccttcgccagaaagtgggagtttatttttatgcaggctgaagcgcaggctaaagtggataagaagagggataagattgaaaggaaaattttagactctcaggaaagagcattttgggatgtgcaccgacctgtgccgggctgcgttaataccactgaggtggacataaagaaatccagtagaatgcgcaacccgcacaagactcgcaagagcgtgtatggcctgcagaatgatattcgcagtcattctcccactcacacaccaacgccagagaccaaaccgcctactgaggatgagttgcagcaacagatcaaatattggcagatccagttggacaggcaccgcttgaagatgagtaaggtcgcggacagcttgctttcgtacacggagcagtatttagaatatgacccattcctgttgccacccgacccctcaaacccatggttatctgatgacaccaccttctgggaactggaggccagcaaggaaccttcgcagcagcgggtcaaaaggtggggttttggcatggacgaagccctgaaagaccccgtgggtcgcgagcagttcctcaagtttctagagtccgagttcagcagcgaaaacctgagattttggttagccgtggaagatttaaagaagcggccaatcaaggaggtgccttctagagtccaagaaatttggcaggagtttctagccccaggcgcgccctccgccatcaatctcgatagcaagtcttatgacaagacaactcagaacgtgaaagagcctggacgctacaccttcgaggatgcacaggagcacatctataaactgatgaagagcgactcctatccccgattcattcggtcgagcgcctaccaggagctgctccaggctaaaaaaaagagcgggaattcgatggacagacggacctccttcgagaaattcgcacagaacgttggccgcaacatcccgatcttcccctgccataaaaactgcacaccaacgctgcgagcctccacgaatctgctttag

SEQ ID NO: 284421 - DNA, 1488 bp, Artificial Sequence
  derived and/or modified sequence
atggcccagggcaacaactacggccagaccagcaatggagtggctgatgagagccccaacatgctggtgtacaggaagatggaggatgtgattgccaggatgcaggatgagaagaatggcatccccatcagaacagtgaagagcttcctgagcaagatccccagcgtcttcagcggcagtgacatcgtgcagtggctgatcaagaacctgaccattgaagatcctgtggaggccctgcacctgggcaccctgatggccgcccacggctacttcttccccatcagtgaccacgtgctgaccctgaaggatgatggcaccttctaccgcttccagaccccctacttctggcccagcaactgctgggagcctgagaacacagattatgctgtgtacctgtgcaagaggaccatgcagaacaaggcccggctggagctggccgactatgaggccgagagcctggcccggctgcagagggcctttgccaggaagtgggagttcatcttcatgcaggccgaggcccaggccaaggtggacaagaagagggacaagattgaaaggaagatcctggacagccaggagcgggccttctgggatgtgcacaggcctgtgcccggctgtgtgaacaccacagaggtggacatcaagaagagcagcaggatgaggaacccccacaagaccaggaagtctgtgtatggcctgcagaatgacatccgcagccacagccccacccacacccccaccccagagaccaagccacccacagaagatgagctgcagcagcagatcaagtactggcagatccagctggacagacaccggctgaagatgagcaaggtggccgacagcctgctgagctacacagagcagtacctggagtatgaccccttcctgctgcccccagaccccagcaacccctggctgagtgatgacaccaccttctgggagctggaggccagcaaggagcccagccagcagagggtgaagcgctggggcttcggcatggatgaggccctgaaggaccctgtgggccgggagcagttcctgaagttcctggagagcgagttcagcagcgagaacctgcgcttctggctggccgtggaggacctgaagaagaggcccatcaaggaggtgcccagccgggtgcaggagatctggcaggagttcctggcccctggggcccccagcgccatcaacctggacagcaagagctatgacaagaccacccagaatgtgaaggagcccggccgctacacctttgaagatgcccaggagcacatctacaagctgatgaagagtgacagctacccccgcttcatccgcagcagcgcctaccaggagctgctgcaggccaagaagaagagcggcaacagcatggacaggaggaccagctttgagaagtttgcccagaatgtgggcaggaacatccccatcttcccctgccacaagaactgcacccccaccctgcgggccagcaccaacctgctgtag

SEQ ID NO: 284422 - DNA, 1488 bp, Artificial Sequence
  derived and/or modified sequence
atggcccagggcaacaactacggccagaccagcaacggcgtggccgacgagtcacccaatatgctggtctaccgcaagatggaggatgtgattgcgcggatgcaggacgagaaaaacggtattccaatcagaactgtgaaatccttcctttcaaagattccatccgtcttttctggctcagatattgttcagtggctcattaagaacctgaccattgaagatcccgtagaggctttgcacctcggcacactgatggctgcccatggctacttctttcctatttctgatcacgtcttgaccttgaaagacgacgggacgttttatcgattccagaccccctatttttggcccagcaactgctgggagccggagaacacggattacgcagtttatctgtgtaagagaactatgcagaacaaggccaggttggaacttgccgactacgaagccgagagcctcgctaggctccagcgcgcttttgccaggaaatgggagtttatcttcatgcaggcggaggcccaggccaaggtggataaaaagcgggacaagattgaacgtaaaatcctggactctcaggagcgtgccttctgggacgttcaccgacctgtacccggctgcgtcaacacaaccgaggtggatattaagaagagttcaagaatgagaaaccctcataagactcgtaaatcagtctatgggttgcagaacgacattaggtcccattcaccaacacacaccccaacaccggaaacaaagccgcccacggaagatgaacttcagcagcagattaagtattggcagattcaactggaccgccaccgcctgaagatgagcaaagtggctgactccctcctatcctacacggagcaatatttggaatatgatccgttcctccttccccccgaccccagcaatccctggctttccgacgacaccaccttttgggaattggaagccagcaaagaacctagccagcaaagggtgaagcggtggggctttggcatggatgaggccttgaaggatcctgtgggtagggagcagtttctaaaattcctggagtctgagtttagctcagagaacctacggttctggctggccgtggaggatctgaagaagaggccgattaaagaagtgcccagtagagtccaggagatatggcaggagttcctggcccctggagctcctagtgctatcaacctggactcgaagtcttacgacaagaccacacaaaacgttaaggaacctggtaggtacaccttcgaagatgcacaggagcatatatacaaactgatgaagagcgactcttacccacgctttattcggtcttccgcttaccaagaactgcttcaggcaaagaagaagagcggaaatagcatggaccgcaggacatcatttgagaagtttgcacagaacgttggtagaaatatccccatcttcccctgtcacaagaattgcactcctaccttaagagcatcaactaacctgttgtag

SEQ ID NO: 284423 - DNA, 1488 bp, Artificial Sequence
  derived and/or modified sequence
atggcccaggggaacaattacggacagacatctaatggagtggcggacgagagtccaaatatgcttgtgtacaggaagatggaggacgtaatcgcacggatgcaagacgaaaaaaatggtatccccattagaaccgtgaagtcttttctgagtaagattccgtccgtgtttagtggcagcgacatcgttcagtggctgatcaagaacctaactattgaagatccagttgaggcattgcatctgggcacactgatggccgcacatggctatttcttccctattagtgaccatgtcctgactttgaaagatgatggcacattttaccgattccagacgccttacttctggccatctaattgttgggaacctgagaataccgattacgccgtgtatctctgtaaacgcacaatgcagaacaaggccaggctggagttagccgactatgaggccgaatccctggcgagattgcaaagggccttcgcacggaagtgggaattcatatttatgcaggcggaggctcaggcgaaagtggataagaaacgagacaaaatcgaaaggaaaatactggatagccaggagagggccttctgggatgtgcaccggccagtgcctgggtgcgttaataccaccgaggtcgacatcaagaaatcatccaggatgagaaacccccataagacccgaaagagcgtctatggcctgcagaatgacattcgatctcattcccccactcatacccctacacccgaaactaagcctcccactgaggacgaactccagcaacagatcaaatattggcagattcaactggaccgtcacaggctgaagatgagcaaggtggcagacagcctcctctcctatacagaacagtaccttgaatacgatccgttcctattaccgccagacccgtctaacccttggctgtcagacgatacgacattctgggagctcgaggcgtcgaaggagcccagtcagcagagggtcaaacgatggggattcgggatggacgaagcactgaaggatccagtaggcagggagcagttcttaaagttcttggaaagtgagttctctagcgagaacttacgtttttggctggcagtagaagatcttaaaaagaggcccatcaaggaagtgccaagccgcgtgcaagagatctggcaggagtttcttgcaccgggtgcacctagcgccatcaatctcgacagtaagtcttatgacaagactacacagaacgtaaaggagcccggaagatatacgttcgaggacgcccaggaacacatatataaattaatgaagtcagattcataccctagatttatcaggtcaagcgcctaccaggagttgctacaagccaaaaagaaatcgggtaactcaatggaccggaggacatcttttgagaagttcgctcagaatgtggggcgaaacattcctatcttcccctgtcataagaattgcactccgactctcagggcctcaaccaatttgctgtag

SEQ ID NO: 284424 - DNA, 1488 bp, Artificial Sequence
  derived and/or modified sequence
atggcccaggggaataattatgggcagaccagcaacggggtggccgatgaatcacccaacatgctggtgtacagaaagatggaagacgtcatagcacggatgcaagatgaaaaaaatggaattcctattcgtacggtcaaaagctttctttccaagatacctagcgtcttctctggttcagacattgttcaatggttgataaagaacttaactatagaagatccagtggaggcgctccatttgggaacattaatggctgcccacggctacttctttccaatctcagatcatgtcctcacactcaaggatgatggcaccttttaccggtttcaaaccccctatttttggccatcaaattgttgggagccggaaaacacagattatgccgtttacctctgcaagagaacaatgcaaaacaaggcacgactggagctcgcagactatgaggctgagagcctggccaggctgcagagagcatttgcccggaagtgggagttcattttcatgcaagcagaagcacaagcaaaagtggacaagaagagagacaagattgaaaggaagatccttgacagccaagagagagcgttctgggacgtgcacaggcccgtgcctggatgtgtaaatacaactgaagtggacattaagaagtcatccagaatgagaaacccccacaaaacacggaagtctgtctatggtttacaaaatgatattagaagtcacagtcctacccacacacccacaccagaaactaaacctccaacagaagatgagttacaacaacagataaaatattggcaaatacagttagatagacatcggttaaaaatgtcaaaagtcgctgacagtctactaagttacacggaacagtatttagaatacgacccgtttcttttgccacctgacccttctaacccatggctgtccgatgacaccactttctgggaacttgaggcaagcaaagaaccgagccagcagagggtaaaacgatggggttttggcatggacgaggcattgaaagacccagttgggagagaacagttccttaaatttctagagtcagaattcagctcggaaaatttaagattctggctggcagtggaggacctgaaaaagaggcctattaaagaagtaccctcaagagttcaggaaatatggcaagagtttctggctcccggagcccccagtgctattaacttggattccaagagttatgacaaaaccacacagaacgtgaaggaacctggacgatacacatttgaagatgctcaggagcacatttacaaactgatgaaaagtgattcatacccacgttttataagatccagtgcctatcaggagcttctacaggcaaagaaaaagtctggaaactcaatggatcgcagaacatcttttgaaaaatttgcacagaatgtgggcagaaacatccctattttcccatgccataaaaactgtacaccaacactgagggccagcactaacctgttatga

SEQ ID NO: 284425 - DNA, 1488 bp, Artificial Sequence
  derived and/or modified sequence
atggcccagggcaacaactacggccagaccagcaacggcgtggccgacgagagccccaacatgctggtgtacagaaagatggaggacgtgatcgccagaatgcaggacgagaagaacggcatccccatcagaaccgtgaagagcttcctgagcaagatccccagcgtgttcagcggcagcgacatcgtgcagtggctgatcaagaacctgaccatcgaggaccccgtggaggccctgcacctgggcaccctgatggccgcccacggctacttcttccccatcagcgaccacgtgctgaccctgaaggacgacggcaccttctacagattccagaccccctacttctggcccagcaactgctgggagcccgagaacaccgactacgccgtgtacctgtgcaagagaaccatgcagaacaaggccagactggagctggccgactacgaggccgagagcctggccagactgcagagagccttcgccagaaagtgggagttcatcttcatgcaggccgaggcccaggccaaggtggacaagaagagagacaagatcgagagaaagatcctggacagccaggagagagccttctgggacgtgcacagacccgtgcccggctgcgtgaacaccaccgaggtggacatcaagaagagcagcagaatgagaaacccccacaagaccagaaagagcgtgtacggcctgcagaacgacatcagaagccacagccccacccacacccccacccccgagaccaagccccccaccgaggacgagctgcagcagcagatcaagtactggcagatccagctggacagacacagactgaagatgagcaaggtggccgacagcctgctgagctacaccgagcagtacctggagtacgaccccttcctgctgccccccgaccccagcaacccctggctgagcgacgacaccaccttctgggagctggaggccagcaaggagcccagccagcagagagtgaagagatggggcttcggcatggacgaggccctgaaggaccccgtgggcagagagcagttcctgaagttcctggagagcgagttcagcagcgagaacctgagattctggctggccgtggaggacctgaagaagagacccatcaaggaggtgcccagcagagtgcaggagatctggcaggagttcctggcccccggcgcccccagcgccatcaacctggacagcaagagctacgacaagaccacccagaacgtgaaggagcccggcagatacaccttcgaggacgcccaggagcacatctacaagctgatgaagagcgacagctaccccagattcatcagaagcagcgcctaccaggagctgctgcaggccaagaagaagagcggcaacagcatggacagaagaaccagcttcgagaagttcgcccagaacgtgggcagaaacatccccatcttcccctgccacaagaactgcacccccaccctgagagccagcaccaacctgctgtag

SEQ ID NO: 284426 - DNA, 981 bp, Artificial Sequence
  derived and/or modified sequence
caggcggaagcacaggctaaagtggataaaaaacgtgataaaatcgagcggaagatacttgattcccaggagcgggccttttgggacgtgcaccgacccgtgccaggctgtgtcaacacaaccgaggtcgatattaaaaagtcctctagaatgcgtaacccacataagacacgtaaaagcgtgtacggtctgcaaaatgacattagatctcactcaccaactcacactcctaccccagagactaagcctcctaccgaggatgaactgcagcaacaaatcaaatactggcagatccagctggaccgccacaggttgaagatgagcaaagtcgctgattcgctgctgtcatacaccgagcaatacttggaatacgatccttttttattaccacccgatccctctaacccttggctctctgacgacactacgttctgggaacttgaggctagtaaggaaccatcacagcagagggtgaaacgttggggatttggcatggacgaggcactgaaagaccccgtggggcgagaacagttccttaagttcttagaatccgagttctcgtcagaaaatctgaggttctggttggctgtcgaggatctcaagaaacgcccgattaaggaagttcctagccgggtacaggaaatctggcaagaattcctagctcccggtgccccatcagcaatcaacttggactctaagagctatgacaagaccacccaaaacgtcaaggaacctggtcgttacacttttgaggacgctcaggaacatatttacaaactcatgaagagtgattcttatcctagatttattagatcttcagcataccaagaactgcttcaggcgaaaaaaaagagcggcaactccatggatcgtcggacctcatttgaaaagttcgctcagaacgtcgggaggaatatccccatcttcccttgtcataaaaattgtaccccaacactgagagcttcaactaatttgttatag

SEQ ID NO: 284427 - DNA, 981 bp, Artificial Sequence
  derived and/or modified sequence
caggccgaggcccaggccaaggtggacaagaagagggacaagattgaaaggaagatcctggacagccaggagcgggccttctgggatgtgcacaggcctgtgcccggctgtgtgaacaccacagaggtggacatcaagaagagcagcaggatgaggaacccccacaagaccaggaagtctgtgtatggcctgcagaatgacatccgcagccacagccccacccacacccccaccccagagaccaagcccccaacagaagatgagctgcagcagcagatcaagtactggcagatccagctggacagacaccggctgaagatgagcaaggtggccgacagcctgctgagctacacagagcagtacctggagtatgaccccttcctgctgcccccagaccccagcaacccctggctgagtgatgacaccaccttctgggagctggaggccagcaaggagcccagccagcagagggtgaagcgctggggcttcggcatggatgaggccctgaaggaccctgtgggccgggagcagttcctgaagttcctggagagcgagttcagcagcgagaacctgcgcttctggctggccgtggaggacctgaagaagaggcccatcaaggaggtgcccagccgggtgcaggagatctggcaggagttcctggcccctggggcccccagcgccatcaacctggacagcaagagctatgacaagaccacccagaatgtgaaggagcccggccgctacacctttgaagatgcccaggagcacatctacaagctgatgaagagtgacagctacccccgcttcatccgcagcagcgcctaccaggagctgctgcaggccaagaagaagagcggcaacagcatggacaggaggaccagctttgagaagtttgcccagaatgtgggcaggaacatccccatcttcccctgccacaagaactgcacccccaccctgcgggccagcaccaacctgctgtag

SEQ ID NO: 284428 - DNA, 981 bp, Artificial Sequence
  derived and/or modified sequence
caggccgaggcccaggccaaggtggacaagaagcgggacaagatcgaaagaaagatcctggactcgcaggagagggcattctgggacgtgcacaggcctgtgcctgggtgtgtaaacacaaccgaggttgatatcaagaaatcatccaggatgcggaatccccacaagacccggaaatccgtgtatggactgcaaaacgacatccgaagccattctcccactcacacaccaacacccgagactaaaccaccaactgaggatgagctacaacagcagatcaaatactggcaaattcagttagatagacatcgcttaaagatgagcaaagttgcggacagtctcctcagctacacagaacagtacctcgagtatgatcctttcctgttgccaccagacccatcaaacccctggctgtctgatgatacaactttctgggaacttgaggcatccaaggagccatcacagcagcgtgtgaagcgatggggcttcgggatggatgaggcactgaaagatcccgtgggcagggagcagttccttaagttcctggaatcagaattttcctccgaaaatctcaggttttggctagccgtagaggacctcaagaagcgacctatcaaggaggtacccagccgggtgcaggagatttggcaggaattcctagcccctggagctccatctgcgatcaacttggacagcaagagctacgacaagacaacccagaacgtcaaggaaccaggaaggtacacattcgaagacgcgcaggaacacatatacaaacttatgaagagcgattcctaccccagatttattcgcagcagcgcctatcaggagttgctgcaggctaagaaaaagtcaggcaacagcatggaccgcaggacgtcctttgagaaatttgctcagaacgtgggaaggaatatccctatctttccatgtcacaagaattgtacccctacactgagggcatcaaccaatcttctctag

SEQ ID NO: 284429 - DNA, 981 bp, Artificial Sequence
  derived and/or modified sequence
caggctgaggctcaggcaaaagtggacaaaaaaagagacaagattgagcgcaaaattctcgactctcaggagcgcgcattctgggatgtgcacagacctgtccctggctgcgtcaatacaactgaggttgacattaagaagtctagccggatgagaaacccgcacaaaacaagaaagagcgtgtatgggctccagaatgatattagaagtcacagcccgactcatactcctacaccggagaccaagccaccaaccgaagatgaactgcagcagcagatcaaatactggcagatacagctggatagacatagattaaagatgtctaaagtggccgattctctgttgagttacaccgagcagtacttagaatatgacccctttttgcttccccctgacccaagcaacccgtggctgtcagacgatactaccttttgggagcttgaggcttccaaagagccctcacaacaacgagttaagcgctgggggttcgggatggatgaagccctgaaggaccccgtgggccgagaacaattcctgaaattcctagagtccgaattctcttccgaaaatctccgtttttggctcgcagtcgaggatctgaagaaacgtccaatcaaagaagtgccgagcagggtgcaggagatttggcaggagttcctagctccaggggctccttcagcaataaacctcgacagcaagtcctacgataagacaacccaaaacgttaaagaaccaggacgatacactttcgaggacgctcaggaacacatctacaaactcatgaaatccgattcctaccccagatttatcaggtcaagtgcctatcaggagctgctgcaggccaagaagaaatctggcaatagtatggaccgtaggacgagctttgaaaaatttgcgcagaatgtagggagaaacattccaatttttccctgccataaaaattgcacccctactcttcgcgcatcaaccaaccttctttag

SEQ ID NO: 284430 - DNA, 1686 bp, Artificial Sequence
  derived and/or modified sequence
caagcagaagcacaagcaaaagtggacaagaagagagacaagattgaaaggaagatccttgacagccaagagagagcgttctgggacgtgcacaggcccgtgcctggatgtgtaaatacaactgaagtggacattaagaagtcatccagaatgagaaacccccacaaaacacggaagtctgtctatggtttacaaaatgatattagaagtcacagtcctacccacacacccacaccagaaactaaacctccaacagaagatgagttacaacaacagataaaatattggcaaatacagttagatagacatcggttaaaaatgtcaaaagtcgctgacagtctactaagttacacggaacagtatttagaatacgacccgtttcttttgccacctgacccttctaacccatggctgtccgatgacaccactttctgggaacttgaggcaagcaaagaaccgagccagcagagggtaaaacgatggggttttggcatggacgaggcattgaaagacccagttgggagagaacagttccttaaatttctagagtcagaattcagctcggaaaatttaagattctggctggcagtggaggacctgaaaaagaggcctattaaagaagtaccctcaagagttcaggaaatatggcaagagtttctggctcccggagcccccagtgctattaacttggattccaagagttatgacaaaaccacacagaacgtgaaggaacctggacgatacacatttgaagatgctcaggagcacatttacaaactgatgaaaagtgattcatacccacgttttataagatccagtgcctatcaggagcttctacaggcaaagaaaaagtctggaaactcaatggatcgcagaacatcttttgaaaaatttgcacagaatgtgggcagaaacatccctattttcccatgccataaaaactgtacaccaacactgagggccagcactaacctgttatgaaaagaggggaaatctctcacgtccaagaggttaacaagccttgctcagtcttactaaacggatcatcttgtagcatgaatgcagactggagtcactgcacacactttgtagctcaatgttgtgacctggagcagaggacattagaacaagatgttgcatgagcaaaggacctaaattgttatttttgtgtgtacattccatctccaatggactcttccgtctcaatgcctccattccaaactgttgtctgctttctttctccttctactatgctggatctgtgtctcttcctttttaacaagttcaagtgaagtaaaaccttttctttttttccttctttctctctctctctctctcaaagcttcagttagacacacagttcactgaaaattcagtcagtcaaaaactggaagaactgtaaaagaaaaaagtatatatcaataagtatacatgtggcttcacatttattaaacaataaattccgcacagaaagtttcatttcaccaatgtgtcacagtcagaaacaaactcatgtcttcgtctgttgtctgtacattctccgttaatgtttctcgcatttatttttataccatatttaaagaagaaacaccttttactccaaatgtattaaagttgatcccttctctgtaaatttgtgtatgtttatattgttgttttatctttcattaaaagatgcagaatctc

SEQ ID NO: 284431 - DNA, 981 bp, Artificial Sequence
  derived and/or modified sequence
caggccgaggcccaggccaaggtggacaagaagagagacaagatcgagagaaagatcctggacagccaggagagagccttctgggacgtgcacagacccgtgcccggctgcgtgaacaccaccgaggtggacatcaagaagagcagcagaatgagaaacccccacaagaccagaaagagcgtgtacggcctgcagaacgacatcagaagccacagccccacccacacccccacccccgagaccaagccccccaccgaggacgagctgcagcagcagatcaagtactggcagatccagctggacagacacagactgaagatgagcaaggtggccgacagcctgctgagctacaccgagcagtacctggagtacgaccccttcctgctgccccccgaccccagcaacccctggctgagcgacgacaccaccttctgggagctggaggccagcaaggagcccagccagcagagagtgaagagatggggcttcggcatggacgaggccctgaaggaccccgtgggcagagagcagttcctgaagttcctggagagcgagttcagcagcgagaacctgagattctggctggccgtggaggacctgaagaagagacccatcaaggaggtgcccagcagagtgcaggagatctggcaggagttcctggcccccggcgcccccagcgccatcaacctggacagcaagagctacgacaagaccacccagaacgtgaaggagcccggcagatacaccttcgaggacgcccaggagcacatctacaagctgatgaagagcgacagctaccccagattcatcagaagcagcgcctaccaggagctgctgcaggccaagaagaagagcggcaacagcatggacagaagaaccagcttcgagaagttcgcccagaacgtgggcagaaacatccccatcttcccctgccacaagaactgcacccccaccctgagagccagcaccaacctgctgtag

SEQ ID NO: 284432 - protein, 168 aa, Artificial Sequence
  derived and/or modified sequence
MFWKLSLSLFLVAVLVKVAEARKNRPAGAIPSPYKDGSSNNSERWQHQIKEVLASSQEALVVTERKYLKSDWCKTQPLRQTVSEEGCRSRTILNRFCYGQCNSFYIPRHVKKEEESFQSCAFCKPQRVTSVLVELECPGLDPPFRLKKIQKVKQCRCMSVNLSDSDKQ

SEQ ID NO: 284433 - DNA, 4170 bp, Artificial Sequence
  derived and/or modified sequence
aagtctccgggctcctttcacatctgcaggagcagccagcctgggaccgcgcggcgcggggcgcgctctcgcctctcctgcaccctcagccggcgcgcttctcttatgggcgtctgctgcagtctggctgcggtcgaactgaaagcggcggcgggagaccaaacttagaccccgctgtggactagagaactcagagaaggcagagggagagggagagagagagagagaagggacccgaggaggaggcttccatcacgtcattgcaggatgttctggaagctttccctgtccttgttcctggtggcggtgctggtgaaggtggcggaagcccggaagaaccggccggcgggcgccatcccctcgccttacaaggacggcagcagcaacaactcggagagatggcagcaccagatcaaggaggtgctggcctccagccaggaggccctggtggtcaccgagcgcaagtacctcaagagtgactggtgcaagacgcagccgctgcggcagacggtgagcgaggagggctgccggagccgcaccatcctcaaccgcttctgctacggccagtgcaactccttctacatcccgcggcacgtgaagaaggaggaggagtccttccagtcctgcgccttctgcaagccccagcgcgtcacctccgtcctcgtggagctcgagtgccccggcctggacccacccttccgactcaagaaaatccagaaggtgaagcagtgccggtgcatgtccgtgaacctgagcgactcggacaagcagtgagcgccgggccggacgcagctcagccccgcgcgcgcccggccgctgggtggcgccgccgccgcctctgtccctgccctccgagcccactgtcacgctgcctggtgttccccctcagcagcaagcacttctcttagggctgacggtgtccttgtcacagacgtggatcgcaagtggagcttttgctgatgtgttcctgaccgaccccgggtcccacctgtgccccctaaaccaggcggtggatcaggcccgaaggaaaatgctggaaaaccaccaccgccacccagcagtcagagaggacctttcgaggtgatgcactgtaaatccggcattgatgtttccaccatgtggaaaagcaaggatttccctggccccgccctgcactccagctcgcccctttcccgcgcgaagtgaaggatgcgtcacttttctgagcggcccctcagacctctcctgctggtccctggacctctggctgggagcgctcattcttgtgactggcaggctgccctcggtcgctgctgtgatgaggatatgtgcaacctccataaatatgtcggtggacggggcgtctcctaataaacctgataccaagaagacaacttgagccacttggatcccgaagtgggcttcccgggaaacctcgagcagagcaggctacacaatcccccatcctcaagtccccaccgcctcttcttcctcactgtccccgccccctatttgtggactaaagatgaactctggtgtgcatgctattattgctgcaattagaatattatcacacacaaaggtctctatattaacgctggttttataagtgaccgtatattgtaaagagctgttaaaaagtattatagacctattcatgtattatttcacatgttttgactctggcttgcagcaccattcggagtaaggatgacagcaggcccagaaggtgtcttactcagaaaaaaaaatgcctggtcagcaattcactgtcatgcacctatttttagattgggcagggagatgggaggagtcgtgatttttactttgaatactatttcactgacgttactaagcattgcagcacaatgtagaaattggcttgggatggataggtatagggaagggcattcgttgggaaattgatgaccggaaactagaaagcccctataatgtggaatatgcatatgtggggtgaaaccgtatactactttcactgccatgacactaggcaaaaaatatttcctgttaaaagaaagagaaaaagagagggatattgaaaaatataaggagttgagtcgctttgtggtatagaagggagtaaggaataaaagatatagaatagtaatctagttgaactgttctgcacaaaacatgcttccttttcaaagaatagacttcaaaagggacgaacaaacattaggtcaccttttgtgtttataatgaattgttgacgtttccatgctgtggtctcttgatatacggaagtagacgtaacttattttccagcgaaattatatacttcttctgggctcctttgctcagttgccccaggaaggcttccctgtgagtaatgcttatggaatctgacaaatgtgaatgagctgccattggtgggaatcagtaaactttgaaaacctttcactgatgattccctggtaagtgctcctgtgaggggccacttccctagtatgtgagagagaccctctgcaagccgctgtggggacttagcttcctgatactaggtagtgatggtggatctagagacattcacttgaagagcaaggattggggtggggtgggttggtgaatctatctcaggccactgcactgcaaggtgcatttctgtcatttctgcaacaccatgagacctgagcaagaatgtgctgtggcagagggggtcttggtttcataaatgggtatatacagcctgaactcaggaggcagaaatcaaaagaaatccttgagggctggaacctgaggatagagcgaaaatggagagaagggtgttcaaggtcaggagtgatttttgcatttggtggaaaacctcaagtcagactcagtggcagaacatgcagcagaaaagctgtgaaggaaggaaatttacgtgattgtaatggaggctaggggtggattgggaggtgagtggaggagagtctctgaccagctgcagagccaacccctatcattttattaacatggaacccacacagataggggagggattaagctaagaacttacagaatgcaaacacgagcacactctcttcgaacccaattgtgggtgtagcaatgaaagcaatatgatatgctgcagtgtgaagctccttctggggttatcgtatgtacaaagtttaccttataatggctcaaattgtatttaatttttttgttttgtttataaatgaagaaaagctataagtataatgtaattattttataggtatactattaaattatagaacaaataaagataatctaggattatatgtgatcccggtgtgacgtgccataaaagtggaatttttgacttgttgcagtgagctgtgaagcagcactatgcgttcagagagtttttgttcaaccatggtgagttcaacctctagcttatgtcacatgatctcctttggggtctggaatcttctaagagaaatagaatcaggcatccaaggagcagaagtgatggaggtggccctcaatcctggtctttggaagcttccaagcctcttccacatcccctgccagctgaagacagagtattctcactgtgctggctgaaggagaaacactaaacaaggaaaccttgagaaactgcagcaatggaagtccactgttagtctctccgttagcaccagggacacacttgttctgagttttgttcattttcacatttactcctcatgagttccaacatttcttaatttaaatatttcttagtttatagcatctccatttttctattaattgacttaatctgccatttaagaaaactccgtaatcaataaaaaataaaatccacaatcaaactgcacatggttgatccactgtgtaggcttcaaaggaattaaactcaacttcctaggaaataattcatcttagtttattaaatgggacagaatatttcactgctaacgtattctaactcacttgtttttgaaattggccagatgatttttaagttataaagtcaatgaaaatgacttttgctattgtgtgaacaacttagaatgtatatattcccagaaggcttatttaatgattgacctatcaccactgattattaatgtctgcatgaatgataacaataagaccaagtcatcaataatgcaatgaaaattttttaagtgaaagcaagtttattaagaaagtaaaggaataaagaatgcctacttcataggcagagcagcctaa

SEQ ID NO: 284434 - protein, 597 aa, Artificial Sequence
  derived and/or modified sequence
MHPPKTPSGALHRKRKMAAWPFSRLWKVSDPILFQMTLIAALLPAVLGNCGPPPTLSFAAPMDITLTETRFKTGTTLKYTCLPGYVRSHSTQTLTCNSDGEWVYNTFCIYKRCRHPGELRNGQVEIKTDLSFGSQIEFSCSEGFFLIGSTTSRCEVQDRGVGWSHPLPQCEIVKCKPPPDIRNGRHSGEENFYAYGFSVTYSCDPRFSLLGHASISCTVENETIGVWRPSPPTCEKITCRKPDVSHGEMVSGFGPIYNYKDTIVFKCQKGFVLRGSSVIHCDADSKWNPSPPACEPNSCINLPDIPHASWETYPRPTKEDVYVVGTVLRYRCHPGYKPTTDEPTTVICQKNLRWTPYQGCEALCCPEPKLNNGEITQHRKSRPANHCVYFYGDEISFSCHETSRFSAICQGDGTWSPRTPSCGDICNFPPKIAHGHYKQSSSYSFFKEEIIYECDKGYILVGQAKLSCSYSHWSAPAPQCKALCRKPELVNGRLSVDKDQYVEPENVTIQCDSGYGVVGPQSITCSGNRTWYPEVPKCEWETPEGCEQVLTGKRLMQCLPNPEDVKMALEVYKLSLEIEQLELQRDSARQSTLDKEL

SEQ ID NO: 284435 - protein, 152 aa, Artificial Sequence
  derived and/or modified sequence
MHPPKTPSGALHRKRKMAAWPFSRLWKVSDPILFQMTLIAALLPAVLGNCGPPPTLSFAAPMDITLTETRFKTGTTLKYTCLPGYVRSHSTQTLTCNSDGEWVYNTFCIYKRCRHPGELRNGQVEIKTDLSFGSQIEFSCSEGFFLIGSTTS

SEQ ID NO: 284436 - DNA, 1794 bp, Artificial Sequence
  derived and/or modified sequence
atgcacccccctaagaccccctctggagctcttcacagaaaacggaagatggccgcttggccgttttctcgactctggaaggttagtgatccgattctttttcagatgaccctgattgctgcgctacttcccgcggtactagggaactgcggcccacccccgacattaagcttcgctgcacctatggatattaccctaaccgagacacggttcaaaacaggcaccactcttaagtatacttgcctgccgggatacgtgcgaagtcacagcacgcagacacttacctgtaatagcgatggggaatgggtttacaataccttttgtatttacaagaggtgtaggcacccaggcgaattacggaatgggcaggttgaaattaagaccgatctttctttcggttctcagatcgaattcagttgctccgaaggcttcttcctgatcgggtccactaccagcagatgtgaagtgcaagaccgcggagttggatggtctcaccccctccctcagtgcgaaatcgtgaagtgcaaaccgccgcccgatatacgtaatggacgccactccggcgaggaaaatttttatgcttatggctttagcgttacatattcctgcgacccaaggttctccctcctgggtcatgcctcaattagttgtaccgtagagaacgaaactatcggcgtgtggaggccctcacctcctacttgcgagaagataacctgccgaaaacccgacgtgtctcacggtgagatggtgtctggtttcggacctatttataattacaaagatacgatcgtgtttaaatgccagaaagggttcgtgctgcgtggctcttccgttatccactgtgacgctgattccaaatggaacccatcaccaccagcatgtgagcctaacagttgcataaacctcccagacattccacatgcgtcctgggaaacataccccagaccaaccaaggaagatgtttatgtggtgggcactgtcctgcgttatagatgtcaccctggatataagcctacgacggacgaaccgaccactgttatctgtcaaaagaatctcaggtggaccccttatcagggctgcgaggcactgtgttgccctgagcccaaactcaacaacggagagatcacacaacatagaaaatcccggcccgctaaccactgtgtttacttttatggagacgagatttctttcagttgtcacgagacgtcccgtttttccgccatttgccagggagatggtacctggagcccaaggacaccaagttgcggagatatttgcaacttcccccccaagatagcccacggacattacaagcagtcctcatcctactcgtttttcaaggaggagattatttatgaatgtgacaaagggtacattctcgttgggcaagctaaattgtcttgttcttactcgcactggagtgccccggccccccagtgtaaagcgctgtgcagaaaacctgaattggtaaatgggcggcttagcgtggacaaagaccagtatgtggagcctgagaacgttactatccagtgtgactcaggctacggagtggtcggcccgcagagcatcacatgtagtggcaatagaacatggtacccggaggtgccaaagtgcgagtgggaaaccccagaaggctgcgaacaggtactcaccggcaagaggctgatgcaatgtctgcctaatccggaggacgtgaagatggctctggaagtgtacaagttatcactcgagatcgaacagctggagctgcagcgggattctgctcggcagagcacactggataaggaactgtag

SEQ ID NO: 284437 - DNA, 459 bp, Artificial Sequence
  derived and/or modified sequence
atgcaccctccaaagacaccatcaggagcgctccaccgaaaaagaaaaatggctgcttggccattttctcggttgtggaaggtgagcgacccaatactctttcagatgaccctgatcgcagcactgttgccagcagtcttagggaattgtggcccacccccaacactgtcttttgccgcccctatggacataacactgactgagacccgattcaagaccggcaccacccttaaatacacatgtctccctggatacgtacgatcacacagtacacaaacactgacatgcaattcggatggtgagtgggtgtacaataccttttgcatatacaaacgatgtcgccatcccggtgagctgcgaaacggccaagttgaaatcaaaaccgatttgtcattcggttcgcagatagagttctcatgtagtgaaggtttcttcttaatcgggtccactactagttag

SEQ ID NO: 284438 - DNA, 1794 bp, Artificial Sequence
  derived and/or modified sequence
atgcacccccccaagacccccagcggggccctgcacaggaagaggaagatggccgcctggcccttcagccggctgtggaaggtgtctgaccccatcctcttccagatgaccctgattgctgccctgctgcctgctgtgctgggcaactgtggccccccacccaccctgagctttgctgcccccatggacatcaccctgacagagacccgcttcaagacaggcaccaccctgaagtacacctgcctgcccggctacgtgcgcagccacagcacccagaccctgacctgcaacagtgatggagagtgggtgtacaacaccttctgcatctacaagcgctgccgccaccctggagagctgagaaatggccaggtggagatcaagacagacctgagctttggcagccagatcgagttcagctgcagcgagggcttcttcctgattggcagcaccaccagccgctgtgaggtgcaggaccggggcgtgggctggagccaccccctgccccagtgtgagatcgtgaagtgcaagcccccaccagacatcagaaatggccgccacagcggggaggagaacttctacgcctacggcttctctgtgacctacagctgtgacccccgcttcagcctgctgggccacgccagcatcagctgcaccgtggagaatgagaccatcggcgtgtggaggcccagcccccccacctgtgagaagatcacctgcaggaagccagatgtgagccacggggagatggtgtctggcttcggccccatctacaactacaaggacaccatcgtgttcaagtgccagaagggctttgtgctgcggggcagcagcgtcatccactgtgatgctgacagcaagtggaaccccagccccccagcctgtgagcccaacagctgcatcaacctgcctgacatcccccacgcctcctgggagacctacccccggcccaccaaggaggatgtgtatgtggtgggcaccgtgctgcgctaccgctgccaccctggctacaagcccaccacagatgagcccaccaccgtcatctgccagaagaacctgcgctggaccccctaccagggctgtgaggccctgtgctgcccagagcccaagctgaacaacggggagatcacccagcacaggaagagcaggcctgccaaccactgtgtgtacttctatggagatgagatctccttcagctgccacgagaccagccgcttcagcgccatctgccagggagatggcacctggagccccaggacccccagctgtggggacatctgcaacttcccccccaagatcgcccacggccactacaagcagagcagcagctacagcttcttcaaggaggagatcatctatgaatgtgacaagggctacatcctggtgggccaggccaagctgagctgcagctacagccactggagcgccccagccccccagtgcaaggccctgtgcaggaagccagagctggtgaatggccgcctgtctgtggacaaggaccagtatgtggagccagaaaatgtgaccatccagtgtgacagcggctatggagtggtgggcccccagagcatcacctgcagcggcaacagaacctggtacccagaggtgcccaagtgtgagtgggagaccccagagggctgtgagcaggtgctgaccgggaagaggctgatgcagtgcctgcccaacccagaagatgtgaagatggccctggaggtgtacaagctgagcctggagattgagcagctggagctgcagagggacagcgcccggcagagcaccctggacaaggagctgtag

SEQ ID NO: 284439 - DNA, 459 bp, Artificial Sequence
  derived and/or modified sequence
atgcacccccccaagacccccagcggggccctgcacaggaagaggaagatggccgcctggcccttcagccggctgtggaaggtgtctgaccccatcctcttccagatgaccctgattgctgccctgctgcctgctgtgctgggcaactgtggccccccacccaccctgagctttgctgcccccatggacatcaccctgacagagacccgcttcaagacaggcaccaccctgaagtacacctgcctgcccggctacgtgcgcagccacagcacccagaccctgacctgcaacagtgatggagagtgggtgtacaacaccttctgcatctacaagcgctgccgccaccctggagagctgagaaatggccaggtggagatcaagacagacctgagctttggcagccagatcgagttcagctgcagcgagggcttcttcctgattggcagcaccaccagctag

SEQ ID NO: 284440 - DNA, 1794 bp, Artificial Sequence
  derived and/or modified sequence
atgcacccccccaagacccccagcggcgccctgcaccggaagcggaagatggctgcctggcccttcagtcggctctggaaggtgtccgatcccatcctgttccagatgacattaatcgctgccttgctccccgctgttctcggcaattgtggccccccacctacccttagctttgctgcccccatggatataacactgactgagacccgctttaagacaggaaccaccttaaagtacacttgtctgcccggctacgtgcgcagtcattcaacccagactctcacctgtaactctgatggagaatgggtttacaacacgttctgtatctataagcgctgcagacatcccggagagcttagaaacggccaggtcgagatcaaaacagacctgtccttcggatctcagatagaattttcatgttcggagggcttcttcctgataggcagtacaacgtctcgttgcgaggtgcaggacagaggagtcggctggtcccaccctctcccacagtgtgagattgttaagtgcaaaccccccccagatatccgaaacggccgtcactcaggcgaggaaaatttctatgcatatgggttttctgtgacatactcttgcgaccctaggttctcattgctgggacacgcctctatatcctgcactgtcgaaaacgagacaattggtgtctggcggcctagcccaccaacgtgtgagaaaataacgtgtcggaagccagacgtgagccacggggagatggtgtccggctttggaccaatttacaattataaagatacaatcgtgttcaagtgtcagaaggggtttgtgcttagagggtcatctgtgatccactgcgatgcagactcaaaatggaacccttcacctcctgcatgtgagcctaattcctgcatcaatttaccggatatacctcatgcctcttgggaaacgtaccccagacctacgaaagaggatgtttacgtggtaggcacggtgctgcgctaccggtgtcacccaggttacaaaccaacaaccgacgagcctaccactgttatttgtcaaaagaacctcaggtggaccccataccagggctgtgaggccctttgctgcccagagcccaaactcaacaatggagaaataacgcagcatagaaaatcccgacctgcaaaccactgtgtgtacttttacggtgacgagatttctttctcatgtcacgagacctcgcgattctccgctatctgccagggcgatggaacttggtcccctcggacccctagctgcggggacatttgcaactttcccccaaaaattgctcacggtcactacaaacagtcgtcatcctatagcttcttcaaagaagaaattatttacgagtgcgataaagggtatattcttgtaggtcaggctaagctcagttgcagctattcccactggtctgcccccgcgccccaatgtaaggcactgtgtcgaaagccggagctcgtaaatggccgtctgtccgtggacaaggaccagtatgtggagccagagaatgttaccattcagtgcgactcagggtacggtgtcgtgggtccccaatctattacctgttccggcaataggacctggtaccccgaagtgcccaagtgcgagtgggaaacccctgaagggtgcgaacaggtccttaccggtaaaaggctgatgcaatgcctaccaaaccctgaggacgtaaagatggcccttgaggtgtataaactaagcttggaaatcgaacagctggagctgcagagagacagcgctcgacaaagcacccttgataaagaactatag

SEQ ID NO: 284441 - DNA, 459 bp, Artificial Sequence
  derived and/or modified sequence
atgcacccccccaagacccccagcggcgccctgcaccggaagcggaagatggctgcctggcccttttctcggctgtggaaagtgagcgaccctattctgttccagatgaccctgatcgccgctctgctcccagcagtattgggcaattgcgggcccccccctactctatcctttgccgctccgatggatatcactctaactgagacacgattcaagaccggaacgacactgaagtacacctgtctgcctgggtacgtgaggtcccatagcactcaaaccctcacctgcaattcagacggtgagtgggtatataatacattctgtatatacaagagatgcagacatcccggtgaattgcgcaacggtcaggtggaaattaagactgatttgagtttcggttcgcagatagagttttcgtgttccgaaggtttctttctcatcggcagcactacctcatag

SEQ ID NO: 284442 - DNA, 1794 bp, Artificial Sequence
  derived and/or modified sequence
atgcatcctcctaaaactccgtccggcgctctacacagaaaaagaaagatggccgcttggccttttagccgtttgtggaaggtcagtgatccaattttatttcaaatgacactgatcgccgcattactgccggctgtccttggcaattgtggccctcccccaaccctctccttcgcagcgccaatggacatcaccctaacagagacccgtttcaaaaccgggactactttgaaatatacttgcctgcccggttatgtccggtcccacagcacgcagaccctgacctgtaacagcgacggagagtgggtgtataataccttctgcatttacaagaggtgcagacaccctggcgagctgaggaacgggcaagttgaaatcaaaacggatttatcattcggtagccaaatcgagttctcctgcagtgagggattcttcctgattggatcaactacgtctcgatgcgaggtacaagacaggggtgttgggtggtcgcatcccctacctcagtgcgaaatagtgaaatgtaaaccacctcctgacatcagaaacggcaggcattctggggaagaaaacttctacgcctatggtttcagtgttacctactcctgtgaccccaggttctctctactggggcacgcaagcatcagttgcaccgtggaaaacgaaactatcggcgtatggaggccttcaccccctacttgcgaaaagatcacgtgtagaaaaccggatgtgtctcacggggagatggtgtcaggcttcggccctatttataactataaggataccattgtctttaaatgtcagaagggttttgtgttaaggggaagttccgtgattcactgcgacgcagactctaagtggaatccatccccacctgcctgtgaacctaacagctgcattaatctcccagatattcctcacgcgtcttgggaaacatacccaaggcctacgaaagaggatgtgtatgttgtcggaactgttctccgttaccggtgtcatccaggctacaagcccaccaccgatgagcctactaccgtaatttgccagaagaatctgaggtggaccccatatcaagggtgcgaagccttatgttgcccagaacccaaactgaacaatggagagatcactcagcatcgcaagtcgagacccgcaaaccattgcgtgtatttctatggcgacgaaatttctttctcttgccatgagaccagccgcttctcagctatatgccagggcgacgggacttggtcgcccaggacccccagctgcggcgatatttgtaactttccacccaagattgcacacggtcattataaacagagtagcagctacagcttcttcaaagaggaaatcatctatgaatgcgataaggggtacatcctggtcggccaagccaagttgtcctgcagttattcccattggtctgcgcctgctcctcaatgcaaagctctgtgcaggaaacctgagctcgtgaatgggaggctcagcgtggacaaagatcaatacgtcgagccggagaacgtcacaatccagtgcgattctggatatggggtggttgggccacaaagcattacctgttcagggaataggacctggtaccctgaagtcccaaaatgcgagtgggagacaccagaaggctgtgagcaggtcctgactgggaagagactgatgcagtgtctccccaatccggaggacgtcaaaatggccctggaggtgtataagttgtcgctggagattgagcagttggagctgcagagagatagcgcccgacagagcacacttgacaaagagctgtag

SEQ ID NO: 284443 - DNA, 459 bp, Artificial Sequence
  derived and/or modified sequence
atgcacccgcctaagacccccagcggagccctgcatcgcaagcgcaagatggccgcttggcctttcagcaggctttggaaagtgtccgatccgatcttattccagatgaccctgatcgccgctctgctgcctgcagtgctgggaaactgtggtccccctccaactctcagttttgccgctccaatggacataactttaaccgagacccgctttaaaacaggcaccactctaaagtatacctgcttgcctggatatgtccgatcccactccacccagacattaacctgtaactctgacggcgaatgggtgtacaacactttttgcatctacaaacggtgccggcacccaggcgaattgagaaacggacaagttgagatcaaaacagacctgagtttcggaagccagatagaatttagctgttccgaaggcttctttcttatcggtagcactacaagctag

SEQ ID NO: 284444 - DNA, 2243 bp, Artificial Sequence
  derived and/or modified sequence
tgaaattcagggactctttggtggagcaattaccagtcaacttcagggtattatgataaactctgatctggggaggaaccaggactacatagatcaaggcagttttcttctttgagaaactatcccagatatcatcatagagtcttctgctcttcctcaactaccaaagaaaaacatcagcgaagcagcaggccatgcaccccccaaaaactccatctggggctcttcatagaaaaaggaaaatggcagcctggcccttctccaggctgtggaaagtctctgatccaattctcttccaaatgaccttgatcgctgctctgttgcctgctgttcttggcaattgtggtcctccacccactttatcatttgctgccccgatggatattacgttgactgagacacgcttcaaaactggaactactctgaaatacacctgcctccctggctacgtcagatcccattcaactcagacgcttacctgtaattctgatggcgaatgggtgtataacaccttctgtatctacaaacgatgcagacacccaggagagttacgtaatgggcaagtagagattaagacagatttatcttttggatcacaaatagaattcagctgttcagaaggatttttcttaattggctcaaccactagtcgttgtgaagtccaagatagaggagttggctggagtcatcctctcccacaatgtgaaattgtcaagtgtaagcctcctccagacatcaggaatggaaggcacagcggtgaagaaaatttctacgcatacggcttttctgtcacctacagctgtgacccccgcttctcactcttgggccatgcctccatttcttgcactgtggagaatgaaacaataggtgtttggagaccaagccctcctacctgtgaaaaaatcacctgtcgcaagccagatgtttcacatggggaaatggtctctggatttggacccatctataattacaaagacactattgtgtttaagtgccaaaaaggttttgttctcagaggcagcagtgtaattcattgtgatgctgatagcaaatggaatccttctcctcctgcttgtgagcccaatagttgtattaatttaccagacattccacatgcttcctgggaaacatatcctaggccgacaaaagaggatgtgtatgttgttgggactgtgttaaggtaccgctgtcatcctggctacaaacccactacagatgagcctacgactgtgatttgtcagaaaaatttgagatggaccccataccaaggatgtgaggcgttatgttgccctgaaccaaagctaaataatggtgaaatcactcaacacaggaaaagtcgtcctgccaatcactgtgtttatttctatggagatgagatttcattttcatgtcatgagaccagtaggttttcagctatatgccaaggagatggcacgtggagtccccgaacaccatcatgtggagacatttgcaattttcctcctaaaattgcccatgggcattataaacaatctagttcatacagctttttcaaagaagagattatatatgaatgtgataaaggctacattctggtcggacaggcgaaactctcctgcagttattcacactggtcagctccagcccctcaatgtaaagctctgtgtcggaaaccagaattagtgaatggaaggttgtctgtggataaggatcagtatgttgagcctgaaaatgtcaccatccaatgtgattctggctatggtgtggttggtccccaaagtatcacttgctctgggaacagaacctggtacccagaggtgcccaagtgtgagtgggagacccccgaaggctgtgaacaagtgctcacaggcaaaagactcatgcagtgtctcccaaacccagaggatgtgaaaatggccctggaggtatataagctgtctctggaaattgaacaactggaactacagagagacagcgcaagacaatccactttggataaagaactataatttttctcaaaagaaggaggaaaaggtgtcttgctggcttgcctcttgcaattcaatacagatcagtttagcaaatctactgtcaatttggcagtgatattcatcataataaatatctagaaatgataatttgctaaagtttagtgctttgagattgtgaaattattaatcatcctctgtgtggctcatgtttttgcttttcaacacacaaagcacaaattttttttcgattaaaaatgtatgtataaaaaacta

SEQ ID NO: 284445 - DNA, 708 bp, Artificial Sequence
  derived and/or modified sequence
agggtattatgataaactctgatctggggaggaaccaggactacatagatcaaggcagttttcttctttgagaaactatcccagatatcatcatagagtcttctgctcttcctcaactaccaaaggctgtcatttccttgaagacatggatcccataacatttattctagtgctttatgacaagttggaattcaatgactatttattaaattgagttctttcagcagaaaaacatcagcgaagcagcaggccatgcaccccccaaaaactccatctggggctcttcatagaaaaaggaaaatggcagcctggcccttctccaggctgtggaaagtctctgatccaattctcttccaaatgaccttgatcgctgctctgttgcctgctgttcttggcaattgtggtcctccacccactttatcatttgctgccccgatggatattacgttgactgagacacgcttcaaaactggaactactctgaaatacacctgcctccctggctacgtcagatcccattcaactcagacgcttacctgtaattctgatggcgaatgggtgtataacaccttctgtatctacaaacgatgcagacacccaggagagttacgtaatgggcaagtagagattaagacagatttatcttttggatcacaaatagaattcagctgttcagaaggatttttcttaattggctcaaccactagt

SEQ ID NO: 284446 - DNA, 1794 bp, Artificial Sequence
  derived and/or modified sequence
atgcacccccccaagacccccagcggcgccctgcacagaaagagaaagatggccgcctggcccttcagcagactgtggaaggtgagcgaccccatcctgttccagatgaccctgatcgccgccctgctgcccgccgtgctgggcaactgcggccccccccccaccctgagcttcgccgcccccatggacatcaccctgaccgagaccagattcaagaccggcaccaccctgaagtacacctgcctgcccggctacgtgagaagccacagcacccagaccctgacctgcaacagcgacggcgagtgggtgtacaacaccttctgcatctacaagagatgcagacaccccggcgagctgagaaacggccaggtggagatcaagaccgacctgagcttcggcagccagatcgagttcagctgcagcgagggcttcttcctgatcggcagcaccaccagcagatgcgaggtgcaggacagaggcgtgggctggagccaccccctgccccagtgcgagatcgtgaagtgcaagcccccccccgacatcagaaacggcagacacagcggcgaggagaacttctacgcctacggcttcagcgtgacctacagctgcgaccccagattcagcctgctgggccacgccagcatcagctgcaccgtggagaacgagaccatcggcgtgtggagacccagcccccccacctgcgagaagatcacctgcagaaagcccgacgtgagccacggcgagatggtgagcggcttcggccccatctacaactacaaggacaccatcgtgttcaagtgccagaagggcttcgtgctgagaggcagcagcgtgatccactgcgacgccgacagcaagtggaaccccagcccccccgcctgcgagcccaacagctgcatcaacctgcccgacatcccccacgccagctgggagacctaccccagacccaccaaggaggacgtgtacgtggtgggcaccgtgctgagatacagatgccaccccggctacaagcccaccaccgacgagcccaccaccgtgatctgccagaagaacctgagatggaccccctaccagggctgcgaggccctgtgctgccccgagcccaagctgaacaacggcgagatcacccagcacagaaagagcagacccgccaaccactgcgtgtacttctacggcgacgagatcagcttcagctgccacgagaccagcagattcagcgccatctgccagggcgacggcacctggagccccagaacccccagctgcggcgacatctgcaacttcccccccaagatcgcccacggccactacaagcagagcagcagctacagcttcttcaaggaggagatcatctacgagtgcgacaagggctacatcctggtgggccaggccaagctgagctgcagctacagccactggagcgcccccgccccccagtgcaaggccctgtgcagaaagcccgagctggtgaacggcagactgagcgtggacaaggaccagtacgtggagcccgagaacgtgaccatccagtgcgacagcggctacggcgtggtgggcccccagagcatcacctgcagcggcaacagaacctggtaccccgaggtgcccaagtgcgagtgggagacccccgagggctgcgagcaggtgctgaccggcaagagactgatgcagtgcctgcccaaccccgaggacgtgaagatggccctggaggtgtacaagctgagcctggagatcgagcagctggagctgcagagagacagcgccagacagagcaccctggacaaggagctgtag

SEQ ID NO: 284447 - DNA, 459 bp, Artificial Sequence
  derived and/or modified sequence
atgcacccccccaagacccccagcggcgccctgcacagaaagagaaagatggccgcctggcccttcagcagactgtggaaggtgagcgaccccatcctgttccagatgaccctgatcgccgccctgctgcccgccgtgctgggcaactgcggccccccccccaccctgagcttcgccgcccccatggacatcaccctgaccgagaccagattcaagaccggcaccaccctgaagtacacctgcctgcccggctacgtgagaagccacagcacccagaccctgacctgcaacagcgacggcgagtgggtgtacaacaccttctgcatctacaagagatgcagacaccccggcgagctgagaaacggccaggtggagatcaagaccgacctgagcttcggcagccagatcgagttcagctgcagcgagggcttcttcctgatcggcagcaccaccagctag

SEQ ID NO: 284448 - protein, 218 aa, Artificial Sequence
  derived and/or modified sequence
MVAWRVSASDEHCPELPPVDNSIFVAKEVEGQILGTYVCIKGYHLVGKKTLFCNASKEWDNTTTECRLGHCPDPVLVNGEFSSSGPVNVSDKITFMCNDHYILKGSNRSQCLEDHTWAPPFPICKSIPQTRPLPFQPCSPLFLFLLRQSLALFPRLECSGRILAHCNLHLPGSSSSHASASQVAGITGAHPRWANFCIFSRDWVSPCWPGWSQIPDLR

SEQ ID NO: 284449 - DNA, 2698 bp, Artificial Sequence
  derived and/or modified sequence
aattttagctgggattatgctgtgattatgtttggcttaacagtaatgaaaataagtttaggctgggtgcggtggctcatgcctgtaatcccagcactttaggaggctgaggcaagcggatcacctgaggtcaggggttcgagacaagcctgaccaagatggagaaaccccgtctctaccaaaaatacaaaattagccgggtgtggtggcgtctgcctgtaatcccagctactggggaagcggaggacaatcgcttgaacccagaaggcagaggttgtggtgagccgagatctcgccattgcactccagcctggacaacaacagcgaaacttcatctcaaaacaataataagtttacaacctctgaatatgtaccaaatggagccaggggtggggagtattaggacaagccccgcactgcagagccccccagctctcactcgtggaccaagtgcatgggacacagccattcggaaagctctttcttttggagtgggtctgggtgttctggttttggtttgcttgttttatcattttgtgacattggcgcctattcttcagtttgcatccctgccttgcttgcttgaagctggagcacaaatgtcccgtcaccctgtaacaacacaagtatgcgtcatgcctgcgaggcttagcttgggaagtggaatctccaggaatctccttcggttgtctgtctgccactttacactgttgctcccatttcggtcactgaggccctgtcccttatcctccagggacatggtgctgtcctatgagctctggctcctttgtgacttttacattgctcctccagatagcagtggcagtggcatttgcaaaaaggctatttgagaacaaataagaaaaaatcttcaaagcgaagatgatagtaaaacagccctcatttttcaaagtccattcttttttctggtccgtgcactgccagctcacttctctggctaaaacccgggggcggcgggggtgtgtgtgggggttagttttgcaaaaagtactgatggcaccgctgtgctccaagttaaccagaacacaagaatcgaaaaagcctgtgagatactggtgctcgtgatcgtaagctccaggtcggggggttttcagatgaacacaaaaagggggctgctcccgtcccaagatgagtgataaatgagtcacttctcatactcgcactcacactcgctccatttcctctgggatgactgtcttccgtcctaccgctgtggctgctgttatttgcctgataaacttctttccctctccctccctctgacacagaaacacacacacacacacacacagacacacacacacacacacagcccgctggatctataagcagtttgtaacaggatgcaccagttctaatcacgtttcaagtcaaatgaaccagtcgcagcttcctaataagtgaatggctgacataaggagttaattcagaagcagctcaatactatggacaatactagtggacaatattagcatactgctcgtacaacaaagataccgtagtctctggtgctgcctcttcaggacgaatttgctgaaagtgagttgtaattagagatgttaaaaaaaacattggctgcgcgcgatggcttactcctgtaatcccagcacttttggaggcgaggcaggtggatgacctgaggttaggagttcgagaccagcctggctaacatggcgaaaccccatctctactaaaaatacaaaaaattagccaggcatcgtggtgggcacctgtaatctcagctacttgggaggctgaggccgaagaatttcttgaacctgggaggtggaggttgcagtgacccgagatcatgccattgcactccagcctgggcaacaagagtgaaattgtgtctcaaataataataataataataataaactgagatttatcattcctcctctctccttttccttgagaacttaataaaaatggaaaatatccattacttcttgggctcttgatgatctcaaactgttaagctggaatggaggatagatgtggtcggtaaacactgaaatcaagaaccttaagtgggccagggccctgctgagcaaagcaatgggtccagattgcccctaacatgcttttccattggaaggagctgctataaactccgaggctcccgggccctgctggagactctgggctggaatcctctgtgatatcctccacagtcgcccattgtatagctttccttggggattcctcagagtggcttccaaccttcccactggcagagtcccctttacccactcccacccctgccatggtccccatttttgtttttgtttttatttttgagacagagtcttgctctgtcctccaggctggagtgcagtggtgcaatcatagctcagtgcagcctccacctcccgggctcaagtgatcctcccacctcagcctcctgagcagctgggcactacagatgtgtgccaccaccacatttggctaatttttttgtatttttagtagagacagggtctcactatgttgcccaggctggcctcaaattcctgggcttaagtgatctgcccacctcggcctcccaaagtgctgggattacgggtgtgagccaccacacccagcacaggtcccatgttttgaagtagttttaactaatcatttggggttttcctcattttttgtagctcaaaaacaaacgcatgaaaattat

SEQ ID NO: 284450 - DNA, 288 bp, Artificial Sequence
  derived and/or modified sequence
ttcttcttcttcctgagatggagcctggccctgctgcccagagtggagtgcagcggcatgatcagcgcccactacaacctgcacctgcccggcagcagcgacagccccgccagcgccagcagagtggccggcaccaccggcgtgcaccaccacgcctggctgatcttctgcatcttcagcagagacggcgtgctgctgtgctgccccggctggagccccacccccggcctgaagagaagcagctgcctgggcttcagaaagtgctgggactacagacacgagccctag

SEQ ID NO: 284451 - DNA, 288 bp, Artificial Sequence
  derived and/or modified sequence
ttcttctttttcctccgctggtcgctagccttgctgccacgggtggagtgctctggaatgatatccgcccactacaacttgcacctgccgggatctagcgactcacctgcctccgcttctcgcgtggccggcacaacgggagtacatcatcatgcgtggctgatcttctgtattttctcaagagacggtgtgctcctgtgttgccctggctggtcccctactcccgggctcaagcgatcgtcgtgtctgggattccgtaaatgctgggactacagacacgagccttag

SEQ ID NO: 284452 - DNA, 288 bp, Artificial Sequence
  derived and/or modified sequence
tttttcttcttcttgaggtggagcctggcacttctaccaagagtagaatgcagcgggatgatttccgcccactataacctccacttgcccggctcgtccgatagtcccgcgtcagcttctagagtggccggaaccaccggggtacaccatcacgcatggcttatattctgcatattctcccgggacggcgtgctgctgtgttgtccaggctggtctcccactcccggactgaagaggagcagctgcctcgggtttagaaaatgttgggattatcgccacgagccgtag

SEQ ID NO: 284453 - DNA, 288 bp, Artificial Sequence
  derived and/or modified sequence
ttctttttctttctgcgatggtcactcgcactcttgccccgcgtcgagtgtagcggcatgatctctgcccactacaacctgcatctgcctggtagctcagacagccccgccagcgcgagtcgtgtggctgggaccactggcgttcaccaccacgcctggctgattttctgtatcttttcacgagatggggtgctgctgtgttgccctggctggtcccccacccctggtctcaagcgttccagctgtttggggttccggaagtgctgggactatcgacatgagccctag

SEQ ID NO: 284454 - DNA, 288 bp, Artificial Sequence
  derived and/or modified sequence
ttctttttttttttaagatggtcactagccttgctgcctcgcgtcgagtgctccggtatgatcagcgcccattataatctacacctgcccggctcaagtgacagtccagcttccgcctcacgtgttgcaggcacaaccggggtccatcatcacgcttggctgatcttttgcatcttctcacgggacggcgtgttgctgtgttgcccagggtggtcgcccacaccaggactaaagagatcgtcttgcctaggctttagaaaatgctgggattaccggcacgaaccatag

SEQ ID NO: 284455 - DNA, 1814 bp, Artificial Sequence
  derived and/or modified sequence
tggcctgagagtagccacttgtccgcaatcacagggacgttttatgcctgtcaagggagcttcctctctcctcttcctccccctcccaccttctgcctggcagctttgccttctctccaagagaagggtccacccaatcagaactcctcttccttttcattcctggattaaagcacttgtaatcagtaaccagaaagttccagagcgggagagaccggaaggcactggagtgctatcggacgggtgtctggggcagagccaggagggcgagcctcttctctccccgcctgcccttgctcacttccccctccatgccaggtgctgtgggagcagctgggcctggccggggtcggcgggtgaagctatccgcatggtgtctggagcaccgtttctttgcttcctggatgggctggatgggctcccgtgttcttcaccaatggcagcgttaccagcaccaatggcagcgttaccagcaagaaggcaaaggcaggagcacatcgagggtgggagccagggctgtggggtcaggagtcccgctccttgccgcgggaagcctggctcagccacctccagcacacttcggctttgtccagcataaaaggcagagcgacgttttcactgcaggctgtttcccaccagggcaagtgggacagggcgagtgctgacgtctgcaggcatggtgtgcatttaggggtgggcggcaccgagggggcatcatttggcataggcgggcccgggggccactgggctagatgactggctggttgctgggggcaggtgtcacagcctctctgagcaccctctaagtggaggacagaacattgttgggaggagtccaggcataaagtgacataaacagcgcagagaatgggaccagcgcacctgagaggtgatcattagcctcagcaactggatgggacattccgaagagctcccagccaacacagatggtcactccagaggctgacatttaaaaggaaggggcccggccgggcacagtggctcacgcctgtaatcacaacactttgggaggctgaggcgggcagatcaactggggtcaggagttcaaaaccagcctggccaacatggtgaaaccgcatctctgctgaaaatacaaaaaattagccaggcatggtggtgggcacctgtaatcccagctactcaggaggctgaggtaggaggatcgcttgaacccaggaagtagaggttgcagtgagccgagattgtgccattgcactccagcctgggcgacaagcgaaacttcgtctcaaaataaataaaagtaaggggcacagggagggggccccagctcgtgccccttctgtgtgggctgcacatggtgacttccttccagagagcacagagtgggaggtaggcaaggcgtctccacagtggagagcccgacccactgtctcagcccagaggtcaaggctggcaccatcaccgagaggtcacacgggcagatgtgacagggcgcttcaccactgggctcttcctcccagacccataacccttgtcttagtattagaaaaacactggcagaccgggcgcagtggcttacacctgtaatcgcagcattttgggaggccgaggtgggaagattgttcaagagcagtctgggcaacatggtgagaccccatctctacaaaaaaaattttttttttaattagccaggcgtgatggcacatgcctgtggtcctagccactagaggctgaggtgggaggatcactggagcccaggaggtcaaggctgcagtgagctgtgatcacaccactgcactccagccttggcgacaaaccaagaccctgtctcg

SEQ ID NO: 284456 - DNA, 288 bp, Artificial Sequence
  derived and/or modified sequence
ttcttcttcttcctgcgctggagcctggccctgctgccccgggtggagtgcagcggcatgatcagcgcccactacaacctgcacctgcccggcagcagtgacagccctgccagcgccagccgggtggccggcaccaccggggtgcaccaccacgcctggctgatcttctgcatcttcagcagagatggagtgctgctgtgctgccccggctggagccccaccccaggcctgaagaggagcagctgcctgggcttcaggaagtgctgggactacagacatgagccctag

SEQ ID NO: 284457 - DNA, 288 bp, Artificial Sequence
  derived and/or modified sequence
ttcttcttcttcctgcggtggagcctggccctgctgccccgggtggagtgttctggcatgattagtgcccactacaacctgcatcttcccgggtccagcgattctccggccagtgcctctagggtcgccggtaccacaggcgtccatcaccatgcttggctgatcttctgtatcttctcccgcgacggagtgctgctctgttgccctggttggtccccaacacccggcctaaagcggtcctcctgtctgggctttcgcaagtgctgggactaccgtcatgagccatag

SEQ ID NO: 284458 - DNA, 288 bp, Artificial Sequence
  derived and/or modified sequence
ttcttcttcttcctgcggtggagcctggccctgctgccccgggtggagtgctccgggatgatctcggcgcactacaacttgcacctccctggctccagtgactcccctgcttcggcgagcagggtcgccggaaccacaggcgtgcatcatcacgcttggctcatcttctgtatcttctcccgagacggggtgctgctttgttgtcctggctggtcccctacccctggcttgaaacgatcgagttgtctgggatttcgcaaatgctgggattaccgacacgagccatag

SEQ ID NO: 284459 - DNA, 288 bp, Artificial Sequence
  derived and/or modified sequence
ttcttcttcttcctgcggtggagcctggccctgctgccccgggtggagtgctccggaatgatttcagcccattataacctacatctgccagggtcctctgattcacctgcctcagcctctcgagtagccggaaccaccggggtgcaccatcacgcttggctgatcttttgtatattttcccgggacggtgtccttctgtgttgcccagggtggtctccaacaccgggtctgaagaggtcaagttgtctcggatttcgcaagtgctgggattatcgacacgagccttag

SEQ ID NO: 284460 - DNA, 288 bp, Artificial Sequence
  derived and/or modified sequence
ttcttcttcttcctgcggtggagcctggccctgctgccccgggtggagtgttccgggatgattagcgcccactataatctccatctgcctgggtccagcgattcacccgctagcgctagccgcgtggcaggaaccaccggggtgcatcaccacgcctggcttatcttttgcatcttttctcgggacggcgtgctgctgtgttgtcctggatggtctcctactcctggattaaaaagatcttcatgcttaggatttagaaagtgctgggactatcgtcatgagccctag

SEQ ID NO: 284461 - DNA, 288 bp, Artificial Sequence
  derived and/or modified sequence
ttcttcttttttctgcgatggtccttggcactcctgcctcgcgtggaatgctctggaatgatctctgcccattataacctccacctgcctggctcttcagatagtcccgcttctgcttccagggttgccggaacaacaggcgtccatcatcatgcgtggctgatcttctgtatcttttctcgggacggggtacttctctgttgtccaggatggagcccaactcctggcttgaagcggagcagttgcctgggctttcgcaaatgttgggattacaggcacgagccatag

SEQ ID NO: 284462 - DNA, 288 bp, Artificial Sequence
  derived and/or modified sequence
ttcttcttcttcttgcgctggtcactagctcttttgccgagggtggagtgttccggaatgattagtgcacattataatctgcatcttccgggaagtagtgactcacccgcttctgcaagccgggttgccggtactacaggggtgcatcaccatgcttggctgatcttctgcattttctctagagacggggtgctgctgtgctgtcctggctggtcacctacccccggactgaaaaggagcagttgccttgggtttcgtaaatgctgggattacaggcacgaaccgtag

SEQ ID NO: 284463 - DNA, 288 bp, Artificial Sequence
  derived and/or modified sequence
ttcttcttctttttgagatggtccctcgctctcctgccccgagtggaatgttccggcatgatttccgcccactataacctgcatctgcccggatcatccgactctcccgcatccgcctctcgcgtggcaggaacaacaggggtgcatcaccatgcctggctgattttctgtatttttagccgagatggtgtgctgctgtgttgtcccggatggtctccgactcccggtctcaagcgttcatcctgtctgggctttcgaaagtgttgggattaccgccatgagccatag

SEQ ID NO: 284464 - DNA, 288 bp, Artificial Sequence
  derived and/or modified sequence
tttttttttttcctcaggtggtctctcgctctcctcccaagggtggaatgctctggtatgatatcagcacattacaatttgcacttgcctgggagtagcgactcaccagcaagcgcctctcgggtggctggtacgactggagtacaccatcacgcatggctgatcttctgcatcttctcgagggacggggtcttactgtgctgcccagggtggtccccaactccaggactcaagagaagttcctgtttaggttttcggaaatgttgggactacaggcatgagccttag

SEQ ID NO: 284465 - DNA, 2818 bp, Artificial Sequence
  derived and/or modified sequence
cagccaccttcatgtgcctttttcctttgtctttccccaaaattccaggaccagagatctggccctggcctattttctcttgctgtgtacacacacgcacacatgctgggtggcaggatctcgcccgctggagggtggtggagcccagtagaattggggtgactgggcataaacctgctgagactgcttccttccctggttgtgagtgatgtgaatgcctgccttccccggtcagcacttagaagcccttgataggcagcatttggcgacttgtggggcaggtgtttgggataaatcctaccttcatcctaggacttatttctgcatcagccttttaactcaggcacttcaggtaacgtgatctatgtgtgttttgactgaatctcatctcctgtgtttccctgtgcagtctagggaagcatgtctccagtctttgtccctgtcttgtcccaaccattaattctcatgtcacagcttctcactgcatgtgacaagagccaggcctatctgctagggccctgcggctgaggtctgacctggaccctcatgcccgagtcggaagacccctctccagaagccattctgcatccttgtctgctctgcgtcacccgagaacacaggcttcgcagcctcgctttctgaaatggtgtgtgccgagtcagattgccgctcagagaaaatacaagcccgttttccctagctgtgccatttggtgctctgccaggctgccgtgcaagggaataccgacgagacgagctgcactgtctctgatttggagccctcaccggagcttgtctttaaaaatgagcaggaagctcatgtatgtttgcatttcagtgagccgggtcctgacctgccgccacccatcacggtcagcgtggtgcatcttaccgaggaggcgcaggcctggattcttttgagtggtgctactgcctaggaagtaacacgtggagaatttccatcttgggaccatgcacacagtgccttggggagtagattttgccctaatagcgatgaagaattttatcagtcagtggagttcctttttcagatcagggatgggaaagagccaaactgggtacctcccacgtgtgccccgtgaacagccctttgcagctgggctgtggggcttggctgctgccctgtcccatctggcagttaacgccttctccctgctctgccccccactccccaaaaccagttgcagcctcaacccacatggggatgtagaaagccgtaaagtccacgctactgttgaaaatgtttacatctccgctctcaacctgccttgggttcgtgttaaatggtgttaaattctgcaaatggaggggaaaaaaatcaaattctaaatttcaaagtagaatttaaagcaaatttgtaaaaaaattatcctaccaccccttttggtccacttaagatatgccacgctgaagcaaggtatttcctactggattttgctttcactggtgtttagaaaataaacttgatttctctaggagcactcctttggttagagggatgcaagaaggagaggtgaaggtggcgtgtggtggctcatgcctgtaatcccagcactttggggaggccgaggcaggcggatcacttgaggccagcagtttgagaccagcctggccaacatgatgaaaccccatctctactaaaaatacaaaaaattagctgggcatggtggcaggcacctgtaatcccagttacttgggaggctgaggcaggagaattgcttgaacccaggaggtggaggttgcagtgagctgagattgtgccactgcacttcagcctgggcgacagagtgactctgtcaaaaaggaaaggcaaaaaccggaccctggagctctgtgggccctgattgcaggcccctccctgtgtgatgagggatgagtcagcttggggagccacttggccagcctgcatgcctggtcatcaggaggttgagaaaagccttgaaagttgtgaagcactgagcagatacaagtgtttgttaattttgtagaaattaactttcccatctggcctttatctccaaagttggtattgttgctccacgcagactgcagtccggtttcttattgtgactttgacaatgcaaagtgcaaaataggaagaggcctccccaccccactatcccaccctggtgaccaattcagtgtaacctttgcacgtactcagtcattggtgtctttggagtgacatctgcagccagttagtgccacctgagtacagcactcgtacttttacatgatgtgtgtgtgagtagctcttctgtccaaaccatgatttgaggttcaactacctgtagatcaaagctttattttagaacgataaactgattttttccaaatgggtgaaatcttctccccatgactatgttttcttaactttgcattgaatctatttactgggttacattctatgtgtagtttgctttcttcatttttttttcttttaaaatgctcatgtcttattccaagcaccttcctccaaagtccccataaagctgcatctccaacacattgttatgccaataaggttttatttaactttatttaaggatgattgtgtctttgaatgacaaatgtactgctgcttcctacctgcaagacgaacaatgtatgtttcaagggtgagcaagtgttatttcttaaatttctcaaatgcctgtagtaactattgtttctgcctctcaattgttgccagctctttgaagaaggggagaattgtgtgtttttgtgtggggatgtttctgatatgctgctacagttgcaaaacactggagctagagaaaataaagtactgatcttcg

SEQ ID NO: 284466 - DNA, 285 bp, Artificial Sequence
  derived and/or modified sequence
ttttttttttttttgagatggagtcttgctctgctgcccagggtggagtgcagtggcatgatctctgctcactacaacctccacctcccgggttccagcgattctcctgcctcagcctcccgagtagctgggactacaggcgtgcaccaccacgcctggctaattttttgtatttttagtagagacggggtcttactatgttgcccaggctggtctccaactcctgggctgaagcgatcctcctgccttggcttccgaaagtgctgggattataggcatgaacca

SEQ ID NO: 284467 - DNA, 444 bp, Artificial Sequence
  derived and/or modified sequence
atggccgcccccgagaagatgaccttccccgagaagcccagccacaagaagtacagagccgccctgaagaaggagaagagaaagaagagaagacaggagctggccagactgagagacagcggcctgagccagaaggaggaggaggaggacaccttcatcgaggagcagcagctggaggaggagaagctgctggagagagagagactggagtgcagcggcgtgatcagcgcccacagaaacctgcacctgcccggcagccacgacagccccgccagcgccagcagagtggccggcatcaccggcacccacagacacacccagctgatcttcttctgcaccttcagcagagacggcgtgagcccctgctggcccggctggagcagaagcctggacctgatgatctgcccccccagaccccacaaggtgctgagactgcaggtgtag

SEQ ID NO: 284468 - DNA, 657 bp, Artificial Sequence
  derived and/or modified sequence
atggtcgcttggcgagtcagtgcgtccgatgaacattgtcctgaactcccgcctgtggataattccatatttgtagccaaagaagtcgagggtcagatcctaggcacatatgtatgcataaaaggataccatctcgttgggaagaagacccttttctgcaatgcatcgaaagaatgggacaacaccacaacggaatgccgccttggtcactgtccagaccccgtgttggtcaatggagagttctctagctccggtcctgtaaacgtgagcgacaaaatcacatttatgtgtaacgaccactacatcctgaagggaagcaacaggtcccaatgtctggaagatcatacatgggccccaccttttccaatatgtaagagcataccacagaccagaccattgcccttccagccctgttcgccccttttcctgttcttattacgccagagcctggctctgttcccccgcctcgagtgttctggtcggatcttggcccattgtaacttgcacttgcccggaagttcaagctctcacgccagtgcatcccaggttgccgggatcactggggcgcacccacggtgggcaaatttttgtatattcagcagggactgggtcagtccttgctggccagggtggagtcagatccccgatctgcggtag

SEQ ID NO: 284469 - DNA, 871 bp, Artificial Sequence
  derived and/or modified sequence
cggccccgctgcctgccctgctccaggctccacctgcgccgccgatcgcccgggtatcgcgggggcccaggccagctgagtccgttttccgcgccggggtggcgcccctccaaccgtcctaacgccgggccggcagcaaggagtgttcctgggacctcagagaccaggctcagagcctgacatccctgcgaggggacagcctcatccgcccaggccagtgggggtctctacaagtgcccaggctcaggtgcagcccccagcaatgcatcgccggagactggccctgggtctggggttctgcctgttggcgggcacaagcctcagtgtcctgtgggtgtatcttgagaactggctgccagtctcctatgtcccctattatctcccctgcccagagatcttgctggagtaccgtggcgtgatctcagctcattgcaacctccacctcccgggttcaagcaattgtcatgcctcagccacctgaatagctgggattacaggcacacacgctaatttttgtatttttagtagaaacagcatttcatcatgttggccaggttggtctttgcccccttcggccaggcttcgccccctcatcggcctcccaaagtgctgggattaaaggcgtgaaccaccacccctggccttaatttttttttttttttattattactagtgagactctcatttccctacgtcttcccgttaattgaaatttttcttgtgtgaagtgcttcttccccaccttctctgtttggtccgtttgtgggttctctatcatcactcttggctaagtatacctacaacttttttttttctttccagtttgtctatcttgtgtgtgtgcgtggcggagggagataaggtctggctc

SEQ ID NO: 284470 - DNA, 444 bp, Artificial Sequence
  derived and/or modified sequence
atggctgctcctgaaaagatgaccttccctgagaagccatcacacaagaagtacagggctgccctgaaaaaagaaaagagaaagaagagacggcaggagctagcaaggctgagagactctggactctctcagaaagaagaagaagaagacacatttatcgaagaacagcagttagaagaggaaaagctgcttgaacgggagaggcttgaatgctcgggggtcatttccgcacatagaaatctccatctacccggaagccatgacagtccagcctccgcttcacgggtcgcagggataacaggcacacatcggcacacgcagctgattttcttctgcacattttccagagacggcgttagcccctgctggccaggatggtcccgtagtctggatctgatgatttgcccacccagacctcataaggttcttaggctgcaggtgtag

SEQ ID NO: 284471 - DNA, 657 bp, Artificial Sequence
  derived and/or modified sequence
atggtggcctggagggtgtctgccagtgatgagcactgcccagagctgccccctgtggacaacagcatctttgtggccaaggaggtggagggccagatcctgggcacctacgtgtgcatcaagggctaccacctggtgggcaagaagaccctcttctgcaatgccagcaaggagtgggacaacaccaccacagaatgtcggctgggccactgcccagaccctgtgctggtgaatggagagttcagcagcagcggccctgtgaatgtgtctgacaagatcaccttcatgtgcaatgaccactacatcctgaagggcagcaacagaagccagtgcctggaggaccacacctgggccccacccttccccatctgcaagagcatcccccagacccggcccctgcccttccagccctgcagccccctcttcctgttcctgctgcggcagagcctggccctcttcccccggctggagtgcagcggccgcatcctggcccactgcaacctgcacctgcccggcagcagcagcagccacgccagcgccagccaggtggccggcatcactggagcccacccccgctgggccaacttctgcatcttcagccgggactgggtgagcccctgctggccaggctggagccagatcccagacctgaggtag

SEQ ID NO: 284472 - DNA, 444 bp, Artificial Sequence
  derived and/or modified sequence
atggccgcccctgagaagatgaccttccctgagaagcccagccacaagaagtaccgggccgccctgaagaaggagaagaggaagaagaggcggcaggagctggcccggctgcgggacagcggcctgagccagaaggaggaggaggaggacaccttcatcgaggagcagcagctggaggaggagaagctgctggagcgggagcggctggagtgcagcggggtcatcagcgcccacaggaacctgcacctgcccggcagccatgacagccctgccagcgccagccgggtggccggcatcaccggcacccaccgccacacccagctgatcttcttctgcaccttcagcagagatggagtgagcccctgctggccaggctggagccgcagcctggacctgatgatctgccccccccggccccacaaggtgctgcggctgcaggtgtag

SEQ ID NO: 284473 - DNA, 657 bp, Artificial Sequence
  derived and/or modified sequence
atggtggcctggcgggtgagcgccagcgacgagcactgccccgagctgccgcccgtcgataactcaattttcgtagcaaaagaggtcgaggggcagatcctggggacctacgtgtgtatcaaaggatatcatctggtgggaaagaagaccctcttctgcaatgcgtcgaaagaatgggataacacaacgacagagtgccggctcggccactgccccgatcccgtgttggttaatggagaattcagtagcagcggacccgtcaacgtttcagataagatcacattcatgtgtaacgatcactacatcctgaaaggatcaaatcgctcccagtgccttgaggatcacacttgggctccccctttccccatctgtaagagcattccccagacacgacccctcccttttcaaccttgctcccctctcttcctgttcctgctgcgccagagcctcgccctgttccctagacttgaatgttcgggccggatcctcgcccattgtaacctccacctccctggatccagttctagccatgcgtctgctagccaagtggcaggaattacgggagcacatcccaggtgggcgaacttttgtatcttctctcgcgactgggtgtccccttgctggccggggtggtcacaaatccctgatttgagatag

SEQ ID NO: 284474 - DNA, 444 bp, Artificial Sequence
  derived and/or modified sequence
atggccgcccccgagaagatgaccttccccgagaagcccagccacaagaaatatagggccgctctgaagaaggaaaagaggaaaaagcggcgccaggaattggctcgcctcagagactcggggctgagccagaaggaggaagaggaagacacttttatcgaagagcagcagctggaagaggagaagctcctcgaaagagagaggctggagtgtagcggcgtaataagcgcacacaggaacttacatctccctgggtcccacgacagtcccgcttcagcctcccgggtcgccggtataaccggcacgcacaggcacacccagctgattttcttttgtacgttcagccgcgatggggtaagtccatgctggccaggatggtccaggtctctggacctgatgatctgtcctcccaggccgcataaggtcctcagactgcaggtatag

SEQ ID NO: 284475 - DNA, 657 bp, Artificial Sequence
  derived and/or modified sequence
atggtggcctggcgcgtgagtgcaagtgatgaacattgccccgagctccccccagtcgataattcaattttcgtggccaaagaggtggagggccagatcctgggtacgtacgtgtgcatcaagggctaccatctggttgggaagaaaaccctgttttgtaacgcttctaaagagtgggataacaccacaaccgagtgccgcttagggcactgtccggaccctgtcctggtgaatggcgaatttagttcctccggccctgttaacgttagcgataaaatcacctttatgtgcaacgaccactacatactgaagggatcaaataggagtcaatgcctcgaggatcacacgtgggcgcctccgttccctatatgtaaatctatacctcaaacacggccactgccgtttcagccctgttcacctctattcctttttttactgcgccagtccttggccctgtttcctaggctggagtgttctggtcgcattcttgcccattgcaatctacaccttcctggctcatcctcctcccatgcatcagcctcacaggttgccggaatcacaggcgcacaccccagatgggctaatttttgtatattttctagagattgggttagtccctgttggcccggttggtctcagattccggacttgaggtag

SEQ ID NO: 284476 - DNA, 444 bp, Artificial Sequence
  derived and/or modified sequence
atggctgcacctgaaaagatgacattcccagagaagccttcccataagaaatacagagctgctctgaagaaagagaagaggaaaaaacgtaggcaggaattggcacgcctcagagactccggcttgagtcagaaagaggaggaagaggacacattcattgaagaacagcagctcgaggaagaaaagttgttagaacgggagagattggaatgttccggcgtgatttccgcccatagaaatctgcaccttccgggatcgcacgatagccctgcatctgcatctagggtagccggaataaccgggacacatagacacactcagctaatctttttctgcacgtttagcagagatggcgtaagtccatgctggcctgggtggtctcggtcgctggatctcatgatatgtccgcctaggccccacaaggtgctgagactgcaggtctag

SEQ ID NO: 284477 - DNA, 1001 bp, Artificial Sequence
  derived and/or modified sequence
ggtgtgcgtgctgtcttatggttgcgtggcgagtttctgcttcagatgagcactgtccagagcttcctccagtggacaatagcatatttgtcgcaaaggaggtggaaggacagattctggggacttacgtttgtatcaagggctaccacctggtaggaaagaagacccttttttgcaatgcctctaaggagtgggataacaccactactgagtgccgcttgggccactgtcctgatcctgtgctggtgaatggagagttcagttcttcagggcctgtgaatgtaagtgacaaaatcacgtttatgtgcaatgaccactacatcctcaagggcagcaatcggagccagtgtctagaggaccacacctgggcacctccctttcccatctgcaaaagtattccacagactcgtcctcttcccttccagccatgttctcccctatttctttttcttttgagacagagtcttgctctgtttcccaggctggagtgcagtggcagaatcttggctcactgcaacctccacctcccaggttcaagcagttctcatgcctcagcctcccaagtagctgggattacaggtgcgcacccacgctgggctaatttttgtatttttagtagagactgggtttcaccatgttggccaggctggtctcaaattcctgacctcaggtgatccacccccttcagcctcccaaagtgctgggattacaggtgtgagccactgctcccaccttctcccctttttctgatactctctttgatatagtttggatgtgtgttcctgctcaaatctcatattgaattgtaatctccagtgttggaggtggtgcttggtgggaggtgactggatcatgcgggtggatttctcatgaatggtctagcaccatctccctaggtactgtcctcatgacagcgagtgagttctcatgagatctggttgtttaaaagtgtgtaacgcctcctccctctctcgttcctgcacctgttatgtgagatgcct

SEQ ID NO: 284478 - DNA, 657 bp, Artificial Sequence
  derived and/or modified sequence
atggtggcctggagagtgagcgccagcgacgagcactgccccgagctgccccccgtggacaacagcatcttcgtggccaaggaggtggagggccagatcctgggcacctacgtgtgcatcaagggctaccacctggtgggcaagaagaccctgttctgcaacgccagcaaggagtgggacaacaccaccaccgagtgcagactgggccactgccccgaccccgtgctggtgaacggcgagttcagcagcagcggccccgtgaacgtgagcgacaagatcaccttcatgtgcaacgaccactacatcctgaagggcagcaacagaagccagtgcctggaggaccacacctgggccccccccttccccatctgcaagagcatcccccagaccagacccctgcccttccagccctgcagccccctgttcctgttcctgctgagacagagcctggccctgttccccagactggagtgcagcggcagaatcctggcccactgcaacctgcacctgcccggcagcagcagcagccacgccagcgccagccaggtggccggcatcaccggcgcccaccccagatgggccaacttctgcatcttcagcagagactgggtgagcccctgctggcccggctggagccagatccccgacctgagatag

SEQ ID NO: 284479 - protein, 286 aa, Artificial Sequence
  derived and/or modified sequence
MHVFIDEHGEIRSCYLKSGNQKEGPLQPLPSNNDCLSQAREMQVSSSSTTTSESQDPSSGDPAVSALQQQLLLMVARRTQSETPRHVSQDLEASSCSSTQGKFNREQFYKFIIFPGKWIKVWYDRLTLLALLDRTEDIKENVLAILLIVLVSLLGFLTLSQGFCKDMWVLLFCLVMASCQYSLLKSVQPDPASPIHGHNQIITYSRPIYFCVLCGLILLLDTGAKARHPPSYVVYGLKLFSPVFLQSARDYLIGKIMNSHKDFFTSEKKKDKIISAISSVIFLKSW

SEQ ID NO: 284480 - DNA, 1251 bp, Artificial Sequence
  derived and/or modified sequence
atgcccctgtacaacgacagcttccacgagatcagccacaagggcagaagacacaccctggtgctgaagagcatccagagagccgacgccggcatcgtgagagccagcagcctgaaggtgagcaccagcgccagactggaggtgagagtgaagcccgtggtgttcctgaaggccctggacgacctgagcgccgaggagagaggcaccctggccctgcagtgcgaggtgagcgaccccgaggcccacgtggtgtggagaaaggacggcgtgcagctgggccccagcgacaagtacgacttcctgcacaccgccggcaccagaggcctggtggtgcacgacgtgagccccgaggacgccggcctgtacacctgccacgtgggcagcgaggagaccagagccagagtgagagtgcacgacctgcacgtgggcatcaccaagagactgaagaccatggaggtgctggagggcgagagctgcagcttcgagtgcgtgctgagccacgagagcgccagcgaccccgccatgtggaccgtgggcggcaagaccgtgggcagcagcagcagattccaggccaccagacagggcagaaagtacatcctggtggtgagagaggccgcccccagcgacgccggcgaggtggtgttcagcgtgagaggcctgaccagcaaggccagcctgatcgtgagagagagacccgccgccatcatcaagcccctggaggaccagtgggtggcccccggcgaggacgtggagctgagatgcgagctgagcagagccggcacccccgtgcactggctgaaggacagaaaggccatcagaaagagccagaagtacgacgtggtgtgcgagggcaccatggccatgctggtgatcagaggcgccagcctgaaggacgccggcgagtacacctgcgaggtggaggccagcaagagcaccgccagcctgcacgtggaggagaaggccaactgcttcaccgaggagctgaccaacctgcaggtggaggagaagggcaccgccgtgttcacctgcaagaccgagcaccccgccgccaccgtgacctggagaaagggcctgctggagctgagagccagcggcaagcaccagcccagccaggagggcctgaccctgagactgaccatcagcgccctggagaaggccgacagcgacacctacacctgcgacatcggccaggcccagagcagagcccagctgctggtgcagggcgaggccgccaagtgcgccagagcctag

SEQ ID NO: 284481 - DNA, 1251 bp, Artificial Sequence
  derived and/or modified sequence
atgccactgtataatgacagttttcacgagatcagccacaaagggcggaggcacacgctcgtactgaaaagcattcagcgggctgatgctggaattgtccgggcctcttcacttaaggtgtctacaagtgcgagactggaggttcgtgtgaaaccagtggtgttcttaaaggctctggacgatctttctgccgaggagaggggcacactcgctctgcaatgtgaggtgagcgatcctgaagctcacgtggtgtggcggaaagatggcgtacagctcgggccaagtgacaagtatgacttcctgcataccgccgggacccgtggccttgtagtgcatgacgtgtcaccagaggatgccggactgtatacatgccacgtagggagcgaggagactagggcacgcgtacgggtgcacgacctgcacgttggcatcacaaaacgactaaaaaccatggaagtcttggaaggtgagtcatgttcttttgagtgcgtcctgagccacgagtcagctagtgacccagccatgtggaccgtgggcggcaaaactgtgggtagcagtagcagattccaggccacacgccaaggccgaaaatatattctggtggttcgagaggccgccccatcagacgcgggggaggtggtatttagcgtccgtggattgacgtcaaaggcatcactgatcgtgcgggagaggccggctgccattattaagcccctcgaggatcagtgggtcgcacctggggaggacgtcgagttgagatgtgaactgtccagagctggcaccccagtgcattggctgaaagatcggaaggcaatccggaaaagccagaaatacgatgtggtctgcgagggcactatggctatgcttgtgatccggggtgcttctcttaaagatgccggagaatacacatgcgaggtggaggcatcaaagtccacggcctctctacacgtcgaagaaaaggccaactgcttcactgaagaacttacaaacttgcaggtggaggagaaaggcacagcagtctttacctgcaaaacggaacatccagcagctacagtcacctggcgaaagggcctgctggaactgcgtgcttccggcaagcatcagcctagtcaggaggggttgaccctccggctcaccatctctgctctggaaaaagctgactcagacacatacacttgcgacatcgggcaagcccagtcgagggcccagctccttgtccagggagaagccgctaagtgcgcccgggcatag

SEQ ID NO: 284482 - DNA, 2534 bp, Artificial Sequence
  derived and/or modified sequence
caggatgcagaggccacggaggagggctgggccagcttctcctgtgagctgtcccacgaggatgaggaggtcgagtggtcgctcaacgggatgcccctgtacaacgacagcttccatgagatctcacacaagggccggcgccacacgctggtactgaagagcatccagcgggctgatgcgggcatagtacgcgcctcctccctgaaggtgtcgacctctgcccgcctggaggtccgagtgaagccggtggtgttcctgaaggcgctggatgacctgtccgcagaggagcgcggcaccctggccctgcagtgtgaagtctctgaccccgaggcccatgtggtgtggcgcaaagatggcgtgcagctgggccccagtgacaagtatgacttcctgcacacggcgggcacgcgggggctcgtggtgcatgacgtgagccctgaagacgccggcctgtacacctgccacgtgggctccgaggagacccgggcccgggtccgcgtgcacgatctgcacgtgggcatcaccaagaggctgaagacaatggaggtgctggaaggggaaagctgcagctttgagtgcgtcctgtcccacgagagtgccagcgacccggccatgtggacagtcggtgggaagacagtgggcagctccagccgcttccaggccacacgtcagggccgaaaatacatcctggtggtccgggaggctgcaccaagtgatgccggggaggtggtcttctctgtgcggggcctcacctccaaggcctcactcattgtcagagagaggccggccgccatcatcaagcccctggaagaccagtgggtggcgccaggggaggacgtggagctgcgctgtgagctgtcacgggcgggaacgcccgtgcactggctgaaggacaggaaggccatccgcaagagccagaagtatgatgtggtctgcgagggcacgatggccatgctggtcatccgcggggcctcgctcaaggacgcgggcgagtacacgtgtgaggtggaggcttccaagagcacagccagcctccatgtggaagaaaaagcaaactgcttcacagaggagctgaccaatctgcaggtggaggagaaaggcacagctgtgttcacgtgcaagacggagcaccccgcggccacagtgacctggcgcaagggcctcttggagctacgggcctcagggaagcaccagcccagccaggagggcctgaccctgcggctcaccatcagtgccctggagaaggcagacagcgacacctatacctgcgacattggccaggcccagtcccgggcccagctcctagtgcaaggtgaggcggccaagtgtgctcgggcctaggctttgaatggcacggagacttggaggtggacaggcccagcctcagtttcttatcatgagggtatagggggtgcaccctgggtggtcactgaggctccccagcatggctgtgaatgagctgctggtgctcacttactcgtgtgtttatttggtcactgtgtgtttctcccacatgccccgtgtgcctggcccccatgcgtaagctcagcgtgtatccgtacataaaacgtgtcacccttatcccagagggacagcctgactcagccgtgccaggcagcctcaggtgctcccagggaagaactgatggtcattagggttgtcattgagagttacagtggcattttagtctttttcttgttgtttacaacagaatacctgaaactgggtaatttataaaggaaataaatttacttcttacagctctggaggctgggaagtccaaggtcaaggggccacatctggtgagggcccttttgctgacaggaactctctgcagagtccccaagggacggcacagggcatcccatggggagggggctgagtgtgctagcttgggcctctcttcatcttcttttaaagccaccactcatatggaagcactttaacccattaacctgttaacccgttgatccatgaatgggttaatccattcccgccttggacccaatcccctcttaaaggctccacctcttaatattgccacattgggattaagtttcaacatgagtttccagggggacattcagatcatagtaggtggctgttcgatcttactgtttggctccacatttgagtggcaggcagagtgagagctgtcattctctcaactctgtagataagaaaactgaagctttagtgggtccatggccagggcaaggtcatcaggcacattgggatcagagcaggcgaggcccagccccatcaccgcagccttcacttggctctgaagtcccgggctggtgtccagagctgagtttgcaggaggtccctactggggtctgaccacagggcgttcacagggttcagtatttgaaaggccccagttgtgatcatcagaagtaacgtaaaccaggaatcatcactgattttttctctccaatggatttggtgaccctggtgaaagtattctgttagcacagtaacgccccatgatctaataaagttggtacccagagttaatttttaaaaaagtc

SEQ ID NO: 284483 - DNA, 1251 bp, Artificial Sequence
  derived and/or modified sequence
atgcccctgtacaatgacagcttccacgagatcagccacaagggccgccgccacaccctggtgctgaagagcatccagagagcagatgctggcatcgtgcgggccagcagcctgaaggtgtccaccagcgcccggctggaggtgcgggtgaagcctgtggtgttcctgaaggccctggatgacctgtctgctgaggagcggggcaccctggccctgcagtgtgaggtgtctgaccctgaggcccacgtggtgtggaggaaggatggagtgcagctgggccccagcgacaagtatgacttcctgcacacagctggcacccggggcctggtggtgcatgatgtgtccccagaagatgctggcctgtacacctgccacgtgggcagcgaggagacccgggcccgggtgcgggtgcatgacctgcacgtgggcatcaccaagaggctgaagaccatggaggtgctggagggggagagctgcagctttgaatgtgtgctgagccatgaaagtgccagtgaccctgccatgtggacagtgggcggcaagacagtgggcagcagcagccgcttccaggccacccggcagggcaggaagtacatcctggtggtgcgggaggccgcccccagtgatgctggggaggtggtgttttctgtgcggggcctgaccagcaaggccagcctgattgtgcgggagaggcctgctgccatcatcaagcccctggaggaccagtgggtggcccctggagaagatgtggagctgcgctgtgagctgagcagagctggcacccctgtgcactggctgaaggacaggaaggccatcaggaagagccagaagtatgatgtggtgtgtgagggcaccatggccatgctggtgatccggggggccagcctgaaggatgctggggagtacacctgtgaggtggaggccagcaagagcacagccagcctgcacgtggaggagaaggccaactgcttcacagaggagctgaccaacctgcaggtggaggagaagggcacagctgtgttcacctgcaagacagagcaccctgctgccaccgtgacctggaggaagggcctgctggagctgcgggccagcggcaagcaccagcccagccaggagggcctgaccctgcggctgaccatcagcgccctggagaaggctgacagcgacacctacacctgtgacatcggccaggcccagagccgggcccagctgctggtgcagggcgaggccgccaagtgtgcccgggcctag

SEQ ID NO: 284484 - DNA, 1251 bp, Artificial Sequence
  derived and/or modified sequence
atgcccctgtacaacgacagcttccacgagatcagccacaagggccggcggcatactttagtcctgaagtccatccagagagcggacgctgggatcgtgagggcgagcagcctgaaggtgtctacttccgcccggttagaagtgcgggtgaagcccgtcgtgttccttaaggcccttgacgatctcagcgcggaggagcgaggcacattggctctgcagtgcgaagtgtcagatcccgaggcacacgttgtttggaggaaggacggtgtgcaactggggcccagcgacaagtacgattttctgcacaccgccggaaccagagggcttgtggtgcacgatgtctctcccgaggacgctgggttgtacacttgccacgtgggatcagaggagactagagcacgggtgcgtgtccacgacctccacgtcgggatcaccaagcgtttgaagacaatggaagttctcgaaggagagagttgttccttcgaatgtgtgcttagccatgagtccgcatctgatccagcgatgtggaccgttggaggcaaaaccgtcggttcctccagccgctttcaggctactaggcaaggcagaaaatacattctggtggtgcgggaagctgccccgagtgacgccggggaggtagtattttctgtgcggggcctgacaagtaaggccagcttgatcgtgcgggagaggccagctgcaatcattaaacctctagaagaccagtgggtggcccccggcgaagatgtggagctgcgttgtgagctctctcgtgcaggcactcccgtgcattggttgaaggacagaaaagccataaggaagagccagaagtatgatgtagtatgtgaaggcacaatggccatgctggttatccgcggagcttctctgaaagatgccggtgagtatacatgcgaggttgaggcatcaaagtcaacagcgtcattgcacgtcgaagaaaaggctaattgttttaccgaggaattgaccaacttgcaggtcgaggagaaaggaactgctgtgttcacttgcaagacagagcaccccgcggcaaccgtgacctggagaaagggtcttctcgaactcagggcctccgggaagcaccaaccgagccaagagggcctaacccttcgcctgacaatttctgccttggagaaagcggactctgacacatatacgtgtgacatcgggcaggcccagagtagagcgcagttgctcgtgcaaggggaagctgctaagtgcgcacgcgcctag

SEQ ID NO: 284485 - DNA, 1251 bp, Artificial Sequence
  derived and/or modified sequence
atgcccctgtataatgatagttttcacgaaatctcccacaaaggccgtcgccacactctggtgctgaagtccatccagcgagctgatgcgggaattgtgcgcgcttctagcctgaaagtgtccaccagcgcaaggttagaggtacgtgtaaagccagtggtctttctaaaagccttggacgacctgtctgccgaagagaggggcactctcgctttacagtgtgaggtgagcgaccccgaggctcatgttgtttggcggaaagacggagtgcagctgggaccttctgataagtatgactttctgcacacagcagggacaaggggcttggtggtacatgatgtgagcccagaagatgcaggtttgtacacttgccatgtaggttctgaggagacccgcgcaagggtcagagtgcacgatctccacgtcggcattacaaaaaggctcaaaacaatggaggtgctcgaaggagagtcttgttcattcgaatgcgtcctgtctcacgagtccgccagcgacccagcaatgtggacagttggaggaaaaaccgtgggctcgtcctctaggttccaggccacaaggcagggcagaaagtacattctggtagtgagagaggctgctccgagcgacgctggagaagtggtcttcagcgtcaggggccttacatcgaaggcttctctcatcgtcagagaacggccagcagcaatcatcaagccactggaggatcagtgggtagctcccggagaggacgtcgagctcagatgtgagctgtctagggccggaactccggttcactggcttaaagatcgcaaggcgattagaaaaagtcagaaatatgacgtcgtctgtgaggggaccatggcaatgctggtcatccggggagctagtctaaaagatgccggagagtacacatgcgaggtagaagcctccaagtctacagccagcctgcacgtggaagagaaagccaattgctttacagaagaactcactaatcttcaggtagaggaaaagggtaccgccgtgtttacatgcaaaacagaacatcctgccgcaaccgtgacatggagaaaaggcctactggagttacgcgcaagcggaaagcatcagccatcccaggagggcctgactttgcggctcacaattagtgccttggagaaggccgactcggacacctacacctgcgatattgggcaagcacagtccagggcccaactgctggtccagggagaggcggcaaagtgcgccagagcgtag

SEQ ID NO: 284486 - DNA, 7752 bp, Artificial Sequence
  derived and/or modified sequence
tgaagcagcatcaccttcagcgtgaaggtggagggcagacccgtgcccaccgtgcactggctgagagaggaggccgagagaggcgtgctgtggatcggccccgacacccccggctacaccgtggccagcagcgcccagcagcacagcctggtgctgctggacgtgggcagacagcaccagggcacctacacctgcatcgccagcaacgccgccggccaggccctgtgcagcgccagcctgcacgtgagcggcctgcccaaggtggaggagcaggagaaggtgaaggaggccctgatcagcaccttcctgcagggcaccacccaggccatcagcgcccagggcctggagaccgccagcttcgccgacctgggcggccagagaaaggaggagcccctggccgccaaggaggccctgggccacctgagcctggccgaggtgggcaccgaggagttcctgcagaagctgaccagccagatcaccgagatggtgagcgccaagatcacccaggccaagctgcaggtgcccggcggcgacagcgacgaggacagcaagacccccagcgccagccccagacacggcagaagcagacccagcagcagcatccaggagagcagcagcgagagcgaggacggcgacgccagaggcgagatcttcgacatctacgtggtgaccgccgactacctgcccctgggcgccgagcaggacgccatcaccctgagagagggccagtacgtggaggtgctggacgccgcccaccccctgagatggctggtgagaaccaagcccaccaagagcagccccagcagacagggctgggtgagccccgcctacctggacagaagactgaagctgagccccgagtggggcgccgccgaggcccccgagttccccggcgaggccgtgagcgaggacgagtacaaggccagactgagcagcgtgatccaggagctgctgagcagcgagcaggccttcgtggaggagctgcagttcctgcagagccaccacctgcagcacctggagagatgcccccacgtgcccatcgccgtggccggccagaaggccgtgatcttcagaaacgtgagagacatcggcagattccacagcagcagcttcctgcaggagctgcagcagtgcgacaccgacgacgacgtggccatgtgcttcatcaagaaccaggccgccttcgagcagtacctggagttcctggtgggcagagtgcaggccgagagcgtggtggtgagcaccgccatccaggagttctacaagaagtacgccgaggaggccctgctggccggcgaccccagccagcccccccccccccccctgcagcactacctggagcagcccgtggagagagtgcagagataccaggccctgctgaaggagctgatcagaaacaaggccagaaacagacagaactgcgccctgctggagcaggcctacgccgtggtgagcgccctgccccagagagccgagaacaagctgcacgtgagcctgatggagaactaccccggcaccctgcaggccctgggcgagcccatcagacagggccacttcatcgtgtgggagggcgcccccggcgccagaatgccctggaagggccacaacagacacgtgttcctgttcagaaaccacctggtgatctgcaagcccagaagagacagcagaaccgacaccgtgagctacgtgttcagaaacatgatgaagctgagcagcatcgacctgaacgaccaggtggagggcgacgacagagccttcgaggtgtggcaggagagagaggacagcgtgagaaagtacctgctgcaggccagaaccgccatcatcaagagcagctgggtgaaggagatctgcggcatccagcagagactggccctgcccgtgtggagaccccccgacttcgaggaggagctggccgactgcaccgccgagctgggcgagaccgtgaagctggcctgcagagtgaccggcacccccaagcccgtgatcagctggtacaaggacggcaaggccgtgcaggtggacccccaccacatcctgatcgaggaccccgacggcagctgcgccctgatcctggacagcctgaccggcgtggacagcggccagtacatgtgcttcgccgccagcgccgccggcaactgcagcaccctgggcaagatcctggtgcaggtgccccccagattcgtgaacaaggtgagagccagccccttcgtggagggcgaggacgcccagttcacctgcaccatcgagggcgccccctacccccagatcagatggtacaaggacggcgccctgctgaccaccggcaacaagttccagaccctgagcgagcccagaagcggcctgctggtgctggtgatcagagccgccagcaaggaggacctgggcctgtacgagtgcgagctggtgaacagactgggcagcgccagagccagcgccgagctgagaatccagagccccatgctgcaggcccaggagcagtgccacagagagcagctggtggccgccgtggaggacaccaccctggagagagccgaccaggaggtgaccagcgtgctgaagagactgctgggccccaaggcccccggccccagcaccggcgacctgaccggccccggcccctgccccagaggcgcccccgccctgcaggagaccggcagccagccccccgtgaccggcaccagcgaggcccccgccgtgccccccagagtgccccagcccctgctgcacgagggccccgagcaggagcccgaggccatcgccagagcccaggagtggaccgtgcccatcagaatggagggcgccgcctggcccggcgccggcaccggcgagctgctgtgggacgtgcacagccacgtggtgagagagaccacccagagaacctacacctaccaggccatcgacacccacaccgccagaccccccagcatgcaggtgaccatcgaggacgtgcaggcccagaccggcggcaccgcccagttcgaggccatcatcgagggcgacccccagcccagcgtgacctggtacaaggacagcgtgcagctggtggacagcaccagactgagccagcagcaggagggcaccacctacagcctggtgctgagacacgtggccagcaaggacgccggcgtgtacacctgcctggcccagaacaccggcggccaggtgctgtgcaaggccgagctgctggtgctgggcggcgacaacgagcccgacagcgagaagcagagccacagaagaaagctgcacagcttctacgaggtgaaggaggagatcggcagaggcgtgttcggcttcgtgaagagagtgcagcacaagggcaacaagatcctgtgcgccgccaagttcatccccctgagaagcagaaccagagcccaggcctacagagagagagacatcctggccgccctgagccaccccctggtgaccggcctgctggaccagttcgagaccagaaagaccctgatcctgatcctggagctgtgcagcagcgaggagctgctggacagactgtacagaaagggcgtggtgaccgaggccgaggtgaaggtgtacatccagcagctggtggagggcctgcactacctgcacagccacggcgtgctgcacctggacatcaagcccagcaacatcctgatggtgcaccccgccagagaggacatcaagatctgcgacttcggcttcgcccagaacatcacccccgccgagctgcagttcagccagtacggcagccccgagttcgtgagccccgagatcatccagcagaaccccgtgagcgaggccagcgacatctgggccatgggcgtgatcagctacctgagcctgacctgcagcagccccttcgccggcgagagcgacagagccaccctgctgaacgtgctggagggcagagtgagctggagcagccccatggccgcccacctgagcgaggacgccaaggacttcatcaaggccaccctgcagagagccccccaggccagacccagcgccgcccagtgcctgagccacccctggttcctgaagagcatgcccgccgaggaggcccacttcatcaacaccaagcagctgaagttcctgctggccagaagcagatggcagagaagcctgatgagctacaagagcatcctggtgatgagaagcatccccgagctgctgagaggcccccccgacagccccagcctgggcgtggccagacacctgtgcagagacaccggcggcagcagcagcagcagcagcagcagcgacaacgagctggcccccttcgccagagccaagagcctgccccccagccccgtgacccacagccccctgctgcaccccagaggcttcctgagacccagcgccagcctgcccgaggaggccgaggccagcgagagaagcaccgaggcccccgccccccccgccagccccgagggcgccggcccccccgccgcccagggctgcgtgcccagacacagcgtgatcagaagcctgttctaccaccaggccggcgagagccccgagcacggcgccctggcccccggcagcagaagacaccccgccagaagaagacacctgctgaagggcggctacatcgccggcgccctgcccggcctgagagagcccctgatggagcacagagtgctggaggaggaggccgccagagaggagcaggccaccctgctggccaaggcccccagcttcgagaccgccctgagactgcccgccagcggcacccacctggcccccggccacagccacagcctggagcacgacagccccagcacccccagacccagcagcgaggcctgcggcgaggcccagagactgcccagcgcccccagcggcggcgcccccatcagagacatgggccacccccagggcagcaagcagctgcccagcaccggcggccaccccggcaccgcccagcccgagagacccagccccgacagcccctggggccagcccgcccccttctgccaccccaagcagggcagcgccccccaggagggctgcagcccccaccccgccgtggccccctgcccccccggcagcttcccccccggcagctgcaaggaggcccccctggtgcccagcagccccttcctgggccagccccaggccccccccgcccccgccaaggccagcccccccctggacagcaagatgggccccggcgacatcagcctgcccggcagacccaagcccggcccctgcagcagccccggcagcgccagccaggccagcagcagccaggtgagcagcctgagagtgggcagcagccaggtgggcaccgagcccggccccagcctggacgccgagggctggacccaggaggccgaggacctgagcgacagcacccccaccctgcagagaccccaggagcaggccaccatgagaaagttcagcctgggcggcagaggcggctacgccggcgtggccggctacggcaccttcgccttcggcggcgacgccggcggcatgctgggccagggccccatgtgggccagaatcgcctgggccgtgagccagagcgaggaggaggagcaggaggaggccagagccgagagccagagcgaggagcagcaggaggccagagccgagagccccctgccccaggtgagcgccagacccgtgcccgaggtgggcagagcccccaccagaagcagccccgagcccaccccctgggaggacatcggccaggtgagcctggtgcagatcagagacctgagcggcgacgccgaggccgccgacaccatcagcctggacatcagcgaggtggaccccgcctacctgaacctgagcgacctgtacgacatcaagtacctgcccttcgagttcatgatcttcagaaaggtgcccaagagcgcccagcccgagccccccagccccatggccgaggaggagctggccgagttccccgagcccacctggccctggcccggcgagctgggcccccacgccggcctggagatcaccgaggagagcgaggacgtggacgccctgctggccgaggccgccgtgggcagaaagagaaagtggagcagccccagcagaagcctgttccacttccccggcagacacctgcccctggacgagcccgccgagctgggcctgagagagagagtgaaggccagcgtggagcacatcagcagaatcctgaagggcagacccgagggcctggagaaggagggcccccccagaaagaagcccggcctggccagcttcagactgagcggcctgaagagctgggacagagcccccaccttcctgagagagctgagcgacgagaccgtggtgctgggccagagcgtgaccctggcctgccaggtgagcgcccagcccgccgcccaggccacctggagcaaggacggcgcccccctggagagcagcagcagagtgctgatcagcgccaccctgaagaacttccagctgctgaccatcctggtggtggtggccgaggacctgggcgtgtacacctgcagcgtgagcaacgccctgggcaccgtgaccaccaccggcgtgctgagaaaggccgagagacccagcagcagcccctgccccgacatcggcgaggtgtacgccgacggcgtgctgctggtgtggaagcccgtggagagctacggccccgtgacctacatcgtgcagtgcagcctggagggcggcagctggaccaccctggccagcgacatcttcgactgctgctacctgaccagcaagctgagcagaggcggcacctacaccttcagaaccgcctgcgtgagcaaggccggcatgggcccctacagcagccccagcgagcaggtgctgctgggcggccccagccacctggccagcgaggaggagagccagggcagaagcgcccagcccctgcccagcaccaagaccttcgccttccagacccagatccagagaggcagattcagcgtggtgagacagtgctgggagaaggccagcggcagagccctggccgccaagatcatcccctaccaccccaaggacaagaccgccgtgctgagagagtacgaggccctgaagggcctgagacacccccacctggcccagctgcacgccgcctacctgagccccagacacctggtgctgatcctggagctgtgcagcggccccgagctgctgccctgcctggccgagagagccagctacagcgagagcgaggtgaaggactacctgtggcagatgctgagcgccacccagtacctgcacaaccagcacatcctgcacctggacctgagaagcgagaacatgatcatcaccgagtacaacctgctgaaggtggtggacctgggcaacgcccagagcctgagccaggagaaggtgctgcccagcgacaagttcaaggactacctggagaccatggagctgctggagggccagggcgccgtgccccagaccgacatctgggccatcggcgtgaccgccttcatcatgctgagcgccgagtaccccgtgagcagcgagggcgccagagacctgcagagaggcctgagaaagggcctggtgagactgagcagatgctacgccggcctgagcggcggcgccgtggccttcctgagaagcaccctgtgcgcccagccctggggcagaccctgcgccagcagctgcctgcagtgcccctggctgaccgaggagggccccgcctgcagcagacccgcccccgtgaccttccccaccgccagactgagagtgttcgtgagaaacagagagaagagaagagccctgctgtacaagagacacaacctggcccaggtgagatag

SEQ ID NO: 284487 - DNA, 7752 bp, Artificial Sequence
  derived and/or modified sequence
tagagctctatcacattctctgttaaagtcgaggggagacctgtccccacagttcattggctgcgcgaggaagccgaacggggcgtgctgtggattggcccagacaccccaggctacacagtagcaagctctgcacagcagcactctttagtactgcttgacgtgggacggcagcatcagggcacctacacatgtatagctagtaacgccgcagggcaagccctgtgtagtgcgagcctccatgttagtggcttgcccaaggtggaggaacaagagaaggtcaaggaggctttgatctccaccttcctgcagggcaccacccaggctatcagcgctcagggacttgagacagcctcattcgccgatctcgggggccagagaaaggaggaaccactggccgcaaaagaggcgctgggccatcttagcctggccgaagtaggcactgaagaattcctgcagaagctcacatcccagataaccgagatggtgtcagcaaaaatcacccaagctaagctccaggtacctggaggcgactctgatgaggatagtaagactccctctgctagtcctagacatggccgctcccgacctagctcatccatacaagaaagctcttccgagtccgaggacggggacgcacggggagagatcttcgacatctatgtcgttacagctgactaccttccattgggtgcagagcaggacgcaattactttacgagaaggccagtatgtggaagtgcttgacgctgcacatccgctaaggtggctcgtgagaactaagccaacgaagtccagtccgagccgacaaggatgggtttccccggcttatctcgatcgaagactgaaactgagcccagaatggggggctgctgaggcccccgaatttcccggtgaggctgtatctgaggacgaatataaggcacggttgagcagcgtcattcaggagctcctttcttctgaacaagcgtttgtggaggagttgcagtttctgcaatcccatcacctacagcacctggagagatgtccgcacgtcccgattgccgtagctggacagaaggccgtgatctttcgcaacgtgagagatattggccggtttcacagctccagtttcttgcaagaactgcagcaatgtgataccgacgacgacgtggcaatgtgtttcattaagaaccaagctgctttcgagcagtacctggaattccttgtgggcagagtccaagcagaaagcgtcgtagtgtcgaccgctattcaggaattctacaagaaatacgctgaagaagctctacttgcaggtgacccatcccagcccccccctcctccattgcagcattatttggagcagcctgtggagcgtgtccaaagataccaggctcttctcaaggagttgattagaaacaaagcgcggaacagacaaaattgtgccttactggaacaagcctacgccgtggtgtccgccctgccccagcgggcggaaaacaagttacacgtgtccctgatggagaactatcctggcaccctgcaggccctgggagaacccatcaggcagggccacttcatagtatgggaaggcgcccctggagcaaggatgccatggaagggtcacaaccgacacgtttttctgttcagaaatcatctggtgatatgtaagcctagacgagactccaggacagacaccgtgtcatacgtttttcgaaatatgatgaaactaagctccattgacctgaacgaccaagtcgagggagacgaccgcgctttcgaagtttggcaagaacgtgaggatagtgttaggaagtacttgttgcaagcccgtactgccattattaaatcaagctgggtgaaagagatttgcggcattcagcagaggctggcgttgcctgtctggcgcccacccgactttgaggaggagcttgccgactgtaccgctgagctcggagaaacagttaaacttgcatgtcgggttactggaaccccaaaaccagtgatctcctggtataaagacggcaaagccgtgcaagttgatccacatcacatactgatcgaagatccagacggcagttgcgcactgattttggattcactgaccggagtggacagtgggcagtacatgtgcttcgccgcttccgccgccggtaactgctctacactgggaaaaatactggtgcaggtaccacctagattcgtgaataaggttcgcgctagccctttcgtagagggtgaggacgcccaatttacctgcacaatcgagggtgcgccctacccccagatccgctggtacaaggacggcgcccttctgaccactgggaacaagttccaaactctgtcagagccccggtctggccttctggttctggtgatccgggcagccagcaaagaagatctgggcttgtatgagtgcgagctcgtcaaccgacttggcagcgctagggcgtcagctgagctgcgaattcaaagccccatgctgcaggcacaagaacagtgccacagagagcagctggtcgccgccgtcgaagatactactcttgagcgggctgatcaggaagtgacttccgtcctgaaacgtcttctcggacctaaggcccccggacctagtacaggagacttgacaggaccgggtccatgcccacgcggtgccccagcgctgcaggagactgggtcacagccccccgtgactggaacctcagaagcccctgccgtgccacctagagttcctcagccactactgcacgaaggaccagagcaggaaccggaagctattgccagagcacaggaatggacagtccccataaggatggagggagccgcttggccaggggctggaacgggagagctgctgtgggacgtccatagccacgtggtccgcgagacgactcagcgaacgtatacctaccaggcgatcgacacacacaccgcacgcccaccctctatgcaagtgactattgaggacgtccaggcacagaccggcggtaccgctcagtttgaagccatcattgagggcgacccccaaccttcggtaacttggtacaaggattccgtacagctagtagattcgactcggctgtcacagcagcaggaaggaactacttactctttggttttacgacatgttgccagcaaggatgccggcgtgtacacttgccttgcccagaacactggagggcaggtgctttgcaaagcagagctgctcgtgctgggtggtgacaacgagccagactcagagaagcaaagtcaccggagaaaactccacagcttttatgaggttaaagaggaaataggccgaggtgtgttcggcttcgtgaagagggtgcagcacaaaggaaataaaattttgtgtgcagcaaagttcattccactgcggtcccggacacgcgcacaggcatatagggagcgcgacatcctagccgctctgtctcacccgctcgtcactggactgttggatcaattcgagaccagaaagactctgatactgatactcgagctgtgttctagcgaggagcttctggacaggctgtatcgcaagggggtggtcacggaggcagaggtcaaagtgtacattcagcagctggtagagggattgcattacctgcacagccatggggtgcttcacctggatatcaagccttccaacatcctgatggtacaccctgcgagggaagacattaaaatatgcgacttcggtttcgcccagaatatcacacctgctgagctacagttttcccaatatggttcccctgagttcgtgagcccagagataattcaacaaaatccagtttctgaagccagcgatatctgggccatgggagtcatttcctacctgtcactcacatgtagcagtccctttgccggagaatccgatagggccaccctgttaaacgtacttgaagggcgggtcagttggtctagccctatggcggctcatctgtctgaagatgccaaggattttattaaggcaactctccagcgggccccccaggctcgaccaagtgccgcccagtgtctgtcacatccatggttcttaaaaagcatgcccgccgaggaggcacatttcatcaatacgaaacagcttaaattcctgctggcaagatcacggtggcaacgatccctgatgtcgtataaaagcatccttgtgatgaggtccatccctgagttgttacggggtccccccgacagcccatcactcggggtggcgagacatctctgcagagatactgggggttcatccagtagttcatcgtcatctgataatgaactggccccgttcgcgagggccaaatctctccctccaagcccagtgactcacagccccctattacatccccggggctttctgcgcccaagcgccagcctccctgaggaggctgaggcttcagagcggtcaactgaggctccggctcccccagcctcacctgagggagctgggcctccggccgcccaggggtgcgtgccacgccattctgttattcgaagtctgttttatcaccaggctggagagagtccggagcacggtgccttggctccaggaagcaggcggcaccccgcccgacgccggcacctgctcaaaggagggtatatcgccggcgccctacctggcttgcgggagccactcatggagcaccgggtactcgaagaagaagccgcgcgagaagaacaggcgacacttcttgcaaaagctccatcattcgagacggcactgcgtctgcccgcctctggcacacacctggcccctggccatagtcattccttagagcacgatagcccttccacaccgcgaccttcgagcgaggcctgtggcgaggctcagcgactcccaagtgccccttcaggcggagcaccaatcagagacatgggccacccccagggcagtaagcagctcccatctactggcgggcatcccgggactgcacagccggagcgccctagtcccgacagtccatgggggcagcctgctccattctgtcacccaaagcagggctcagcacctcaggaggggtgcagcccacatcccgccgtcgctccttgcccgcccggcagctttccacccggttcatgcaaggaagcccctctggtgccgtcgagcccattcctcgggcagcctcaggctccacctgctcctgccaaggccagcccccctctggacagtaaaatgggtcctggtgacatttctctccccggaaggcccaagcctggcccctgtagttcccctgggagcgcaagtcaggcctcctcatctcaggtgtctagcctaagggtgggaagtagtcaagtcggcaccgaaccgggacctagtttggacgccgagggctggacccaagaggctgaggatctgtctgattccactccaaccctgcagaggcctcaggaacaggccacaatgagaaagtttagcctgggcggccggggcgggtatgcgggcgtagctgggtacggcaccttcgcatttggtggcgacgcaggggggatgctgggccagggccccatgtgggcccgcattgcctgggcggtaagtcagagcgaggaggaggagcaggaagaagcgcgcgcagagtcccagagcgaggagcaacaggaggctcgtgctgagagcccactgccgcaggtctcagcacggcctgtgccagaggtaggcagggcaccaacacggtcctctcccgaaccaaccccttgggaggacatcgggcaggtgtcattggttcaaatacgtgatctgtccggtgacgctgaggcggccgacaccattagcctggatataagcgaagtcgaccctgcatacctaaatctgtccgacttatatgacattaagtacctcccctttgagttcatgattttccgaaaggtgcccaaatcagcgcagccagagccacccagccctatggctgaagaagaactggccgagttcccagagcctacttggccatggcccggtgagctaggcccacacgccggtctggaaatcacagaggagagcgaggatgttgacgcactgctggccgaagctgccgtcggcagaaagcgaaaatggagtagcccctctcggtcactctttcacttccctggacgccatctgcctctcgatgagccggcggaactgggcctgcgcgaacgggtgaaagcaagcgttgaacatatctcacgcatccttaaaggccggcctgaggggctggagaaggaaggtcctcctcggaagaagcccggacttgccagttttcggctttcaggactcaagtcatgggatcgcgcacctacatttctgagagaattatccgatgagacggtcgtcctgggccagagtgtcaccctggcttgtcaggtttctgcacaacctgccgctcaggctacctggtccaaggacggggctcccctggagagttccagcagggtccttatttccgctacactgaaaaactttcaattgctcactatcctcgtagtggtggcagaggacctgggtgtgtacacctgttccgtttcaaacgcccttggcacagtcactacaacaggggtgctgcggaaggccgagcggccatcatccagcccatgccctgacattggcgaagtttacgcagatggagtgctgttagtgtggaaacccgtagaatcttatggacctgtgacttatatcgtgcagtgcagcctggagggcggatcttggacgactttggcttccgatatttttgactgctgttacctcacttccaagttatcccgtggaggcacctacacattcaggacagcgtgcgtgtcaaaagccggcatgggaccctatagttcaccctcggaacaggtcctacttggcgggccatcgcatttagcctctgaagaagaatcccaaggccgttccgcccagcctctcccatctaccaagaccttcgctttccagacccagattcagcgcggaagattctccgttgtgcgccagtgttgggagaaggcaagcggtcgggccctggcagccaagataataccatatcaccctaaagacaagactgctgtgctgcgggaatatgaggccctgaaggggctgcggcatcctcacttggcacagcttcatgctgcttacttgtccccgcggcacctcgttctcatcttggaactgtgcagcggacctgagctgctaccgtgtctggccgagcgggcctcatatagcgagtccgaggtcaaggactacttgtggcagatgctctctgctacgcagtatctccacaaccaacacatcttgcatctggatcttaggtccgaaaatatgatcattactgaatataacctgctcaaggtggttgatctcgggaatgcacagagtctcagtcaggaaaaggtcttgccctctgataaatttaaggattatcttgaaaccatggaactccttgaggggcagggtgctgtcccccagaccgacatctgggcaataggggtcacagcgttcataatgctgagcgctgaatatccagtttctagcgagggcgcaagagacctacagcgaggcctgagaaaggggctggtgaggctcagcagatgctacgctggactgtctggaggagccgttgctttcttgcgaagtaccttgtgcgcccagccttggggtcggccttgtgcaagcagctgcctccagtgtccctggttgacagaagaaggaccggcatgctcacggcccgcccccgtgacttttcctaccgcacgccttagggtatttgtgaggaatcgcgaaaagagacgcgcactgctgtataagaggcacaacttagcacaggtgcggtag

SEQ ID NO: 284488 - DNA, 7752 bp, Artificial Sequence
  derived and/or modified sequence
tgaagcagcatcaccttctctgtgaaggtggagggccggcctgtgcccaccgtgcactggctgcgggaggaggccgagcggggcgtgctgtggattggccctgacaccccaggctacacagtggccagcagcgcccagcagcacagcctggtgctgctggatgtgggccggcagcaccagggcacctacacctgcatcgccagcaatgctgctggccaggccctgtgcagcgccagcctgcacgtgtctggcctgcccaaggtggaggagcaggagaaggtgaaggaggccctgatcagcaccttcctgcagggcaccacccaggccatcagcgcccagggcctggagacagccagctttgctgacctgggcggccagaggaaggaggagcccctggccgccaaggaggccctgggccacctgagcctggccgaggtgggcacagaggagttcctgcagaagctgaccagccagatcacagagatggtgtctgccaagatcacccaggccaagctgcaggtgcctggaggagacagtgatgaggacagcaagaccccatctgccagccccaggcatggccgcagccggcccagcagcagcatccaggagagcagcagcgagagtgaagatggagatgcccggggggagatctttgacatctacgtggtgacagctgactacctgcccctgggcgctgagcaggatgccatcaccctgcgggagggccagtatgtggaggtgctggatgctgcccaccccctgcgctggctggtgaggaccaagcccaccaagagcagccccagccggcagggctgggtgtccccagcctacctggaccggcggctgaagctgagccctgagtggggcgctgctgaggcccctgagttccctggagaggccgtgtctgaagatgagtacaaggcccggctgagcagcgtcatccaggagctgctgagcagcgagcaggcctttgtggaggagctgcagttcctgcagagccaccacctgcagcacctggagcgctgcccccacgtgcccatcgctgtggccggccagaaggccgtcatcttcagaaatgtgcgggacatcggccgcttccacagcagcagcttcctgcaggagctgcagcagtgtgacacagatgatgatgtggccatgtgcttcatcaagaaccaggccgcctttgagcagtacctggagttcctggtgggccgggtgcaggccgagagcgtggtggtgtccacagccatccaggagttctacaagaagtatgcagaggaggccctgctggccggggaccccagccagcccccacctccacccctgcagcactacctggagcagcctgtggagcgggtgcagcgctaccaggccctgctgaaggagctgatccggaacaaggccaggaaccggcagaactgtgccctgctggagcaggcctatgctgtggtgtctgccctgccccagagagctgagaacaagctgcacgtgtccctgatggagaactacccaggcaccctgcaggccctgggggagcccatccggcagggccacttcatcgtgtgggagggcgcccctggggccaggatgccctggaagggccacaacagacatgtgttcctgttcaggaaccacctggtgatctgcaagccccggcgggacagcaggacagacacagtgtcctatgtgttcaggaacatgatgaagctgagcagcattgacctgaatgaccaggtggagggagatgaccgggcctttgaggtgtggcaggagagagaagattctgtgaggaagtacctgctgcaggccaggacagccatcatcaagagctcctgggtgaaggagatctgtggcatccagcagaggctggccctgcctgtgtggaggcccccagactttgaggaggagctggccgactgcacagctgagctgggggagaccgtgaagctggcctgccgggtgacaggcacccccaagcctgtgatctcctggtacaaggatggcaaggctgtgcaggtggacccccaccacatcctgattgaagatcctgatggcagctgtgccctgatcctggacagcctgactggagtggacagcggccagtacatgtgctttgctgccagcgctgctggcaactgcagcaccctgggcaagatcctggtgcaggtgccccccaggtttgtgaacaaggtgcgggccagcccctttgtggagggggaggatgcccagttcacctgcaccatcgagggcgccccctacccccagatccgctggtacaaggatggagccctgctgaccactggaaacaagttccagaccctgtctgagcccaggagcggcctgctggtgctggtgatccgggccgccagcaaggaggacctgggcctgtatgaatgtgagctggtgaaccggctgggcagcgcccgggccagcgctgagctgcgcatccagagccccatgctgcaggcccaggagcagtgccaccgggagcagctggtggccgctgtggaggacaccaccctggagagagctgaccaggaggtgacctctgtgctgaagaggctgctgggccccaaggcccctggccccagcactggagacctgactggacctggcccctgccccaggggggccccagccctgcaggagaccggcagccagccccctgtgacaggcaccagcgaggccccagctgtgcccccccgggtgccccagcccctgctgcacgagggccctgagcaggagcctgaggccatcgcccgggcccaggagtggacagtgcccatccgcatggagggcgccgcctggccaggagctggcactggagagctgctgtgggatgtgcacagccacgtggtgcgggagaccacccagaggacctacacctaccaggccatcgacacccacacagcccggcccccatccatgcaggtgaccattgaagatgtgcaggcccagacaggaggaacagcccagtttgaggccatcattgaaggagacccccagcccagcgtgacctggtacaaggacagcgtgcagctggtggacagcacccggctgagccagcagcaggagggcaccacctacagcctggtgctgcggcacgtggccagcaaggatgctggggtgtacacctgcctggcccagaacacaggaggccaggtgctgtgcaaggccgagctgctggtgctgggcggggacaatgaaccagacagcgagaagcagagccacaggaggaagctgcacagcttctatgaggtgaaggaggagatcggccggggcgtgtttggatttgtgaagagggtgcagcacaagggcaacaagatcctgtgtgccgccaagttcatccccctgcggagcaggacccgggcccaggcctaccgggagcgggacatcctggccgccctgagccaccccctggtgacaggcctgctggaccagtttgagaccaggaagaccctcatcctgatcctggagctgtgcagcagcgaggagctgctggaccggctgtacagaaaaggagtggtgacagaagctgaggtgaaggtgtacatccagcagctggtggagggcctgcactacctgcacagccacggcgtgctgcacctggacatcaagcccagcaacatcctgatggtgcacccagcccgggaggacatcaagatctgtgactttggatttgcccagaacatcaccccagctgagctgcagttcagccagtatggcagccctgagtttgtgtccccagagatcatccagcagaaccctgtgtctgaggccagtgacatctgggccatgggcgtcatctcctacctgagcctgacctgcagcagcccctttgctggggagagtgaccgggccaccctgctgaatgtgctggagggccgggtgtcctggagcagccccatggccgcccacctgtctgaagatgccaaggacttcatcaaggccaccctgcagagggccccccaggcccggcccagcgctgcccagtgcctgagccacccctggttcctgaagtccatgcctgctgaggaggcccacttcatcaacaccaagcagctgaagttcctgctggcccggagccgctggcagaggagcctgatgagctacaagagcatcctggtgatgaggagcatccctgagctgctgcggggccccccagacagccccagcctgggcgtggcccggcacctgtgccgggacacaggaggcagcagcagcagcagcagcagcagtgacaatgagctggccccctttgcccgggccaagagcctgccccccagccctgtgacccacagccccctgctgcacccccggggcttcctgcggcccagcgccagcctgcctgaggaggccgaggccagcgagaggagcacagaggccccagcccccccagccagccctgagggcgccggccccccagctgcccagggctgtgtgcccaggcacagcgtcatccgcagcctcttctaccaccaggccggggagagccctgagcacggggccctggcccctggcagcagaagacacccagccaggagaagacacctgctgaagggcggctacatcgccggggccctgcccggcctgcgggagcccctgatggagcaccgggtgctggaggaggaggccgcccgggaggagcaggccaccctgctggccaaggcccccagctttgaaacagccctgcggctgcctgccagcggcacccacctggcccctggccacagccacagcctggagcatgacagccccagcaccccccggcccagcagcgaggcctgtggggaggcccagaggctgcccagcgcccccagcggcggggcccccatccgggacatgggccacccccagggcagcaagcagctgcccagcactggaggccaccctggaacagcccagcctgagcggcccagcccagacagcccctggggccagcctgcccccttctgccaccccaagcagggcagcgccccccaggagggctgcagcccccaccctgctgtggccccctgccccccaggcagcttccccccaggcagctgcaaggaggcccccctggtgcccagcagccccttcctgggccagccccaggcccccccagccccagccaaggccagcccccccctggacagcaagatgggccctggggacatcagcctgcccggccggcccaagccaggcccctgcagcagccctggcagcgccagccaggccagcagcagccaggtgagcagcctgcgggtgggcagcagccaggtgggcacagagcccggccccagcctggatgctgagggctggacccaggaggccgaggacctgagtgacagcacccccaccctgcagaggccccaggagcaggccaccatgaggaagttcagcctgggcggccggggcggctacgccggcgtggccggctacggcacctttgcctttggaggagatgctgggggcatgctgggccagggccccatgtgggcccgcatcgcctgggccgtgtcccagagcgaggaggaggagcaggaggaggcccgggcagagagccagagcgaggagcagcaggaggcccgggcagagagccccctgccccaggtgtctgcccggcctgtgcctgaggtgggccgggcccccaccaggagcagccctgagcccaccccctgggaggacatcggccaggtgtccctggtgcagatccgggacctgtctggagatgctgaggccgctgacaccatcagcctggacatcagcgaggtggaccctgcctacctgaacctgagtgacctgtatgacatcaagtacctgccctttgagttcatgatcttcaggaaggtgcccaagagcgcccagcctgagccccccagccccatggccgaggaggagctggccgagttccctgagcccacctggccctggccaggagagctgggcccccacgccggcctggagatcacagaggagagtgaagatgtggatgccctgctggccgaggccgctgtgggcaggaagaggaagtggagcagccccagccgcagcctcttccacttccctggccgccacctgcccctggatgagcctgctgagctgggcctgcgggagcgggtgaaggcctctgtggagcacatcagccgcatcctgaagggccggcctgagggcctggagaaggagggcccccccaggaagaagccaggcctggccagcttccggctgagcggcctgaagtcctgggaccgggcccccaccttcctgcgggagctgagtgatgagaccgtggtgctgggccagagcgtgaccctggcctgccaggtgtctgcccagcctgctgcccaggccacctggagcaaggatggagcccccctggagagcagcagccgggtgctgatcagcgccaccctgaagaacttccagctgctgaccatcctggtggtggtggccgaggacctgggcgtgtacacctgcagcgtgtccaatgccctgggcaccgtgaccaccactggagtgctgaggaaggccgagcggcccagcagcagcccctgcccagacatcggggaggtgtatgcagatggagtgctgctggtgtggaagcctgtggagagctatggccctgtgacctacatcgtgcagtgcagcctggagggcggctcctggaccaccctggccagtgacatctttgactgctgctacctgaccagcaagctgagccggggcggcacctacaccttcagaacagcctgtgtgtccaaggccggcatgggcccctacagcagccccagcgagcaggtgctgctgggcggccccagccacctggccagcgaggaggagagccagggccgcagcgcccagcccctgcccagcaccaagacctttgccttccagacccagatccagaggggccgcttctctgtggtgcggcagtgctgggagaaggccagcggccgggccctggccgccaagatcatcccctaccaccccaaggacaagacagctgtgctgcgggagtatgaggccctgaagggcctgcggcacccccacctggcccagctgcacgccgcctacctgagccccaggcacctggtgctgatcctggagctgtgcagcggccctgagctgctgccctgcctggccgagcgggccagctacagcgagagcgaggtgaaggactacctgtggcagatgctgagcgccacccagtacctgcacaaccagcacatcctgcacctggacctgcggtctgagaacatgatcatcacagagtacaacctgctgaaggtggtggacctgggcaatgcccagagcctgagccaggagaaggtgctgcccagcgacaagttcaaggactacctggagaccatggagctgctggagggccagggcgctgtgccccagacagacatctgggccatcggcgtgacagccttcatcatgctgtctgctgagtaccctgtgagcagcgagggcgcccgggacctgcagaggggcctgaggaagggcctggtgcggctgagccgctgctacgccggcctgtctggaggagctgtggccttcctgcggagcaccctgtgtgcccagccctggggccggccctgtgccagcagctgcctgcagtgcccctggctgacagaggagggccctgcctgcagcaggcctgcccctgtgaccttccccacagcccggctgcgggtgtttgtgaggaaccgggagaagagaagagccctgctgtacaagaggcacaacctggcccaggtgaggtag

SEQ ID NO: 284489 - DNA, 7752 bp, Artificial Sequence
  derived and/or modified sequence
tgaagcagcatcaccttcagcgtgaaggtggagggccggcccgtgcccaccgtgcattggctacgcgaagaagctgagcgtggtgtgctttggattggacccgacacacccggttataccgtggcatcttctgctcagcagcacagtctcgtgcttctagacgtcggccgccagcaccagggaacatacacgtgcatcgctagcaacgcagcgggccaagcgctctgttcggcgtcactgcacgtgagcggtctgcctaaggtggaggagcaggaaaaagtcaaagaagcccttatcagcacctttctgcagggaactacacaggccatctccgctcaggggttagaaaccgcttcctttgcagacctgggaggccagcgcaaggaggagcccctcgcagccaaagaagccctgggccatttgtccctagccgaagtgggcaccgaagagtttcttcagaagctgacttcacagattaccgaaatggtcagcgctaaaattacccaggccaaacttcaggttcctggcggcgatagcgatgaggactccaagactccatctgcttcccctcggcacgggagatctagaccctcttcatcaatccaagaatctagttctgaatctgaggatggagacgccaggggagaaatttttgacatctacgtcgttacggccgactatttgccacttggcgcagagcaggacgcaatcacgcttcgggaggggcagtacgtcgaagtcctcgacgcggcacatccgctgagatggctcgtgagaacgaaaccaaccaaatcgtcaccttctcgtcaaggctgggtgtcccccgcttacctggatagacgtctgaaactctctccggagtggggcgcagccgaggctcctgagttcccaggagaggcggtatcagaggatgagtacaaggcccgcctgagctctgtgattcaagagctgctgagctccgagcaagccttcgtagaagaactgcagttcctacagtcacatcacctgcagcacctggagagatgcccccatgtgccgatcgctgtggccgggcaaaaagctgtgatatttcgtaacgtgcgggatatcgggaggttccacagctccagcttcctgcaagaactgcagcagtgcgataccgatgatgatgtggccatgtgtttcattaagaatcaggctgcttttgaacagtacttggagttcctcgtgggacgcgttcaagcagaatcagtcgtggtcagcaccgcaattcaggagttttacaagaaatatgccgaagaggctctgcttgcaggagacccgtctcagccacctcctcctcctcttcaacattacctcgagcaacctgtggaacgggtgcagaggtaccaggctctgctgaaggagctgatccgaaataaggccaggaaccgccagaactgtgctctgctagagcaggcctacgccgtggtttccgccctcccgcagcgagccgaaaacaagctacatgtgtcactgatggagaactatcctggcaccctgcaggcattaggcgagcctataagacagggccattttatcgtctgggaaggagcaccaggcgcacgaatgccttggaagggccacaaccgacatgtatttttgttccggaaccacctggtgatctgtaagcctagaagggattcacgaactgatacagtctcatatgtgttcagaaacatgatgaagctgtcgtccatcgacttaaatgaccaagtagaaggagatgatcgcgccttcgaagtgtggcaagagagagaggactcggttaggaagtacttactgcaggctcgcacagcaataataaagtcgtcttgggtcaaagagatttgtgggatacagcagagattggctcttcccgtgtggagaccccccgactttgaggaggaattggccgattgtactgccgaactgggagaaactgttaaattggcctgccgcgttaccggaacccccaaacccgtcatctcctggtacaaagatggcaaagcagtgcaggtggatcctcaccacatcctcatcgaggaccctgacggctcctgcgccctaatacttgattcactgactggcgtcgattcgggtcagtacatgtgctttgccgcatcagctgctggcaattgtagtacattaggaaaaattttggtgcaggttcctcctagatttgtaaataaagtccgcgccagccccttcgtagaaggcgaagatgcccaatttacctgcactattgagggcgccccttatcctcaaatccgttggtacaaggacggcgctcttttaacgactgggaacaaatttcagaccctgtccgagccgcgatccggactattggtcctggtcataagggcggccagcaaggaggatctgggactttatgaatgcgaactagtcaacaggttaggttcggcgcgagcatcggccgaactgcgcattcagtcacctatgctccaagctcaggaacaatgccatagagagcagctggtcgcagcggtggaggacacaacacttgaacgcgcggaccaggaggtgacgtcggttctgaagcgcctgctgggcccaaaagcacccggaccttcaacgggcgacctgacaggccccggtccttgtcccagaggcgctccagcattacaggagaccgggagccagccccccgtcaccgggacaagtgaggctcctgccgtcccacctcgcgtgccacagccattgctgcatgaagggcccgagcaggaaccagaagctatcgccagagctcaggaatggacggtccctatcaggatggaaggtgccgcgtggcccggcgccggcacaggagagctgctgtgggacgtacactctcacgtggtgcgggagaccacacaaaggacatacacctatcaggctatcgatacacacaccgcacgaccccctagcatgcaggtcaccatcgaggatgtccaggcgcagacaggcgggacggcccagttcgaggccatcatagaaggagacccccagccatctgtgacatggtataaggatagcgttcagctggttgactcaacacgccttagccagcagcaggagggaacgacctactccctggtcctgcggcatgtggcctccaaagacgccggtgtgtacacttgcttggcccagaacacaggagggcaagtgctgtgcaaggctgaacttttggtcctggggggcgacaatgagcctgactccgaaaaacaatcacatcgacgtaaactgcatagtttttacgaggtgaaagaggaaatcgggcgcggcgtgttcggattcgtaaaacgcgtccagcacaagggaaacaaaatcttgtgtgctgctaagttcatccctcttcgcagccgtacaagagcccaggcttacagggagagggacatattggcggcactgtcacaccctctggtgacaggattgctcgatcagttcgagacccggaagaccttgatcctgattttagaactgtgttcgagtgaagagctcctggatcgcctataccggaaaggcgttgtcacagaggcggaggttaaggtgtacatacaacaactcgtggaggggttacattacttacattctcatggcgtattgcacctggacattaagccttctaatatcctgatggtacatcccgcgagagaggacatcaaaatttgtgattttggattcgctcagaacatcacccctgcagaactccagttctctcaatatgggagtcctgagttcgtgtcaccagagatcatccagcaaaaccccgtgtctgaggcctcggatatttgggccatgggcgtgattagctacttgtctttaacttgttcttccccttttgctggcgagagtgatcgcgcgacgctcctgaacgttctggaaggcagagtgagctggtcctctcctatggctgcgcacctgagcgaggacgctaaagacttcattaaggctacattgcagagggctccacaggccagaccttccgctgcccagtgcctgagtcacccttggttcctgaaaagcatgcccgccgaggaagcacacttcatcaatactaaacagctgaaatttctcctggcaaggtccaggtggcagagaagcctgatgagctacaagtccatactagtgatgcgtagcatcccagaactccttaggggaccacctgattcaccttctttgggtgtggcacgccacctctgtagggatacgggcggcagtagtagtagcagtagctcttccgacaacgagctggccccctttgctcgtgcgaaaagtttgcctcccagtcccgttacccacagtccactgctgcacccccgtggattccttagaccgtcagcctctctgcctgaggaggcggaagcaagcgaacggagcactgaggctcccgctccaccggcttcccctgagggggcaggcccgcccgctgcacaggggtgcgtgccacggcattccgtgattcgatctctattctaccatcaggccggggagagtcctgaacatggggccctcgcccctggtagcaggcgccatccagcaaggagacgacacttgctcaaaggcgggtacattgctggcgcgctgccaggcttgcgagaacctctgatggagcacagagtgctggaagaagaagccgctagagaggagcaagcaaccttgttggccaaggcccccagcttcgagaccgcactgcggctccccgcaagtggaacccacctggccccaggccacagtcattcccttgaacacgactcacctagcactccacgcccatcatcagaggcgtgtggggaagcccagcgcttgccctccgccccctcaggaggggcccccatcagggatatgggccatccgcagggttccaagcagctgccatctactggcggccatcccgggaccgcacagcccgagaggccgtctcctgactctccttggggccagcccgcaccgttttgtcacccaaagcagggcagtgcacctcaggaaggctgctctccacacccggcggtggcaccatgccctccaggatcattcccgcctgggagttgtaaagaagcccctttggtgccgagttccccctttctgggtcagccacaggcccccccagctccggcaaaagcctcccccccactagattcaaaaatgggcccaggagacattagcctccccggccggccaaaacctggaccctgttcttctcctggaagtgctagccaggcttcgtcttcacaagtctcctctttgcgagtggggtccagccaggttgggaccgaacccgggcccagcttggatgcggaaggctggactcaggaggccgaagacttatctgactccacgccaacattgcagaggccccaagaacaggctactatgagaaagttttccctgggcggacgcggggggtatgccggagttgcaggctacggtacgtttgcctttggcggggacgcaggcgggatgctcgggcaaggcccgatgtgggcacggattgcatgggctgtcagccagagcgaagaagaggaacaagaggaggccagagccgagtcacagagcgaggaacaacaagaggcacgagcagaaagccccctgccgcaggtgagcgcccggcctgtgcctgaagttggaagagccccaacaagaagctctccagaaccaacaccttgggaggacattggccaggtgtctctggtgcagatacgagacctgtccggggatgctgaagctgccgataccatttctctggacattagcgaggtggatcccgcgtacttgaatctcagcgacttgtacgacattaaataccttcctttcgaattcatgatttttcgcaaggtgcctaaatccgctcaacctgagcctccttcgcccatggccgaggaagagcttgcagaattccctgaacccacatggccctggcctggtgaactcgggccccatgccggcttggaaatcacggaagagagtgaagatgtggacgccttgctggcggaagcggcagtggggaggaagaggaaatggtccagcccatcccgaagtctctttcactttccaggcaggcacctacctctcgacgaacccgcggagctgggactgcgagaacgagtgaaggcctctgtcgagcatatttctcgtattcttaagggcagacccgagggcctggagaaagagggaccacctagaaagaagcccgggctggcctcattccgactctctggtttgaagtcctgggaccgagctccaaccttcctcagggagctttccgacgaaaccgttgtactaggccagagtgtaacactggcttgccaagttagcgcgcagcctgctgctcaagcaacctggagcaaggacggggcccctttagaatcctctagtagagtgctgatcagtgctacgcttaaaaatttccagcttttgactatcctggtcgtcgtggccgaagacctgggggtttacacctgcagcgtgtcaaatgcgctgggaactgtgaccactaccggggttctgcgcaaagccgaacgacctagctcatccccttgtcccgacataggtgaggtatatgcagatggagtgcttctggtttggaaacccgtggagtcctacggccccgtgacctatattgtgcaatgctccctggaggggggttcgtggaccacccttgcttctgacatctttgactgctgttatttgacttcaaagctctctcgagggggcacatatactttcagaaccgcctgtgtgtccaaagcagggatgggcccatacagttctcccagcgaacaggtgctattggggggaccttcgcatttggcctctgaggaggaaagccagggccgaagtgcgcaaccattaccatctaccaaaaccttcgccttccagacacagatccagcggggaagattcagtgtcgtcagacaatgttgggagaaagctagcgggagggcactggcagcaaaaattatcccctaccaccccaaagacaaaaccgccgttctccgtgaatacgaagctctcaaaggtcttcgccaccctcatcttgcgcaattgcacgccgcgtatttaagcccaaggcatctggtgttgatcctggaactgtgttctggacctgaactcttgccgtgtctcgctgagcgcgcaagctactccgaatccgaggttaaagactacctctggcagatgctgtccgctacacagtacctgcacaatcaacatatccttcacctggaccttcgttcagaaaacatgataattaccgagtataacttactgaaagtggtggatcttggcaatgctcagagcctctcccaggaaaaggtactccccagcgacaagttcaaagactatctggaaacaatggagctgcttgagggccagggcgctgtcccgcagaccgatatttgggccatcggagtcaccgcttttatcatgctctccgccgagtaccccgtgagttctgaaggcgccagagacctacaaaggggactcagaaaaggccttgtcagactgtcccgatgctacgctgggctctccggcggagctgtcgccttcctccgcagtaccttgtgcgcgcagccttggggtcgcccctgcgcatcttcttgcctgcagtgcccttggttgaccgaggaaggcccagcttgttcgcgaccagccccagtgactttccccacagcaaggctgcgcgtgttcgtccgtaacagagaaaaacgccgcgcgctgctatacaaaagacataacttagcccaggtgaggtag

SEQ ID NO: 284490 - DNA, 7751 bp, Artificial Sequence
  derived and/or modified sequence
tagtcaagcataaccttctctgtgaaggttgagggtcgtcctgtgccaactgttcactggctacgggaggaagctgagcggggtgtgctatggattggccctgacacacctgggtacacggtggcttcatctgcccagcaacatagcttagtgcttctggacgtcgggaggcaacaccagggaacttatacatgcatagcatccaatgctgccggtcaggccctttgctccgccagtctgcacgtctccggcctccctaaagtcgaggagcaggagaaggtcaaagaagcacttatctccaccttcctccaggggactacccaggccatctctgcacagggcttagagacagcctcgtttgccgaccttggtggccagcggaaagaggaaccactcgctgccaaggaggccttgggacacctctctctggcagaagtcggcaccgaggaattcctgcagaaactgacatctcaaatcactgagatggtgtccgctaagatcacccaagcgaaattgcaggtccctggaggggacagcgacgaggatagtaagacgccaagcgcttcgcccaggcatggcagatcccgcccttccagcagcatacaggagtctagcagcgaatctgaggacggtgacgcccgaggtgaaatcttcgacatttatgttgtgaccgccgattatttgcccctgggggctgagcaagatgctatcacgcttcgggagggccagtatgttgaggtgctagatgccgcacacccgctcagatggctggtgaggacaaaacctactaaatctagcccttccagacaggggtgggtgtcacccgcatatctggacaggagactgaagttgtcccccgaatggggcgctgccgaggcccctgaattccccggagaggcggtgagcgaggacgagtacaaggcgagactctcttcagtgattcaggagctgcttagttcggagcaagctttcgtcgaagagttgcagttcctgcaatcacaccacctgcaacatttggagaggtgtcctcacgtacctatagctgtggctggacagaaggcagtgatatttcgaaatgtcagagatatagggaggtttcactcgagctcttttttgcaagaacttcagcagtgtgatacagatgacgatgtcgctatgtgcttcattaaaaaccaggctgcgttcgagcaatatctcgagttcttggttggaagagtgcaggcagaaagcgtggtggtttccaccgcaatacaggagttttacaagaagtatgccgaagaagctttgctggcgggagatccctcacagccgccaccgcctcctctgcagcattacctagagcagcctgtggagcgtgtgcagagataccaggcactgctcaaggaactgatccgcaacaaggctagaaacagacagaactgcgctctgttagagcaggcttacgcagtggtcagtgcgctgcctcagcgcgctgagaataagctgcatgtatccttgatggagaattacccaggtaccctccaggccctgggggagcctatcaggcagggccactttattgtctgggagggcgctcccggtgcacggatgccatggaaaggtcacaaccgtcacgtcttcctgtttcggaaccatttggtcatctgtaaaccgagaagggattcgcggaccgatactgtgtcctacgtgtttcggaatatgatgaaactgtccagtatagatctaaatgaccaggtggaaggcgatgatagagcctttgaggtctggcaggaacgggaagacagcgtccgaaaatacctgctccaagctagaacggcgattattaaaagcagctgggtgaaggaaatatgcggtatccagcagcgacttgcgttgccggtgtggcggccacccgacttcgaggaggagctagccgactgtactgcagagctaggggagacagtcaagctggcctgcagggttactgggaccccgaaacccgtaatcagttggtacaaagatgggaaggccgttcaggtcgatccacatcacatcttgatcgaggatccagatggatcttgcgcacttattctggattccctaaccggcgtagactccgggcaatatatgtgttttgccgctagtgccgcaggtaactgtagcactctcggtaaaatccttgtgcaagtgcccccacgattcgtaaacaaagtgcgcgcatccccttttgtcgaaggggaggacgcccagttcacatgcactatcgaaggcgcaccatatccgcagatccggtggtataaggacggtgctctcctcactacgggaaataagttccagactctgtctgaacctagaagcggactccttgtgttggtcatacgtgctgcaagtaaggaggatctgggactgtacgagtgcgagctggtcaaccggcttgggagcgctcgcgcttccgcggagctacggatccagtcacctatgctgcaggcccaagagcaatgtcacagagagcaactggttgcagccgtggaggataccacactggagcgggctgaccaggaagtaacatcagtcctgaaaagactgctcggaccgaaggcccctggcccatccactggggatctgacaggtccaggcccatgtccaagaggagcacctgccctgcaggaaacaggaagtcaaccgcctgtgactggtaccagtgaggctcctgccgtgccaccacgcgtcccccagccactactccacgaggggccagaacaggagccagaggcgatcgctagggcacaggaatggacagttcctatacgaatggaaggagccgcttggcccggtgccggaaccggagaactgctgtgggatgtccactctcacgtggtaagagagactacacaacgcacatacacttaccaagccatagatacacacacagctcggccaccaagcatgcaggttaccatcgaagatgtgcaggctcagaccggcggaaccgcgcagtttgaggctattattgaaggagacccacagccttctgtgacttggtacaaggactccgttcagttggttgattccactagactctcgcaacaacaggagggcaccacttactcattagtactgaggcatgttgcctctaaagacgccggagtctatacctgcctggcacagaataccggaggccaggtgctgtgcaaggctgaactccttgtgcttggcggtgacaacgaaccagactctgaaaagcaatcacaccgcagaaagttgcactccttctatgaggtaaaggaggagatcggtcgcggtgttttcggcttcgtgaagagggtgcagcataagggtaacaagatcctgtgtgccgctaaatttatccctctgagatctagaacgcgggctcaggcctacagagagagagacattctcgctgcgctgtctcaccctctggtgactggtctgttggaccaatttgaaactcgaaagactctgattctgatcctggagctgtgctcgagcgaggaacttctggacagactgtatcggaaaggtgtggttactgaagcagaagtgaaggtatatatccagcagttggtggaaggcttacattatctgcatagccacggcgtgttgcatctggacatcaaaccctcgaacatactcatggttcatccagcgagggaggatatcaagatatgcgattttggctttgcacagaacatcacaccagcagagctccagttttcgcagtatggttctcctgaatttgtctcacctgagattatccagcaaaaccctgtcagcgaggcctcagatatctgggctatgggagttattagctacctgagcctaacgtgcagtagcccctttgccggtgaatccgatcgagccacattattgaacgtgctagagggaagagtgtcttggtcctcccccatggccgcacatttgtctgaggatgccaaggacttcataaaggcaacactccagagagctccccaggctcgtcctagcgccgcacagtgcctgtcccacccttggttcctaaagtcaatgcccgcagaggaagcacacttcatcaacacgaagcagcttaagttcctgctggcaagatcgcgatggcagagatcactaatgagctacaaatctatactagttatgcggtcaatcccagagctactgcgcggaccccctgacagtccatcgttgggggtcgcacggcacctgtgccgggacaccggaggctcctcttcctcaagttcatctagcgataatgaactcgctccgtttgcacgcgctaagagtctccccccaagtcctgtaacacatagcccgctattgcatccccgaggcttcctgcgacctagcgcaagcctgccggaagaagccgaggcaagcgagcgaagcacggaggctcctgccccaccggctagcccagagggggctggcccaccagcagctcaggggtgcgtacctagacattcggtcatccggagcttgttctaccaccaggctggggaaagtccagaacacggggcactggcgcctggatctcgccgtcaccccgcacgacgccgacatttgctgaaaggcggatacatcgctggcgctctgcccggattgcgggaacccctgatggagcacagagtgttggaggaggaggccgcaagagaggaacaggccacactgctggccaaagcaccctccttcgagaccgctcttagactcccagcgtctggcactcacctcgccccaggccacagccactcccttgagcatgacagccccagcacaccaaggccgtcgtcagaagcgtgtggagaggcgcagagattgccctctgctccctccgggggagcccctattagagacatgggacacccccagggaagcaagcagctgccctccacagggggtcaccctggtacagctcagcccgaacgaccctcacctgattcaccttgggggcagcctgctccgttctgtcacccgaagcagggcagcgcccctcaggagggatgctcccctcatccagctgttgcgccatgcccccctgggtcgttccccccaggatcctgtaaggaggcgcctctagttcccagttcaccctttctagggcagccacaggcgcctcccgctccagcaaaggcttcaccgccactggatagcaagatgggacctggtgacatttctctgcctggacgtccaaagcccggaccttgttcctccccagggtccgcttcccaggcatccagttctcaagttagctctctccgggtgggtagctcccaggtggggactgaacccggaccgagcctcgacgctgaggggtggactcaggaggcagaggacttgtccgattctacccctactctgcagcgcccacaagaacaagctaccatgcggaaattttccctgggagggagaggtggctatgctggtgtggctggatacgggacgttcgctttcggtggtgatgccggaggcatgctgggtcaagggccaatgtgggcaagaatcgcttgggccgttagccaatcagaagaggaagaacaggaggaggctagggcagagagtcagagtgaagaacagcaggaggctagagccgaatcccctctgccacaggtttctgcgagacctgtgcccgaggtcggtagggcacctaccagaagctcccccgagcctaccccctgggaagacatcggccaggtgtccctggtgcagatacgagacctgagcggcgatgcagaagcagccgacacaattagcctggatataagcgaagtggaccctgcttatctgaatcttagcgacctctacgatataaagtatttgccttttgagttcatgattttcagaaaggttcccaaaagtgcacaacccgaaccacccagtcccatggccgaggaggaattagccgagttccccgaaccaacttggccctggccaggggagttgggaccccacgcgggattagaaataaccgaggaatctgaggatgttgacgcactgctggcagaagccgctgttgggcgaaagcggaagtggagcagtccgtcccggagtttgtttcactttcccggaaggcacttgccacttgacgaacccgcagaactcgggctgcgcgaacgcgtcaaagctagtgtcgaacatatctctcgcattctgaagggacgcccagagggtcttgagaaggaaggtcccccacggaagaagccaggactggccagctttagattatccggtctcaagtcctgggaccgagcccctactttcctgcgagaactcagtgatgaaacagtcgtcctgggccaatctgtcacccttgcatgccaggtttctgcccagcccgctgctcaggccacatggagtaaagacggagccccactggagagcagttcgcgcgtgctcatcagcgctactctcaagaattttcaactattgaccattctggttgtggtggccgaagatctcggagtgtatacctgttccgttagtaatgcacttgggacagtgacaaccacaggagtactccggaaggcagagagaccctcatcatccccctgtcctgacatcggggaggtctacgctgatggagttctgctggtctggaagcctgttgaatcttatggcccagtgacctatattgtacagtgtagtctggaggggggatcctggactacgttagcttcagatatttttgactgctgctacctcacgtctaaactgagtagaggaggcacctacacctttagaactgcttgtgtatccaaggctggcatgggaccatattccagtccaagtgaacaggtgcttctgggtggaccctcccatctagcctccgaagaggagtcccaggggcgatcggctcaacccctaccttcaacgaagacatttgcctttcaaacacagatccagagaggcaggttttctgtcgtcagacagtgctgggaaaaagcatctgggagggcattggccgcaaaaatcattccatatcatcccaaggataaaaccgctgtgcttagagagtacgaggccctcaaaggtctcaggcacccccacctagctcaactccacgccgcatacttgagtccccgacatctggttcttatcttggaactgtgttcaggccctgaactgctaccatgtcttgcggagagggcatcctactctgaatccgaggtgaaagactacttgtggcagatgctttcagctacccaatatttgcataaccagcacatcttacacctcgaccttagatcagagaacatgataattactgaatataacctgctgaaagtcgttgatctgggtaacgcacagtctttgtcccaggagaaagttctgccaagcgataaatttaaggactatcttgaaacgatggagctactcgaaggacagggggctgtccctcagacagacatctgggcaatcggtgtcaccgcctttatcatgttgagtgccgaatacccagtgtcaagcgagggagcacgagacttgcagcgagggcttcggaagggtctagtgaggttaagccgatgctacgcgggtttgtctggtggtgctgtggctttccttaggtcaaccctgtgtgcgcagccatggggcaggccatgcgccagctcctgtctgcagtgcccctggctcacggaagagggaccagcctgtagtcgcccagctcctgtcacatttccaactgcaaggctgagagtttttgtcaggaaccgggagaagcgccgagccctcctgtacaaacgtcacaaccttgcccaggttcggta

SEQ ID NO: 284491 - DNA, 7829 bp, Artificial Sequence
  derived and/or modified sequence
ctccagcatcaccttctctgtgaaggtagaaggacgcccggtgcccaccgtgcactggctcagggaggaggctgagagaggcgtgctgtggattggccctgacacaccgggctacaccgtggccagctctgcgcagcagcacagcctggtcctgctggacgtgggccggcagcaccagggcacctacacatgcattgccagcaacgctgccggccaggccctctgctccgccagcctgcacgtctcgggcctgcctaaggtggaggagcaggagaaagtgaaggaagcgctgatttccactttcctgcaggggaccacacaagccatctcagcacaggggttggaaactgcgagttttgctgaccttggtgggcagaggaaagaagagcctctggctgccaaggaggccctcggccacctgtccctcgctgaggtgggcacagaggagttcctgcagaaactgacctcccagatcactgagatggtatcggccaagatcacgcaggccaagctgcaggtgcccggaggtgacagtgatgaggactccaagacaccatctgcatccccccgccatggccgatcacggccatcctccagcatccaggagtcttcctcagagtcagaggacggcgatgcccgaggcgagatctttgacatctacgtggtcaccgctgactacctgcccctaggggctgagcaggatgccatcacgctgcgggaaggccagtatgtggaggtcctggatgcagcccacccactgcgctggcttgtccgcaccaagcccaccaagtccagcccctcacggcagggctgggtgtcaccagcctacctggacaggaggctcaagctgtcacctgagtggggggccgctgaggcccctgagttccctggggaggctgtgtctgaagacgaatacaaggcaaggctgagctctgtgatccaggagctgctgagttctgagcaggccttcgtggaggagctgcagttcctgcagagccaccacctgcagcacctggagcgctgcccccacgtgcccatagctgtggccggccagaaggcagtcatcttccgcaatgtgcgggacatcggccgcttccacagcagcagcttcctgcaggagttgcagcagtgcgacacggacgacgacgtggccatgtgcttcatcaagaaccaggcggcctttgagcagtacctggagttcctggtggggcgtgtgcaggctgagtcggtggtcgtcagcacggccatccaggagttctacaagaaatacgcggaggaggccctgttggcaggggacccctctcagcccccgccaccacctctgcagcactacctggagcagccagtggagcgggtgcagcgctaccaggccttgctgaaggagctgatccgcaacaaggcgcggaacagacagaactgcgcgctgctggagcaggcctatgccgtggtgtctgccctgccacagcgcgctgagaacaagctgcacgtgtccctcatggagaactacccaggcaccctgcaggccctgggcgagcccatccgccagggccacttcatcgtgtgggagggtgcaccgggggcccgcatgccctggaagggccacaaccgtcacgtgttcctcttccgcaaccacctggtaatctgcaagccccggcgagactcccgcaccgataccgtcagctacgtgttccggaacatgatgaagctgagcagcatcgacctgaacgaccaggtggagggggatgaccgcgccttcgaggtgtggcaggagcgggaggactcggtgcgcaagtacctgctgcaggcacggacagccattatcaagagctcgtgggtgaaggagatctgtggcatccagcagcgtctggccctgcctgtgtggcggcccccggactttgaagaggagctggccgactgcacagccgagctgggtgagacagtcaagctggcctgccgcgtgacgggcacacccaagcctgtcatcagctggtacaaagatgggaaagcagtgcaggtggacccccaccacatcctcattgaagaccctgatggctcgtgtgcactcatcctggacagcctgaccggtgtggactctggccagtacatgtgcttcgcggccagcgccgctggcaactgcagtaccctgggcaagatcctggtgcaagtcccaccacggttcgtgaacaaggtccgggcctcaccctttgtggagggagaggacgcccagttcacctgcaccatcgaaggcgccccgtacccgcagatcaggtggtacaaggacggggccctgctgaccactggcaacaagttccagacactgagtgagcctcgcagcggcctgctagtgctggtgatccgggcggccagcaaggaggacctggggctctacgagtgtgagctggtgaaccggctgggctccgcgcgggctagtgcggagctgcgcattcagagccccatgctgcaggcccaggagcagtgtcacagggagcagctcgtggctgcagtggaagacaccaccctggagcgagcggaccaggaggtcacatctgtcctgaagagactgctgggccccaaggcgccaggcccctccacaggggacctcactggccctggcccctgccccaggggggcacccgcactccaggaaaccggctcccagcccccagtcaccggaacttcggaggcacctgccgtgcccccgagggtgccacagcccctcctccacgaaggcccagagcaggagccggaggccattgccagagcccaggaatggactgtgcccattcggatggagggtgcagcctggcccggggcaggcacaggggagctgctctgggacgtccacagccacgtggtcagagagaccacacagaggacctacacataccaggccatcgacacgcacaccgcacggcccccatccatgcaggtaaccatcgaggatgtgcaggcacagacaggcggaacggcccaattcgaggctatcattgagggcgacccacagccctcggtgacctggtacaaggacagcgtccagctggtggacagcacccggcttagccagcagcaagaaggcaccacatactccctggtgctgaggcatgtggcctcgaaggatgccggcgtttacacctgcctggcccaaaacactggtggccaggtgctctgcaaggcagagctgctggtgcttgggggggacaatgagccggactcagagaagcaaagccaccggaggaagctgcactccttctatgaggtcaaggaggagattggaaggggcgtgtttggcttcgtaaaaagagtgcagcacaaaggaaacaagatcttgtgcgctgccaagttcatccccctacggagcagaactcgggcccaggcatacagggagcgagacatcctggccgcgctgagccacccgctggtcacggggctgctggaccagtttgagacccgcaagaccctcatcctcatcctggagctgtgctcatccgaggagctgctggaccgcctgtacaggaagggcgtggtgacggaggccgaggtcaaggtctacatccagcagctggtggaggggctgcactacctgcacagccatggcgttctccacctggacataaagccctctaacatcctgatggtgcatcctgcccgggaagacattaaaatctgcgactttggctttgcccagaacatcaccccagcagagctgcagttcagccagtacggctcccctgagttcgtctcccccgagatcatccagcagaaccctgtgagcgaagcctccgacatttgggccatgggtgtcatctcctacctcagcctgacctgctcatccccatttgccggcgagagtgaccgtgccaccctcctgaacgtcctggaggggcgcgtgtcatggagcagccccatggctgcccacctcagcgaagacgccaaagacttcatcaaggctacgctgcagagagcccctcaggcccggcctagtgcggcccagtgcctctcccacccctggttcctgaaatccatgcctgcggaggaggcccacttcatcaacaccaagcagctcaagttcctcctggcccgaagtcgctggcagcgttccctgatgagctacaagtccatcctggtgatgcgctccatccctgagctgctgcggggcccacccgacagcccctccctcggcgtagcccggcacctctgcagggacactggtggctcctccagttcctcctcctcctctgacaacgagctcgccccatttgcccgggctaagtcactgccaccctccccggtgacacactcaccactgctgcacccccggggcttcctgcggccctcggccagcctgcctgaggaagccgaggccagtgagcgctccaccgaggccccagctccgcctgcatctcccgagggtgccgggccaccggccgcccagggctgcgtgccccggcacagcgtcatccgcagcctgttctaccaccaggcgggtgagagccctgagcacggggccctggccccggggagcaggcggcacccggcccggcggcggcacctgctgaagggcgggtacattgcgggggcgctgccaggcctgcgcgagccactgatggagcaccgcgtgctggaggaggaggccgccagggaggagcaggccaccctcctggccaaagccccctcattcgagactgccctccggctgcctgcctctggcacccacttggcccctggccacagccactccctggaacatgactctccgagcaccccccgcccctcctcggaggcctgcggtgaggcacagcgactgccttcagccccctccgggggggcccctatcagggacatggggcaccctcagggctccaagcagcttccatccactggtggccacccaggcactgctcagccagagaggccatccccggacagcccttgggggcagccagcccctttctgccaccccaagcagggttctgccccccaggagggctgcagcccccacccagcagttgccccatgccctcctggctccttccctccaggatcttgcaaagaggcccccttagtaccctcaagccccttcttgggacagccccaggcaccccctgcccctgccaaagcaagccccccattggactctaagatggggcctggagacatctctcttcctgggaggccaaaacccggcccctgcagttccccagggtcagcctcccaggcgagctcttcccaagtgagctccctcagggtgggctcctcccaggtgggcacagagcctggcccctccctggatgcggagggctggacccaggaggctgaggatctgtccgactccacacccaccttgcagcggcctcaggaacaggcgaccatgcgcaagttctccctgggtggtcgcgggggctacgcaggcgtggctggctatggcacctttgcctttggtggagatgcagggggcatgctggggcaggggcccatgtgggccaggatagcctgggctgtgtcccagtcagaggaggaggagcaggaggaggccagggctgagtcccagtcggaggagcagcaggaggccagggctgagagcccactgccccaggtcagtgcaaggcctgtgcctgaggtcggcagggctcccaccaggagctctccagagcccaccccatgggaggacatcgggcaggtctccctggtgcagatccgggacctgtcaggtgatgcggaggcggccgacacaatatccctggacatttccgaggtggaccccgcctacctcaacctctcagacctgtacgatatcaagtacctcccattcgagtttatgatcttcaggaaagtccccaagtccgctcagccagagccgccctcccccatggctgaggaggagctggccgagttcccggagcccacgtggccctggccaggtgaactgggcccccacgcaggcctggagatcacagaggagtcagaggatgtggacgcgctgctggcagaggctgccgtgggcaggaagcgcaagtggtcctcgccgtcacgcagcctcttccacttccctgggaggcacctgccgctggatgagcctgcagagctggggctgcgtgagagagtgaaggcctccgtggagcacatctcccggatcctgaagggcaggccggaaggtctggagaaggaggggccccccaggaagaagccaggccttgcttccttccggctctcaggtctgaagagctgggaccgagcgccgacattcctaagggagctctcagatgagactgtggtcctgggccagtcagtgacactggcctgccaggtgtcagcccagccagctgcccaggccacctggagcaaagacggagcccccctggagagcagcagccgtgtcctcatctctgccaccctcaagaacttccagcttctgaccatcctggtggtggtggctgaggacctgggtgtgtacacctgcagcgtgagcaatgcgctggggacagtgaccaccacgggcgtcctccggaaggcagagcgcccctcatcttcgccatgcccggatatcggggaggtgtacgcggatggggtgctgctggtctggaagcccgtggaatcctacggccctgtgacctacattgtgcagtgcagcctagaaggcggcagctggaccacactggcctccgacatctttgactgctgctacctgaccagcaagctctcccggggtggcacctacaccttccgcacggcatgtgtcagcaaggcaggaatgggtccctacagcagcccctcggagcaagtcctcctgggagggcccagccacctggcctctgaggaggagagccaggggcggtcagcccaacccctgcccagcacaaagaccttcgcattccagacacagatccagaggggccgcttcagcgtggtgcggcaatgctgggagaaggccagcgggcgggcgctggccgccaagatcatcccctaccaccccaaggacaagacagcagtgctgcgcgaatacgaggccctcaagggcctgcgccacccgcacctggcccagctgcacgcagcctacctcagcccccggcacctggtgctcatcttggagctgtgctctgggcccgagctgctcccctgcctggccgagagggcctcctactcagaatccgaggtgaaggactacctgtggcagatgttgagtgccacccagtacctgcacaaccagcacatcctgcacctggacctgaggtccgagaacatgatcatcaccgaatacaacctgctcaaggtcgtggacctgggcaatgcacagagcctcagccaggagaaggtgctgccctcagacaagttcaaggactacctagagaccatggagctcctggagggccagggggctgttccacagacagacatctgggccatcggtgtgacagccttcatcatgctgagcgccgagtacccggtgagcagcgagggtgcacgcgacctgcagagaggactgcgcaaggggctggtccggctgagccgctgctacgcggggctgtccgggggcgccgtggccttcctgcgcagcactctgtgcgcccagccctggggccggccctgcgcgtccagctgcctgcagtgcccgtggctaacagaggagggcccggcctgttcgcggcccgcgcccgtgaccttccctaccgcgcggctgcgcgtcttcgtgcgcaatcgcgagaagagacgcgcgctgctgtacaagaggcacaacctggcccaggtgcgctgagggtcgccccggccacacccttggtctccccgctgggggtcgctgcagacgcgccaataaaaacgcacagccgggcgag

SEQ ID NO: 284492 - DNA, 84 bp, Artificial Sequence
  derived and/or modified sequence
aaaggaatggactggaacaaaatgaaatcgaacggtaggaatcgtacagaacggacagaaatggaacggcatggaatgcactcg

SEQ ID NO: 284493 - protein, 818 aa, Artificial Sequence
  derived and/or modified sequence
MILKDKLEKTRRESQSEREEFESEFKQQYEREKVLLTEENKKLTSELDKLTTLYENLSIHNQQLEEEVKDLADKKESVAHWEAQITEIIQWVSDEKDARGYLQALASKMTEELEALRNSSLGTRATDMPWKMRRFAKLDMSARLELQSALDAEIRAKQAIQEELNKVKASNIITECKLKDSEKKNLELLSEIEQLIKDTEELRSEKGIEHQDSQHSFLAFLNTPTDALDQFEDSFSSSSSSLIDFLDDTDPVENTYVWNPSVKFHIQSRSTSPSTSSEAEPVKTVDSTPLSVHTPTLRKKGCPGSTGFPPKRKTHQFFVKSFTTPTKCHQCTSLMVGLIRQGCSCEVCGFSCHITCVNKAPTTCPVPPEQTKGPLGIDPQKGIGTAYEGHVRIPKPAGVKKGWQRALAIVCDFKLFLYDIAEGKASQPSVVISQVIDMRDEEFSVSSVLASDVIHASRKDIPCIFRVTASQLSASNNKCSILMLADTENEKNKWVGVLSELHKILKKNKFRDRSVYVPKEAYDSTLPLIKTTQAAAIIDHERIALGNEEGLFVVHVTKDEIIRVGDNKKIHQIELIPNDQLVAVISGRNRHVRLFPMSALDGRETDFYKLSETKGCQTVTSGKVRHGALTCLCVAMKRQVLCYELFQSKTRHRKFKEIQVPYNVQWMAIFSEQLCVGFQSGFLRYPLNGEGNPYSMLHSNDHTLSFIAHQPMDAICAVEISSKEYLLCFNSIGIYTDCQGRRSRQQELMWPANPSSCCYNAPYLSVYSENAVDIFDVNSMEWIQTLPLKKVRPLNNEGSLNLLGLETIRLIYFKNKMA

SEQ ID NO: 284494 - protein, 728 aa, Artificial Sequence
  derived and/or modified sequence
  misc_feature (1)..(1): Xaa can be any naturally occurring amino acid
XVSDEKDARGYLQALASKMTEELEALRNSSLGTRATDMPWKMRRFAKLDMSARLELQSALDAEIRAKQAIQEELNKVKASNIITECKLKDSEKKNLELLSEIEQLIKDTEELRSEKGIEHQDSQHSFLAFLNTPTDALDQFEDSFSSSSSSLIDFLDDTDPVENTYVWNPSVKFHIQSRSTSPSTSSEAEPVKTVDSTPLSVHTPTLRKKGCPGSTGFPPKRKTHQFFVKSFTTPTKCHQCTSLMVGLIRQGCSCEVCGFSCHITCVNKAPTTCPVPPEQTKGPLGIDPQKGIGTAYEGHVRIPKPAGVKKGWQRALAIVCDFKLFLYDIAEGKASQPSVVISQVIDMRDEEFSVSSVLASDVIHASRKDIPCIFRVTASQLSASNNKCSILMLADTENEKNKWVGVLSELHKILKKNKFRDRSVYVPKEAYDSTLPLIKTTQAAAIIDHERIALGNEEGLFVVHVTKDEIIRVGDNKKIHQIELIPNDQLVAVISGRNRHVRLFPMSALDGRETDFYKLSETKGCQTVTSGKVRHGALTCLCVAMKRQVLCYELFQSKTRHRKFKEIQVPYNVQWMAIFSEQLCVGFQSGFLRYPLNGEGNPYSMLHSNDHTLSFIAHQPMDAICAVEISSKEYLLCFNSIGIYTDCQGRRSRQQELMWPANPSSCCYNAPYLSVYSENAVDIFDVNSMEWIQTLPLKKVRPLNNEGSLNLLGLETIRLIYFKNKMA

SEQ ID NO: 284495 - DNA, 2457 bp, Artificial Sequence
  derived and/or modified sequence
atgatcctgaaggataaactggagaaaacgcgacgcgagtcccagtcagagagagaagagtttgaatctgaattcaagcagcagtacgaaagggagaaggtgttgcttacagaagaaaataagaaacttacgtcggagctcgataagctcacaacattgtatgaaaacttgagtattcataatcagcagcttgaagaggaggtgaaggatttggcagataaaaaggagtccgttgcccattgggaggcccagattacggagattatccagtgggtatccgacgaaaaagacgcccggggctacctgcaggctctcgcgagtaaaatgaccgaagaactggaggccctgcgtaattcttctctcggaacacgtgccaccgacatgccctggaaaatgcggcggtttgccaagcttgatatgtctgcaagactcgagctgcagtctgctctggacgctgaaattcgggctaaacaggccatccaggaggagctaaataaggtgaaggcctctaacattatcacagaatgcaagctgaaagactccgagaaaaaaaacttagagctgcttagcgagatcgagcaactaattaaggatacagaggaactgcgcagcgaaaaggggattgagcatcaggacagtcagcattctttcctggcctttctgaacactcctactgacgcgctggaccagtttgaggatagcttctcctcctcgtcctcttcgctaatcgactttttagatgacactgaccccgtggaaaacacttatgtgtggaatccctcagttaaattccacatccagagtcgctccacttccccttccacatcatcggaagctgagcctgttaaaactgtagattcgaccccactgtccgtacacaccccaactctccgtaagaagggttgccctggatctacgggctttccgccaaaaagaaaaactcaccagttctttgtgaaaagcttcacaaccccaacaaagtgccatcagtgcactagcctcatggtgggtctcattaggcagggttgctcctgtgaagtgtgcggattttcatgccacataacctgtgttaacaaggcacctacaacgtgtcccgtccccccggagcagaccaagggacctctgggaatcgaccctcagaaaggcatcggtaccgcatacgaaggacatgtgcggataccgaagcccgcgggagtgaaaaaaggctggcagagagcgctcgcaatcgtgtgcgattttaaactctttctgtacgatatcgcagagggtaaagcatcacaacccagcgttgtgatctcacaggtcattgatatgcgtgatgaggaattctccgtcagcagcgtcctagcctccgacgtcatacacgctagtagaaaggacatcccttgcattttcagggtcaccgcttctcaactttctgcttcgaataacaaatgttctatcttgatgctggcagacacagagaacgagaagaacaaatgggtgggggtcctgtctgagctgcacaagattcttaaaaaaaataagtttcgggaccggagtgtgtatgtgcccaaggaagcctatgattccaccctgccccttattaagacaacccaggccgccgccattatcgaccacgaacggatcgcactcggtaatgaggaggggctcttcgttgtacacgtgaccaaagacgagataatccgggtgggcgacaacaagaagatccaccagatcgagcttatacccaacgatcagctggtggctgtcattagcggacgcaatcgccacgtccggctctttccaatgtccgcccttgatggccgtgaaactgatttctataagctgtcagagaccaagggctgtcaaactgtgacgagcgggaaggtcagacacggcgccctaacctgcctgtgcgtagcgatgaaacgacaggtcttatgctatgagctcttccagtctaagacacgacacagaaaattcaaagaaatccaagtaccttacaacgtccagtggatggccatcttcagtgaacagttatgtgtcgggttccagtctggctttctcagatatcccttaaacggggagggaaacccctacagcatgctccatagcaacgaccacaccctgagctttatcgctcaccagcctatggacgctatttgtgccgtcgaaattagtagcaaggagtatctgctgtgtttcaatagcatagggatctacaccgattgccaaggccgccgatcgcgtcagcaggagcttatgtggcccgcaaacccctcctcgtgttgttacaacgcgccttacctgagcgtctactctgaaaatgcagttgatattttcgacgtgaactccatggaatggatccagaccctgcctcttaaaaaggttcgtccgctgaacaatgaaggaagtctgaatctcctggggctggagacaattagacttatctatttcaaaaacaagatggcttag

SEQ ID NO: 284496 - DNA, 2187 bp, Artificial Sequence
  derived and/or modified sequence
tgagtgagcgatgaaaaggacgcaaggggctacctccaggcactggcgtcaaaaatgaccgaggaactggaggcgctccgaaatagctccctgggaacgagagctaccgacatgccctggaagatgaggcgattcgctaagctggacatgtccgcacggctcgaactgcagtcagctcttgatgccgaaattagagccaaacaggccattcaggaggagttgaacaaggttaaagcctctaacatcattacagagtgtaagcttaaggattccgaaaaaaaaaacttagagttgttgagtgagatcgaacagctaattaaagatacagaggaactccgttccgaaaagggtattgagcaccaagacagtcaacattcctttctcgcctttctgaacaccccaaccgacgcactggaccagtttgaagattccttcagtagttcttcaagctctctcattgatttcctcgatgatacggatccagttgaaaatacatatgtatggaacccttcagtgaaatttcacatccagtctaggagcacatctccttcgacaagctcagaagctgagcctgtgaaaacggtggactcaacaccactgtccgttcatacccctacactccggaagaaaggctgtcccggctcaacaggattccctccgaagagaaagacccatcagtttttcgtgaagagctttacgacccctacaaaatgccatcagtgcacttccctgatggtagggctcataaggcaaggctgttcttgtgaagtctgcggattctcttgtcacataacatgcgtcaataaggccccgacaacctgcccagtgccaccagaacagaccaagggtccgctgggaatagacccacagaaagggataggtaccgcctatgagggccatgtgagaatccccaagcctgccggggtgaagaagggctggcaacgggctctggctatagtctgtgatttcaagctgtttttgtatgacatcgcagagggaaaagcttcacagccatcagtggtgatttcacaggtaatagacatgcgggatgaagaattctctgtttctagcgtcctggctagcgatgtcatccacgcatctcgaaaggacatcccctgtatatttcgggtcaccgcatcacagctgtcagccagtaataataaatgtagcatcctgatgttggcggacaccgaaaacgagaaaaataaatgggtaggggtcctctccgagctccacaagatactgaagaagaacaaatttagagatcgaagcgtctacgtgcccaaagaggcttacgacagcacccttcctttaatcaagacaacacaggccgccgctattattgatcacgaacgaatagccctcgggaatgaggaaggtcttttcgtagtccatgtaacgaaggatgagatcatacgggtgggtgacaacaaaaagatccatcaaatagaattgatccccaacgatcagcttgtcgctgtaatcagtggccggaaccggcacgtccgactctttcctatgagtgcactcgacggtcgagagactgatttttacaaactctccgaaactaaaggatgccaaacagtcacgtcagggaaggtgcgacatggagctttaacatgcctttgcgtcgcaatgaagcggcaggtcctgtgttacgagctcttccagagtaagactaggcatagaaagttcaaggagatacaagtcccctataatgtgcagtggatggccatcttctccgaacagctgtgtgtgggtttccagtcaggtttcctccgatacccgctgaatggagagggcaatccctattccatgctgcactccaacgatcacaccctgagttttatcgctcatcaaccaatggatgcaatttgtgccgtggagatcagcagtaaggagtatttattgtgctttaatagcatcggtatctataccgactgccagggacggcggagtcgccaacaagagctgatgtggcctgctaaccccagctcgtgttgttacaatgccccttatctctctgtgtacagcgagaatgccgttgacatatttgacgtgaattccatggaatggattcagactctgcccctcaaaaaggtccgcccattaaataacgaaggtagtttgaatcttttgggtctggagacaatcagattaatctacttcaaaaacaagatggcatag

SEQ ID NO: 284497 - DNA, 2457 bp, Artificial Sequence
  derived and/or modified sequence
atgatcctgaaggacaagctggagaagacccggcgggagagccagagcgagcgggaggagtttgaaagtgagttcaagcagcagtatgagcgggagaaggtgctgctgacagaggagaacaagaagctgaccagcgagctggacaagctgaccaccctgtatgagaacctgagcatccacaaccagcagctggaggaggaggtgaaggacctggccgacaagaaggagagcgtggcccactgggaggcccagatcacagagatcatccagtgggtgtctgatgagaaggatgcccggggctacctgcaggccctggccagcaagatgacagaggagctggaggccctgaggaacagcagcctgggcacccgggccacagacatgccctggaagatgagaagatttgccaagctggacatgtctgcccggctggagctgcagagcgccctggatgctgagatccgggccaagcaggccatccaggaggagctgaacaaggtgaaggccagcaacatcatcacagagtgcaagctgaaggacagcgagaagaagaacctggagctgctgtctgaaattgagcagctgatcaaggacacagaggagctgcggtctgagaagggcatcgagcaccaggacagccagcacagcttcctggccttcctgaacacccccacagatgccctggaccagtttgaggacagcttcagcagcagcagcagcagcctgattgacttcctggatgacacagatcctgtggagaacacctacgtgtggaaccccagcgtgaagttccacatccagagccgcagcaccagccccagcaccagcagcgaggccgagcctgtgaagacagtggacagcacccccctgtctgtgcacacccccaccctgaggaagaagggctgccccggcagcacaggcttcccccccaagaggaagacccaccagttctttgtgaagagcttcaccacccccaccaagtgccaccagtgcaccagcctgatggtgggcctcatccggcagggctgcagctgtgaggtgtgtggcttcagctgccacatcacctgtgtgaacaaggcccccaccacctgccctgtgcccccagagcagaccaagggccccctgggcatcgacccccagaagggcattggaacagcctatgagggccacgtgcgcatccccaagccagctggggtgaagaagggctggcagagggccctggccatcgtgtgtgacttcaagctgttcctgtatgacattgctgagggcaaggccagccagcccagcgtggtgatcagccaggtgattgacatgagagatgaggagttctctgtgtcctctgtgctggccagtgatgtgattcatgccagcaggaaggacatcccctgcatcttccgggtgacagccagccagctgagcgccagcaacaacaagtgcagcatcctgatgctggccgacacagaaaatgagaagaacaagtgggtgggcgtgctgtctgagctgcacaagatcctgaagaagaacaagttccgggacagatctgtgtatgtgcccaaggaggcctatgacagcaccctgcccctcatcaagaccacccaggccgccgccatcatcgaccacgagagaattgccctgggcaatgaggagggcctgtttgtggtgcacgtgaccaaggatgagatcatccgggtgggggacaacaagaagatccaccagatcgagctgatccccaatgaccagctggtggccgtcatcagcggcaggaacagacatgtgcggctcttccccatgtctgccctggatggccgggagacagacttctacaagctgtctgagaccaagggctgccagacagtgaccagcggcaaggtgcgccacggggccctgacctgcctgtgtgtggccatgaagaggcaggtgctgtgctatgagctgttccagagcaagaccaggcacaggaagttcaaggagatccaggtgccctacaacgtgcagtggatggccatcttcagcgagcagctgtgtgtgggcttccagagcggcttcctgcgctaccccctgaatggagagggcaacccctacagcatgctgcacagcaatgaccacaccctgtccttcatcgcccaccagcccatggatgccatctgtgctgtggagatcagcagcaaggagtacctgctgtgcttcaacagcatcggcatctacacagactgccagggcagaagaagccggcagcaggagctgatgtggccagccaaccccagcagctgctgctacaatgccccctacctgtctgtgtacagtgaaaatgctgtggacatctttgatgtgaacagcatggagtggatccagaccctgcccctgaagaaggtgcggcccctgaacaatgaaggcagcctgaacctgctgggcctggagaccatccgcctcatctacttcaagaacaagatggcctag

SEQ ID NO: 284498 - DNA, 2187 bp, Artificial Sequence
  derived and/or modified sequence
tgagtgtctgatgagaaggatgcccggggctacctgcaggccctggccagcaagatgacagaggagctggaggccctgaggaacagcagcctgggcacccgggccacagacatgccctggaagatgagaagatttgccaagctggacatgtctgcccggctggagctgcagagcgccctggatgctgagatccgggccaagcaggccatccaggaggagctgaacaaggtgaaggccagcaacatcatcacagagtgcaagctgaaggacagcgagaagaagaacctggagctgctgtctgaaattgagcagctgatcaaggacacagaggagctgcggtctgagaagggcatcgagcaccaggacagccagcacagcttcctggccttcctgaacacccccacagatgccctggaccagtttgaggacagcttcagcagcagcagcagcagcctgattgacttcctggatgacacagatcctgtggagaacacctacgtgtggaaccccagcgtgaagttccacatccagagccgcagcaccagccccagcaccagcagcgaggccgagcctgtgaagacagtggacagcacccccctgtctgtgcacacccccaccctgaggaagaagggctgccccggcagcacaggcttcccccccaagaggaagacccaccagttctttgtgaagagcttcaccacccccaccaagtgccaccagtgcaccagcctgatggtgggcctcatccggcagggctgcagctgtgaggtgtgtggcttcagctgccacatcacctgtgtgaacaaggcccccaccacctgccctgtgcccccagagcagaccaagggccccctgggcatcgacccccagaagggcattggaacagcctatgagggccacgtgcgcatccccaagccagctggggtgaagaagggctggcagagggccctggccatcgtgtgtgacttcaagctgttcctgtatgacattgctgagggcaaggccagccagcccagcgtggtgatcagccaggtgattgacatgagagatgaggagttctctgtgtcctctgtgctggccagtgatgtgattcatgccagcaggaaggacatcccctgcatcttccgggtgacagccagccagctgagcgccagcaacaacaagtgcagcatcctgatgctggccgacacagaaaatgagaagaacaagtgggtgggcgtgctgtctgagctgcacaagatcctgaagaagaacaagttccgggacagatctgtgtatgtgcccaaggaggcctatgacagcaccctgcccctcatcaagaccacccaggccgccgccatcatcgaccacgagagaattgccctgggcaatgaggagggcctgtttgtggtgcacgtgaccaaggatgagatcatccgggtgggggacaacaagaagatccaccagatcgagctgatccccaatgaccagctggtggccgtcatcagcggcaggaacagacatgtgcggctcttccccatgtctgccctggatggccgggagacagacttctacaagctgtctgagaccaagggctgccagacagtgaccagcggcaaggtgcgccacggggccctgacctgcctgtgtgtggccatgaagaggcaggtgctgtgctatgagctgttccagagcaagaccaggcacaggaagttcaaggagatccaggtgccctacaacgtgcagtggatggccatcttcagcgagcagctgtgtgtgggcttccagagcggcttcctgcgctaccccctgaatggagagggcaacccctacagcatgctgcacagcaatgaccacaccctgtccttcatcgcccaccagcccatggatgccatctgtgctgtggagatcagcagcaaggagtacctgctgtgcttcaacagcatcggcatctacacagactgccagggcagaagaagccggcagcaggagctgatgtggccagccaaccccagcagctgctgctacaatgccccctacctgtctgtgtacagtgaaaatgctgtggacatctttgatgtgaacagcatggagtggatccagaccctgcccctgaagaaggtgcggcccctgaacaatgaaggcagcctgaacctgctgggcctggagaccatccgcctcatctacttcaagaacaagatggcctag

SEQ ID NO: 284499 - DNA, 2457 bp, Artificial Sequence
  derived and/or modified sequence
atgatcctgaaggacaagctggagaagacccggcgggagagccagagcgaacgggaagaatttgagtctgagtttaagcagcaatacgagcgtgagaaggtgcttctcacagaagaaaataagaaactcacttctgagcttgacaaattaacaacattatacgagaatctttccattcacaaccaacagctcgaagaggaagtcaaggatctggccgacaagaaggagagcgttgcacattgggaagcacagataacggagatcatccaatgggtgtccgacgagaaggatgcccgcggatatcttcaggcattagccagcaagatgaccgaggagctcgaggccctgcggaattcctcgttggggaccagagccactgatatgccctggaagatgcggagatttgccaagttagacatgagtgcccggcttgagcttcagtcagcactggacgccgagatccgagcgaaacaggccattcaggaagagctgaacaaggtgaaagcaagtaacattatcactgaatgcaagttaaaggactcagagaagaagaatttggaacttttatcagagatcgagcagttgatcaaagataccgaggagcttcgaagtgagaaaggcattgaacatcaagattcccagcattctttcttagcattcctaaacacaccgacggacgctctcgatcagtttgaggactctttcagttcttcgagctctagcctgattgatttcctggatgataccgatccagtggaaaatacgtacgtctggaatccgagtgttaagttccatatccagtcccgttcaacttcccccagcacttctagcgaagcagaacctgtgaagacagtggactccacacccttaagtgtgcatactcctaccttgcggaagaagggatgcccaggcagtacgggattccctcctaaacgaaagacacatcagttctttgtcaagtcctttactactccaactaagtgtcaccaatgtaccagcctgatggtggggctgatcaggcagggctgcagttgcgaagtgtgtgggtttagctgccatattacatgtgtgaacaaggcaccgacgacatgtccagtgccaccagagcagacaaaaggtcccctgggtatcgaccctcaaaaaggcattggaacagcctatgagggacacgtgcgaatcccgaaacctgccggcgtcaaaaaaggctggcagagggccttggctattgtgtgtgattttaaactctttctgtatgacattgccgagggcaaagcttcccagccatctgtggtgatcagccaggtaatagatatgagagacgaagaattcagtgtgagctcagtcctcgcttctgacgtgattcacgctagtagaaaggatataccttgtatatttcgagtcactgcctcacagctctctgcctccaataacaaatgtagcatactgatgctggcggatactgaaaatgagaaaaacaagtgggtgggcgtcctgagcgaactgcacaaaattctgaagaaaaataaatttcgggatagatcagtatacgtgccgaaggaagcctacgactcaactctcccgttgatcaagaccactcaagcggccgcaatcattgatcacgagaggattgccctcggcaacgaagaagggctgttcgttgtgcacgtgacaaaggatgaaatcattcgggtgggcgacaataagaagatccaccaaatcgagctgatcccgaatgatcaactggttgccgtcatctctggcagaaatcgacacgtgaggctttttccaatgtcagccctggatggcagagaaaccgacttctataagctgtccgagacaaaaggatgtcagaccgtgacgtcaggaaaggtccgtcatggcgcactcacatgcctgtgtgtggccatgaaacggcaggttttgtgctacgagctctttcagtctaaaacccgacatcgaaaattcaaagagattcaggtgccctataacgtccagtggatggccattttctctgaacagttgtgcgtaggattccagtcaggattcctgaggtatccattgaatggggaaggcaacccctacagcatgctccatagtaacgaccacacgctcagtttcattgcccatcagcccatggacgctatttgcgccgtagagatttcctctaaagagtacctgttgtgctttaatagcatcggaatttacaccgattgtcagggacgcagatccagacagcaggagcttatgtggccagccaacccctcttcttgctgctataacgccccttacctgtctgtgtactccgaaaatgctgtggacatcttcgacgtaaattcgatggagtggatacagaccctacccctgaagaaagtgaggccattgaacaatgagggaagtttgaacctcctggggctagaaactattcggttgatatattttaaaaataaaatggcttag

SEQ ID NO: 284500 - DNA, 2187 bp, Artificial Sequence
  derived and/or modified sequence
tgagtgagcgacgagaaggacgcccggggctacctgcaggccctggcctctaagatgacagaggaattggaagcgctaaggaacagcagtttgggtaccagggctacagacatgccatggaagatgagacggttcgctaagctggacatgagtgccaggctggaacttcagtctgcccttgacgctgaaataagggccaagcaggcaatccaggaggagctgaacaaggtaaaggcctccaatatcattaccgaatgtaagctcaaggactccgagaagaagaatcttgaactcctgagcgagattgaacagctgattaaggacacggaggagttgcggagcgaaaaaggtattgagcaccaggactctcagcatagtttcttagcatttctgaacaccccaacggatgcactcgatcaatttgaagatagcttctcttcctcgtcatccagcttaatagatttccttgacgacaccgaccctgtagaaaatacctacgtatggaacccgtctgtgaaatttcatattcagtcacggagtactagcccctctacaagctcagaggctgaaccagttaaaactgtcgatagcactcctctgagcgtccatacacctacgttgcggaaaaagggatgtcccgggtccaccgggttcccgccaaaacgtaagactcatcagttctttgtaaagtccttcacgactcccactaagtgtcatcagtgtacctctctaatggtcggtctgataaggcagggatgttcctgtgaggtgtgcggctttagttgccacatcacatgtgtgaacaaagcccctaccacttgccctgtgccaccagagcagactaagggtcccttgggaatcgatccccaaaaagggattgggacagcatatgaaggacacgtacgcattccaaagccagcaggtgtgaagaaaggatggcaaagagccctagctatcgtgtgtgacttcaagttatttttgtatgacatagcagagggaaaagcttctcagccctctgttgtcatatcgcaagtcatcgacatgagggacgaggaattttccgtgagcagtgtgctggcatccgatgtgatccacgcctccaggaaagatattccttgcattttcagggttacggcgtcccagttgagtgccagcaacaacaagtgtagcattctaatgctcgctgacaccgaaaatgaaaaaaacaaatgggtgggagtgctgtcagagttgcacaaaatcctgaagaagaataaattcagagatcggagcgtgtacgtccccaaagaagcctacgattccactctccccctgataaaaacaacccaagctgctgcgatcattgatcacgagcgaatcgctctaggcaacgaggaaggcctgttcgtggtgcacgtgactaaggatgagattatcagagtaggcgacaacaaaaagattcaccagattgaacttatcccaaatgatcagttggttgctgttataagcggtcgcaataggcatgtcagactattccccatgagcgccttagacggtagggagacagacttctataagctgagcgagacaaaaggatgccagaccgtgacatctggcaaagtacggcatggcgcgttaacctgcttgtgcgtcgcaatgaaacgccaggtcctgtgctacgagctgttccaatctaagactcggcaccgtaagtttaaggagatccaggttccctacaacgtacagtggatggcaatattctccgaacaactctgcgtggggttccagtcagggtttctgaggtatccgctgaatggagaaggtaatccatacagcatgctgcatagtaacgatcacacattgagtttcattgcccatcagccaatggacgcaatttgcgccgtggaaatttcttccaaagagtatttgctatgctttaatagtattggcatttatacagactgccagggcagacggtcccgacaacaggagctgatgtggcccgctaacccaagctcatgttgttacaacgctccctacctcagtgtttacagcgaaaacgccgtggacatatttgatgtgaattctatggaatggatacagacgcttcccttgaagaaagtccgacctctgaacaacgaggggagtctgaacttactgggactggaaacaattagattgatctacttcaaaaataaaatggcctag

SEQ ID NO: 284501 - DNA, 2457 bp, Artificial Sequence
  derived and/or modified sequence
atgattttgaaggataagctggagaaaacccgtagagaaagccagtccgagagagaggaatttgagtctgaatttaagcaacagtacgaaagagagaaagtcttgctgaccgaagagaataaaaagctgacttcagagcttgacaaattaaccacattgtatgaaaatctgtctatacacaatcaacagctggaagaagaagtcaaagacttggctgacaaaaaagaatctgttgcccactgggaggcacaaattacggaaatcatccagtgggtgtctgatgagaaagatgcgagaggctatctgcaggccctcgcctctaagatgaccgaagagttggaagcgctccgaaactcgagcctggggactcgagcaactgacatgccctggaaaatgcgcaggtttgctaagcttgatatgagtgctcggcttgagctccagtcagctctggacgccgagatcagagccaagcaggcgattcaagaggagctgaacaaagtaaaggcctccaatattataaccgaatgtaaactcaaagattcggagaaaaagaacttagaactactcagtgagattgagcagctaatcaaagatactgaggagctccgttccgagaaagggatcgagcatcaggactcccaacactcttttctcgccttcttaaacacacctaccgatgctttggatcagttcgaggattcattttcctcttcaagtagttctctgatagatttccttgacgacaccgatcccgtggagaatacctatgtgtggaatccaagcgtgaaattccatatccagagcaggagcacctccccaagtacatctagtgaagctgaaccagttaaaaccgtggattccaccccactgagcgtgcacacgccgactctgcgtaagaaggggtgcccagggagcaccggcttccccccaaagagaaagacacaccagttcttcgtcaaaagttttaccacacccaccaagtgtcatcaatgtacctccctgatggtgggactgatcaggcagggctgcagctgtgaagtctgcggcttttcttgccacatcacttgcgtgaataaagcgccaaccacttgtcctgtccctcctgaacagaccaagggtccgctgggaatcgaccctcaaaaaggcatcggaacagcctatgagggccacgtgcggatccctaaaccagctggggtaaaaaaaggctggcaaagagcgttggccattgtctgcgatttcaagctgttcttatacgacatcgccgagggtaaagcttcccaaccttctgtggttatttcacaggtcatcgatatgcgtgacgaggagttctcagtgtcatccgtgctggctagtgacgtgatccacgcgtcgcgaaaagacatcccctgcattttcagggtgaccgcctcacagctgagcgcttcaaataacaagtgctccattctgatgttagccgacacggaaaatgaaaagaataaatgggtgggagtgctctcagaactgcataagatcctgaagaagaataaattcagggatcggtcagtctatgtgccgaaggaagcatacgacagcacactccccctcattaagacaacccaggccgctgctatcattgatcatgagagaattgccctgggaaatgaggagggtctgtttgtcgtccacgtcaccaaggatgaaattatccgggtgggcgataataaaaaaattcaccaaatcgagctgattccaaatgatcagcttgtggccgtgataagcggaagaaatcgccatgtgcgtctcttcccgatgtcagccttggacggcagagaaaccgatttttacaagcttagcgaaacaaaaggatgtcagactgtaaccagcggtaaggttcggcacggtgccctcacctgcctttgtgttgccatgaagcggcaggtactgtgttatgagctattccaatcaaaaacccggcatcgcaaattcaaggagattcaggtgccctacaatgtgcagtggatggctattttctccgagcaactatgtgttggatttcagtcaggcttcctgcgttaccctctaaatggagagggaaatccttactccatgcttcatagcaacgaccacactttgtcttttatagcgcatcagcctatggacgccatttgcgccgtggagatatcgagcaaagaatacctgctttgctttaatagcatcggtatctacaccgactgccagggacggagaagtaggcagcaggaactcatgtggccagctaaccctagcagctgctgttacaatgccccttatctctcagtctactctgagaacgccgtagatattttcgatgtgaacagtatggagtggatacagaccctacctctgaagaaggttcgaccccttaataatgaaggaagcctgaatcttctcggattggagaccattcgcctgatctactttaagaataagatggcttag

SEQ ID NO: 284502 - DNA, 2187 bp, Artificial Sequence
  derived and/or modified sequence
taagttagcgatgaaaaagatgcaaggggttatttacaagcattagcctctaagatgacagaggaacttgaagccctccggaatagcagcctgggaacccgggctacagacatgccatggaagatgaggcggtttgcgaagctggacatgtcagcaaggctggagctccagtcagcgctggatgccgaaatccgagccaaacaggcaatccaggaagaactgaataaggtgaaagccagcaacatcatcacagaatgcaaactgaaagacagcgagaaaaagaacctcgagctgctgagtgagatagagcaactgatcaaagacactgaagagcttcgttcggagaaaggcatagagcatcaggacagccagcattcatttcttgcatttctaaacacaccaactgacgccctagatcaatttgaagatagtttttcgagcagcagttcgtccctgatagattttctggacgataccgacccggtggagaacacctatgtgtggaaccccagcgtcaagtttcacattcagtcccgatccacatctccatcaacatcgagcgaggccgagcccgttaaaacagtagactctacccctctcagcgttcatacccctacgctccggaagaaggggtgccccggtagcactgggttcccacctaaacgcaagacgcaccaattcttcgtgaaaagttttacaacacccacaaagtgccatcagtgtactagtctgatggtgggtcttatccggcagggctgttcttgcgaagtttgtggattcagctgtcatatcacctgcgtcaacaaagcccctacgacatgccctgtgccgcctgagcagactaaaggcccactaggtatagatcctcagaaggggattggtactgcgtacgaaggacatgtacgcatcccaaagcccgcaggagtgaagaaggggtggcaacgcgctcttgccatcgtgtgcgactttaagcttttcctctacgatattgctgagggcaaggcttcacagccgtcggttgtcatatctcaagtcatcgatatgagagacgaggagttctcggtatcatctgtgctcgcttccgatgtaatacacgcctctcggaaagacatcccatgtatattccgggtcactgctagtcagctgagcgccagcaataacaagtgctccatcctcatgctggcagacacagagaacgagaaaaataagtgggtgggagtgctctcagagttgcacaaaatcttgaagaagaacaaattccgcgaccggtccgtgtacgtgccaaaggaggcctacgacagcacgttgcctctgataaagaccacgcaagcagccgcaattatcgatcatgagcgcattgccctgggaaatgaagaaggcctgttcgtggttcatgtgaccaaagatgagattattagggtcggtgataacaaaaaaattcaccagatagaacttattccaaatgatcaactcgttgcagttatctctggtaggaatcgtcatgtgagattgttccctatgtccgcattagacgggcgagagacagatttttataagctcagtgaaaccaagggctgtcagaccgtcacttccggtaaggtgaggcacggcgcactgacctgcctgtgcgtggctatgaaacgccaggtgctttgttacgagctttttcagagtaagactcgtcaccgaaagtttaaggagatccaagtaccttacaacgtccagtggatggctatattcagcgaacagttgtgcgtcggttttcagagcgggttcctgagataccctttaaacggagaaggcaacccatactctatgctgcacagcaacgaccacactctgtcttttatcgcacaccagcccatggacgctatctgtgcagtcgagatatctagcaaagaatatctcctgtgctttaattccattggaatttacactgactgtcaagggaggaggtctcgccaacaggagctcatgtggccagcgaatccatcctcctgctgttataatgcgccttatctctcagtgtattccgagaacgctgtcgatattttcgacgttaactctatggagtggatccaaacactgcctttgaaaaaagtgcgacctctgaacaatgaggggtccctgaacctgttgggcctggaaaccatccggctaatttatttcaagaataagatggcatag

SEQ ID NO: 284503 - DNA, 2183 bp, Artificial Sequence
  derived and/or modified sequence
ggtcagcgatgaaaaggatgcacgagggtatcttcaggccttagcttctaaaatgactgaagaattggaggcattaagaaattccagcttgggtacacgagcaacagatatgccctggaaaatgcgtcgttttgcgaaactggatatgtcagctagactggagttgcagtcggctctggatgcagaaataagagccaaacaggccatccaagaagagttgaataaagttaaagcatctaatatcataacagaatgtaaactaaaagattcagagaagaagaacttggaactactctcagaaatcgaacagctgataaaggacactgaagagcttagatctgaaaagggtatagagcaccaagactcacagcattctttcttggcatttttgaatacgcctaccgatgctctggatcaatttgaagattccttttcttcttcctcatcttcactgattgattttttggatgacactgatcccgttgagaacacatatgtatggaacccgagcgtcaagtttcacatccagtcacggtccacatctccttccacatctagtgaagctgagccagttaagactgtagactccactccactttcagttcacacaccaaccttaaggaaaaaaggatgtcctggttcaactggctttccacctaagcgcaagactcaccagttttttgtaaaatcttttactactcctaccaagtgtcatcagtgtacctccttgatggtgggtttaataagacagggctgttcatgtgaagtgtgtggattctcatgccatataacttgtgtaaacaaagctccaaccacttgtccagttcctcctgaacagacaaaaggtcccctgggtatagatcctcagaaaggaataggaacagcatatgaaggtcatgtcaggattcctaagccagctggagtgaagaaagggtggcagagagcactggctatagtgtgtgacttcaaactctttctgtacgatattgctgaaggaaaagcatctcagcccagtgttgtcattagtcaagtgattgacatgagggatgaagaattttctgtgagttcagtcttggcttctgatgttatccatgcaagtcggaaagatataccctgtatatttagggtcacagcttcccagctctcagcatctaataacaaatgttcaatcctgatgctagcagacactgagaatgagaagaataagtgggtgggagtgctgagtgaattgcacaagattttgaagaaaaacaaattcagagaccgctcagtctatgttcccaaagaggcttatgacagcactctacccctcattaaaacaacccaggcagccgcaatcatagatcatgaaagaattgctttgggaaacgaagaagggttatttgttgtacatgtcaccaaagatgaaattattagagttggtgacaataagaagattcatcagattgaactcattccaaatgatcagcttgttgctgtgatctcaggacgaaatcgtcatgtacgactttttcctatgtcagcattggatgggcgagagaccgatttttacaagctgtcagaaactaaagggtgtcaaaccgtaacttctggaaaggtgcgccatggagctctcacatgcctgtgtgtggctatgaaaaggcaggtcctctgttatgaactatttcagagcaagacccgtcacagaaaatttaaagaaattcaagtcccatataatgtccagtggatggcaatcttcagtgaacaactctgtgtgggattccagtcaggatttctaagataccccttgaatggagaaggaaatccatacagtatgctccattcaaatgaccatacactatcatttattgcacatcaaccaatggatgctatctgcgcagttgagatctccagtaaagaatatctgctgtgttttaacagcattgggatatacactgactgccagggccgaagatctagacaacaggaattgatgtggccagcaaatccttcctcttgttgttacaatgcaccatatctctcggtgtacagtgaaaatgcagttgatatctttgatgtgaactccatggaatggattcagactcttcctctcaaaaaggttcgacccttaaacaatgaaggatcattaaatcttttagggttggagaccattagattaatatatttcaaaaataagatggcag

SEQ ID NO: 284504 - DNA, 2457 bp, Artificial Sequence
  derived and/or modified sequence
atgatcctgaaggacaagctggagaagaccagaagagagagccagagcgagagagaggagttcgagagcgagttcaagcagcagtacgagagagagaaggtgctgctgaccgaggagaacaagaagctgaccagcgagctggacaagctgaccaccctgtacgagaacctgagcatccacaaccagcagctggaggaggaggtgaaggacctggccgacaagaaggagagcgtggcccactgggaggcccagatcaccgagatcatccagtgggtgagcgacgagaaggacgccagaggctacctgcaggccctggccagcaagatgaccgaggagctggaggccctgagaaacagcagcctgggcaccagagccaccgacatgccctggaagatgagaagattcgccaagctggacatgagcgccagactggagctgcagagcgccctggacgccgagatcagagccaagcaggccatccaggaggagctgaacaaggtgaaggccagcaacatcatcaccgagtgcaagctgaaggacagcgagaagaagaacctggagctgctgagcgagatcgagcagctgatcaaggacaccgaggagctgagaagcgagaagggcatcgagcaccaggacagccagcacagcttcctggccttcctgaacacccccaccgacgccctggaccagttcgaggacagcttcagcagcagcagcagcagcctgatcgacttcctggacgacaccgaccccgtggagaacacctacgtgtggaaccccagcgtgaagttccacatccagagcagaagcaccagccccagcaccagcagcgaggccgagcccgtgaagaccgtggacagcacccccctgagcgtgcacacccccaccctgagaaagaagggctgccccggcagcaccggcttcccccccaagagaaagacccaccagttcttcgtgaagagcttcaccacccccaccaagtgccaccagtgcaccagcctgatggtgggcctgatcagacagggctgcagctgcgaggtgtgcggcttcagctgccacatcacctgcgtgaacaaggcccccaccacctgccccgtgccccccgagcagaccaagggccccctgggcatcgacccccagaagggcatcggcaccgcctacgagggccacgtgagaatccccaagcccgccggcgtgaagaagggctggcagagagccctggccatcgtgtgcgacttcaagctgttcctgtacgacatcgccgagggcaaggccagccagcccagcgtggtgatcagccaggtgatcgacatgagagacgaggagttcagcgtgagcagcgtgctggccagcgacgtgatccacgccagcagaaaggacatcccctgcatcttcagagtgaccgccagccagctgagcgccagcaacaacaagtgcagcatcctgatgctggccgacaccgagaacgagaagaacaagtgggtgggcgtgctgagcgagctgcacaagatcctgaagaagaacaagttcagagacagaagcgtgtacgtgcccaaggaggcctacgacagcaccctgcccctgatcaagaccacccaggccgccgccatcatcgaccacgagagaatcgccctgggcaacgaggagggcctgttcgtggtgcacgtgaccaaggacgagatcatcagagtgggcgacaacaagaagatccaccagatcgagctgatccccaacgaccagctggtggccgtgatcagcggcagaaacagacacgtgagactgttccccatgagcgccctggacggcagagagaccgacttctacaagctgagcgagaccaagggctgccagaccgtgaccagcggcaaggtgagacacggcgccctgacctgcctgtgcgtggccatgaagagacaggtgctgtgctacgagctgttccagagcaagaccagacacagaaagttcaaggagatccaggtgccctacaacgtgcagtggatggccatcttcagcgagcagctgtgcgtgggcttccagagcggcttcctgagataccccctgaacggcgagggcaacccctacagcatgctgcacagcaacgaccacaccctgagcttcatcgcccaccagcccatggacgccatctgcgccgtggagatcagcagcaaggagtacctgctgtgcttcaacagcatcggcatctacaccgactgccagggcagaagaagcagacagcaggagctgatgtggcccgccaaccccagcagctgctgctacaacgccccctacctgagcgtgtacagcgagaacgccgtggacatcttcgacgtgaacagcatggagtggatccagaccctgcccctgaagaaggtgagacccctgaacaacgagggcagcctgaacctgctgggcctggagaccatcagactgatctacttcaagaacaagatggcctag

SEQ ID NO: 284505 - DNA, 2187 bp, Artificial Sequence
  derived and/or modified sequence
tgagtgagcgacgagaaggacgccagaggctacctgcaggccctggccagcaagatgaccgaggagctggaggccctgagaaacagcagcctgggcaccagagccaccgacatgccctggaagatgagaagattcgccaagctggacatgagcgccagactggagctgcagagcgccctggacgccgagatcagagccaagcaggccatccaggaggagctgaacaaggtgaaggccagcaacatcatcaccgagtgcaagctgaaggacagcgagaagaagaacctggagctgctgagcgagatcgagcagctgatcaaggacaccgaggagctgagaagcgagaagggcatcgagcaccaggacagccagcacagcttcctggccttcctgaacacccccaccgacgccctggaccagttcgaggacagcttcagcagcagcagcagcagcctgatcgacttcctggacgacaccgaccccgtggagaacacctacgtgtggaaccccagcgtgaagttccacatccagagcagaagcaccagccccagcaccagcagcgaggccgagcccgtgaagaccgtggacagcacccccctgagcgtgcacacccccaccctgagaaagaagggctgccccggcagcaccggcttcccccccaagagaaagacccaccagttcttcgtgaagagcttcaccacccccaccaagtgccaccagtgcaccagcctgatggtgggcctgatcagacagggctgcagctgcgaggtgtgcggcttcagctgccacatcacctgcgtgaacaaggcccccaccacctgccccgtgccccccgagcagaccaagggccccctgggcatcgacccccagaagggcatcggcaccgcctacgagggccacgtgagaatccccaagcccgccggcgtgaagaagggctggcagagagccctggccatcgtgtgcgacttcaagctgttcctgtacgacatcgccgagggcaaggccagccagcccagcgtggtgatcagccaggtgatcgacatgagagacgaggagttcagcgtgagcagcgtgctggccagcgacgtgatccacgccagcagaaaggacatcccctgcatcttcagagtgaccgccagccagctgagcgccagcaacaacaagtgcagcatcctgatgctggccgacaccgagaacgagaagaacaagtgggtgggcgtgctgagcgagctgcacaagatcctgaagaagaacaagttcagagacagaagcgtgtacgtgcccaaggaggcctacgacagcaccctgcccctgatcaagaccacccaggccgccgccatcatcgaccacgagagaatcgccctgggcaacgaggagggcctgttcgtggtgcacgtgaccaaggacgagatcatcagagtgggcgacaacaagaagatccaccagatcgagctgatccccaacgaccagctggtggccgtgatcagcggcagaaacagacacgtgagactgttccccatgagcgccctggacggcagagagaccgacttctacaagctgagcgagaccaagggctgccagaccgtgaccagcggcaaggtgagacacggcgccctgacctgcctgtgcgtggccatgaagagacaggtgctgtgctacgagctgttccagagcaagaccagacacagaaagttcaaggagatccaggtgccctacaacgtgcagtggatggccatcttcagcgagcagctgtgcgtgggcttccagagcggcttcctgagataccccctgaacggcgagggcaacccctacagcatgctgcacagcaacgaccacaccctgagcttcatcgcccaccagcccatggacgccatctgcgccgtggagatcagcagcaaggagtacctgctgtgcttcaacagcatcggcatctacaccgactgccagggcagaagaagcagacagcaggagctgatgtggcccgccaaccccagcagctgctgctacaacgccccctacctgagcgtgtacagcgagaacgccgtggacatcttcgacgtgaacagcatggagtggatccagaccctgcccctgaagaaggtgagacccctgaacaacgagggcagcctgaacctgctgggcctggagaccatcagactgatctacttcaagaacaagatggcctag

SEQ ID NO: 284506 - protein, 1781 aa, Artificial Sequence
  derived and/or modified sequence
MSGEVRLRQLEQFILDGPAQTNGQCFSVETLLDILICLYDECNNSPLRREKNILEYLEWAKPFTSKVKQMRLHREDFEILKVIGRGAFGEVAVVKLKNADKVFAMKILNKWEMLKRAETACFREERDVLVNGDNKWITTLHYAFQDDNNLYLVMDYYVGGDLLTLLSKFEDRLPEDMARFYLAEMVIAIDSVHQLHYVHRDIKPDNILMDMNGHIRLADFGSCLKLMEDGTVQSSVAVGTPDYISPEILQAMEDGKGRYGPECDWWSLGVCMYEMLYGETPFYAESLVETYGKIMNHKERFQFPAQVTDVSENAKDLIRRLICSREHRLGQNGIEDFKKHPFFSGIDWDNIRNCEAPYIPEVSSPTDTSNFDVDDDCLKNSETMPPPTHTAFSGHHLPFVGFTYTSSCVLSDRSCLRVTAGPTSLDLDVNVQRTLDNNLATEAYERRIKRLEQEKLELSRKLQESTQTVQALQYSTVDGPLTASKDLEIKNLKEEIEKLRKQVTESSHLEQQLEEANAVRQELDDAFRQIKAYEKQIKTLQQEREDLNKELVQASERLKNQSKELKDAHCQRKLAMQEFMEINERLTELHTQKQKLARHVRDKEEEVDLVMQKVESLRQELRRTERAKKELEVHTEALAAEASKDRKLREQSEHYSKQLENELEGLKQKQISYSPGVCSIEHQQEITKLKTDLEKKSIFYEEELSKREGIHANEIKNLKKELHDSEGQQLALNKEIMILKDKLEKTRRESQSEREEFESEFKQQYEREKVLLTEENKKLTSELDKLTTLYENLSIHNQQLEEEVKDLADKKESVAHWEAQITEIIQWVSDEKDARGYLQALASKMTEELEALRNSSLGTRATDMPWKMRRFAKLDMSARLELQSALDAEIRAKQAIQEELNKVKASNIITECKLKDSEKKNLELLSEIEQLIKDTEELRSEKGIEHQDSQHSFLAFLNTPTDALDQFETVDSTPLSVHTPTLRKKGCPGSTGFPPKRKTHQFFVKSFTTPTKCHQCTSLMVGLIRQGCSCEVCGFSCHITCVNKAPTTCPVPPEQTKGPLGIDPQKGIGTAYEGHVRIPKPAGVKKGWQRALAIVCDFKLFLYDIAEGKASQPSVVISQVIDMRDEEFSVSSVLASDVIHASRKDIPCIFRVTASQLSASNNKCSILMLADTENEKNKWVGVLSELHKILKKNKFRDRSVYVPKEAYDSTLPLIKTTQAAAIIDHERIALGNEEGLFVVHVTKDEIIRVGDNKKIHQIELIPNDQLVAVISGRNRHVRLFPMSALDGRETDFYKLSETKGCQTVTSGKVRHGALTCLCVAMKRQVLCYELFQSKTRHRKFKEIQVPYNVQWMAIFSEQLCVGFQSGFLRYPLNGEGNPYSMLHSNDHTLSFIAHQPMDAICAVEISSKEYLLCFNSIGIYTDCQGRRSRQQELMWPANPSSCCYNAPYLSVYSENAVDIFDVNSMEWIQTLPLKKVRPLNNEGSLNLLGLETIRLIYFKNKMAEGDELVVPETSDNSRKQMVRNINNKRRYSFRVPEEERMQQRREMLRDPEMRNKLISNPTNFNHIAHMGPGDGIQILKDLPMPGFPYPSPHHHSGLISSPINFEHIYHMTVNSAEKFLSPDSINPEYSPSLRSVPGTPSFMTLRNPRPQESRTVFSGSVSIPSITKSRPEPGRSMSASSGLSARSSAQNGSALKREFSGGSYSAKRQPMPSPSEGSLSSGGMDQGSDAPARDFDGEDSDSPRHSTASNSSNLSSPPSPASPRKTKSLSLESTDRGSWDP

SEQ ID NO: 284507 - protein, 984 aa, Artificial Sequence
  derived and/or modified sequence
  misc_feature (1)..(1): Xaa can be any naturally occurring amino acid
XQLEEEVKDLADKKESVAHWEAQITEIIQWVSDEKDARGYLQALASKMTEELEALRNSSLGTRATDMPWKMRRFAKLDMSARLELQSALDAEIRAKQAIQEELNKVKASNIITECKLKDSEKKNLELLSEIEQLIKDTEELRSEKGIEHQDSQHSFLAFLNTPTDALDQFETVDSTPLSVHTPTLRKKGCPGSTGFPPKRKTHQFFVKSFTTPTKCHQCTSLMVGLIRQGCSCEVCGFSCHITCVNKAPTTCPVPPEQTKGPLGIDPQKGIGTAYEGHVRIPKPAGVKKGWQRALAIVCDFKLFLYDIAEGKASQPSVVISQVIDMRDEEFSVSSVLASDVIHASRKDIPCIFRVTASQLSASNNKCSILMLADTENEKNKWVGVLSELHKILKKNKFRDRSVYVPKEAYDSTLPLIKTTQAAAIIDHERIALGNEEGLFVVHVTKDEIIRVGDNKKIHQIELIPNDQLVAVISGRNRHVRLFPMSALDGRETDFYKLSETKGCQTVTSGKVRHGALTCLCVAMKRQVLCYELFQSKTRHRKFKEIQVPYNVQWMAIFSEQLCVGFQSGFLRYPLNGEGNPYSMLHSNDHTLSFIAHQPMDAICAVEISSKEYLLCFNSIGIYTDCQGRRSRQQELMWPANPSSCCYNAPYLSVYSENAVDIFDVNSMEWIQTLPLKKVRPLNNEGSLNLLGLETIRLIYFKNKMAEGDELVVPETSDNSRKQMVRNINNKRRYSFRVPEEERMQQRREMLRDPEMRNKLISNPTNFNHIAHMGPGDGIQILKDLPMPGFPYPSPHHHSGLISSPINFEHIYHMTVNSAEKFLSPDSINPEYSPSLRSVPGTPSFMTLRNPRPQESRTVFSGSVSIPSITKSRPEPGRSMSASSGLSARSSAQNGSALKREFSGGSYSAKRQPMPSPSEGSLSSGGMDQGSDAPARDFDGEDSDSPRHSTASNSSNLSSPPSPASPRKTKSLSLESTDRGSWDP
